(19) United States
(12) Patent Application Publication
(10) Pub. No.: US 2014/0128277 A1
(43) Pub. Date: May 8, 2014

(54) Method for Identifying a Subset of Polynucleotides from an Initial Set of Polynucleotides Corresponding to the Human Genome for the In Vitro Determination of the Severity of the Host Response of a Patient

(71) Applicant: Analytik Jena AG, Jena (DE)

(72) Inventors: Eva Möller, Jena (DE); Andriy Ruryk, Jena (DE); Britta Wlotzka, Erfurt (DE); Cristina Guillen, Jena (DE); Karen Felsmann, Jena (DE)

(73) Assignee: Analytik Jena AG, Jena (DE)

(21) Appl. No.: 14/003,646

(22) PCT Filed: Mar. 7, 2012
(86) PCT No.: PCT/EP2012/053870

§ 371 Date: Jan. 9, 2014

(30) Foreign Application Priority Data
Mar. 8, 2011 (DE) 10 2011 005 235.6

(51) Int. Cl. C12Q 1/68

(52) U.S. Cl. CPC C12Q 1/6883
USPC 506/9; 435/6.12

(57) ABSTRACT

The invention discloses a method for identifying a subset of polynucleotides from an initial set of polynucleotides corresponding to the human genome for the in vitro determination of severity of the host response of a patient having a severe infectious and/or inflammatory condition, in a sample, a measuring device comprising a plurality of different gene probes which represent the entire human genome, the test persons, depending on their infectious and/or inflammatory status, are divided into at least two clinically determined phenotype groups, changes of the gene expression signals between the phenotype groups are compared statistically, and gene probes are selected based on the gene expression signals which have significantly changed statistically between at least two phenotype groups.

[0001] This application is a United States National Stage Application claiming the benefit of priority under 35 U.S.C. 371 from International Patent Application No. PCT/EP2012/053870 filed Mar. 8, 2012, which claims the benefit of priority from German Patent Application Serial No. DE 10 2011 005 235.6 filed Mar. 8, 2011, the entire contents of which are herein incorporated by reference.

[0002] The present invention relates to a method for identifying a subset of polynucleotides from an initial set of polynucleotides corresponding to the human genome for the in vitro determination of the severity of the host response of a patient being in a severe infectious and/or severe inflammatory condition. The invention further relates to the method of use of k tuples of polynucleotides selected from a group consisting of m polynucleotides having SEQ ID No: 1 to SEQ ID No: 7704, k being at least 7 and equal to or smaller than the number of polynucleotides m in the group, for determining a score as measurement for the severity of the host response of a test person being in a severe infectious and/or severe inflammatory condition. The invention further relates to the method of use of polynucleotides for performing the method in accordance with the invention. The invention likewise relates to the use of protein gene products from polynucleotides.

[0003] Sepsis (blood poisoning) is a life-threatening infection which can affect the entire body. It is associated with high mortality, is becoming increasingly prevalent and affects people at any age. Sepsis endangers medical process in many areas of high performance medicine and consumes a large portion of health care resources. Mortality of severe sepsis has not improved considerably in recent decades. The last two steps in innovation after introducing blood culture (around 1880) were the introduction of antibiotics over 60 years ago and the beginning of intensive care about 50 years ago. To achieve a similarly significant advance in treatment today, new types of diagnosis must be made available.

[0004] In international literature the criteria established at a consensus conference of the “American College of Chest Physicians/Society of Critical Care Medicine Consensus Conference (ACCP/SCCM)” of 1992 have gained broadest acceptance for defining the term sepsis [Bone et al., 1992]. The international sepsis conference of 2001 moreover proposed a new concept (named PIRO) for describing sepsis, which concept is composed of the criteria of predisposition, infection, immune response (response) and organ dysfunction [Levy et al., 2003]. Despite a new definition of SIRS/sepsis by the acronym PIRO [Opal et al., 2005] most studies still use the ACCP/SCCM consensus conference of 1992 [Bone et al., 1992] to classify their patients.

[0005] Life-threatening bacterial infections and the consequences thereof, i.e. sepsis and consecutive organ failure, are frequent complications in hospital patients and increase worldwide by 2% to 7% per year. In Germany, of roughly 154,000 ill persons 60,000 people die of severe sepsis, which thus is one of the most frequent causes of death in intensive care units. A specific antibiotics therapy started within the first few hours after the infection is considered to be crucial for successful treatment [Ibrahim et al., 2000; Fine et al., 2002; Garracho-Montero et al., 2003; Valles et al., 2003]. With 40% to 60% the mortality rate at present is unacceptably high, the risk in case of a delayed antibiotic therapy based on resistance test results rising considerably. The specific detection of the pathogen in sepsis at present is unsatisfactory in clinical application. The “gold standard” of blood culture suffers from lacking sensitivity and remains negative in 80% to 90% of all cases of sepsis. Moreover, the results of the blood culture only are provided after 24 to 72 hours and then merely form the basis of further microbial diagnostics (species differentiation, creation of an antibiogram). Frequently, a therapy using broad-spectrum antibiotics will be initiated at the time of a first suspicion of sepsis without safe microbiological results. On the one hand, this fosters the development of multi-resistant germs, on the other hand, antibiotic pre-treatment reduces the success rate of a blood culture taken at a later stage. Epidemiological data prove that in case of an inadequate therapy redoubled mortality [Valles et al., 2003], and in case of a delayed effective start of a therapy, an increase in mortality by more than 5% per hour is to be expected [Iregui et al., 2002; Ibrahim et al., 2000; Fine et al., 2002; Garnacho-Montero et al., 2003; Valles et al., 2003; Kumar et al., 2006].

[0006] Exact diagnosis of systemic inflammatory and infectious disease-related conditions and their causes and associated risks for subsequent complications is playing an important role for the clinical decisions for treating patients and subsequent follow-up observation not only in sepsis, but also in a number of other indications. In this context, the treatment of acute and chronically ill patients and perioperative monitoring are to be seen. It is known that in case of acute pancreatitis an infection significantly worsens the prognosis of a lethal outcome by 16% to 40%. In the event of a complex super-infection there is an elevated risk of sepsis with a mortality of up to 90%. Furthermore, the follow-up observation of intra-abdominal inflammation and/or infection in chronically ill, postoperative and trauma patients is important. There are difficulties even today of a clear clinical diagnosis of intra-abdominal infections. Follow-up monitoring of chronically ill persons, such as patients with liver cirrhosis or renal failure, is of clinical relevance since those patients may be predestined, depending on organ decompensation, to take an inflammatory and/or infectious course of disease. In particular, renal failure patients with peritoneal dialysis are prone to chronic inflammations and infections [Blake, 2008]. Of particular interest is the observation of patients with liver cirrhosis as those patients may spontaneously develop bacterial peritonitis, which has a high mortality [Koulaouzidis et al., 2009]. The diagnosis of secondary peritonitis within the scope of postoperative treatment is of great clinical value and may and may greatly influence the success of surgery. Postoperative infections still are a major problem today in surgical treatment. One percent of laparatomies carried out result in complications after surgery. Here, the complication rates between the surgical procedures may vary considerably. In particular, insufficient suturing may result, in operations on the gastro-intestinal tract, in fulminant spread of bacteria into the sterile abdominal cavity.

[0007] Infectious courses play a role, among other things, in post-surgery follow-up treatment after transplantations, thoracotomies, limb and joint corrections and neurosurgical operations.

[0008] The person of ordinary skill in the art is aware that these examples are merely illustrative and that there are numerous other fields of application for which the identification and observation of the course of an infectious inflammatory process and assessment of its severity and the resulting risk of corresponding complications are of great importance. The present invention provides a solution to this diagnostic problem.

[0009] The morbidity and contribution to mortality of SIRS and sepsis is of interdisciplinary clinical and medical importance as this will, increasingly, put at risk the gains in treatment results achieved in advanced therapeutic methods in numerous medical fields (such as. e.g. traumatology, neurosurgery, heart and lung surgery, visceral surgery, transplantation medicine, hematology/oncology, etc.) which without exception intrinsically bear an increased disease risk for SIRS and sepsis on account of unbalanced and uncontrolled infectious-inflammatory processes. This also is reflected in the frequency of sepsis rising steadily: from 1979 to 1987, an increase by 139%, i.e. from 73.6 to 176 cases of illness per 100,000 hospital patients, was recorded [MMWR Morb Mortal Wkly Rep 1990]. The reduction of morbidity and mortality for a large number of seriously ill patients therefore is tied to simultaneous progress in the prevention, treatment and in particular detection and follow-up monitoring of sepsis and severe sepsis.

[0010] Particularly in patients that have overcome an initial fulminant systemic inflammatory response to highly virulent pathogens, there is long phase (of up to several weeks) of an increased risk for sepsis-induced multi-organ failure. At present, induced immune suppression is discussed as being the cause of such risk. In addition to the immune system being incapable of neutralizing a primary infection, intensive care patients quite frequently develop secondary infections with multiple antibiotic-resistant and little virulent germs or there is an onset of latent viral infections [Hotchkiss et al. 2009, 2010], resulting in high clinical relevance, particularly in view of an increasing development of resistance against antibiotics and the lack of new effective antimicrobial agents. An important object of clinical research therefore is the prevention of such sepsis-induced immunosuppression. Molecular targets for intervention in form of a molecular immune therapy are well known (such as IL-15 and IL-7 as anti-apoptotic and immuno-stimulatory cytokines); however, first clinical tests reveal that the therapy decision should be based on the individual immune status. Tight monitoring of innate and adaptive immune functions in further studies requires new and more complex measuring instruments for immunosuppressed patients in order to shift the balance of pro- and anti-inflammatory signals to the benefit of the patients.

[0011] The following mechanisms are presently considered as mechanisms of immunosuppression:
[0012] Production of anti-inflammatory cytokines, e.g. IL-10; by this, a development of so-called T-cell anergy may be induced (non-responsive behavior)
[0013] Die-off of immunocompetent cells
   [0014] Apoptoptic depletion of immunoeffector cells (e.g. lymphocytes and dendritic cells)
   [0015] The restoration of a normal population of specific cells obviously is tied to an improved prediction
[0016] Suppression of MHC-ClassII molecules (Suppression of the induction of an adaptive immune response)
[0017] Expression of negative co-stimulatory molecules (PD-1, CTLA-4)

[0018] A study [Meisel et al 2009] provides the first example for therapeutic intervention in immunosuppressed patients. Molecular surface markers of monocytes were utilized (HLA-DR) in order to gain a statement on the immune status. A strongly reduced population in monocytes is a characteristic indication for sepsis-associated immunosuppression (also shown in Venet et al. 2010). In case of a minor HLA-DR expression in the blood of patients, the patients were treated with the growth factor GM-CSF or with a placebo. GM-CSF has strong immunostimulatory properties; in particular, phagocytosis, proliferation, and the pathogen defense of neutrophils and monocytes/macrophages are stimulated. Previous studies revealed that immunostimulants may reverse a long-lasting deactivation of monocytes. As a result of the study, an increase by number could be proved for many immunocell populations: both monocytes and neutrophils and lymphocyte populations were benefitting from the treatment. The patients in the treatment group likewise exhibited improvements in their clinical state: a shorter period of ventilation and hospitalization were noticeable. For the first time, the positive influence of a biomarker-guided immunostimulatory therapy on an immunological and clinical level could be attested.

[0019] In a further study, the immunosuppressive phase of sepsis was characterized more closely [Muenzer et al. 2010]. A phase of ongoing immunosuppression follows an initial hyper-inflammatory phase that may be connected with a so-called cytokine attack, resulting early organ damage and death of the patients. The balance of the immune system hence is disturbed in both phases; the importance of an intervention in the second phase is emphasized by the occurrence of secondary infections and extremely high mortality. In a mouse model it could be demonstrated how in the course of sepsis over a period of 7 days IL-10 synthesis could be blocked using an immunomodulator and the production of pro-inflammatory cytokines could be stimulated. In particular, it was ascertained that the point of time of a so-called “second hit”, i.e. a second infection, is of crucial importance to the survival of the organism. The status of immunoparalysis in the mouse model lasted 4 days, on day 7 after the septic stimulus immune response in part was restored. This was expressed in the survival rate of the animals after a septic stimulus which was higher after 7 days than after 4 days. In a hypo-inflammatory time frame (4 days) the survival rate likewise could be increased by immunomodulator AS101 and/or by blocking IL-10. Up to the normalization of the immune status, recurrence of innate immune cells and a balance of pro- and anti-inflammatory signaling cascades there thus arises a critical gap with a high risk for further infections and survival of the patient.

[0020] A further study describes drastic changes in the populations of lymphocytes in patients suffering from a septic shock [Venet et al. 2010]. The fact that such extensive changes mostly can be detected at the time of diagnosis points out to the fact that they constitute a very early event in the chain of processes that lead to immunoparalysis and predisposition for further infections. In studies with patients the exact beginning of a septic episode cannot be defined exactly; thus, the study populations with regard to the course of the disease cannot be synchronized reliably. However, it could be ascertained that after onset of a septic shock the immunosuppressed condition continued for approximately 48 hours despite intensive care measures. Here arises an enormous need for a monitoring tool to qualify patients for immunomodulatory interventions.

[0021] The immune status of patients being diagnosed with sepsis consequently is strongly impaired. Impairment relates both to the innate and the adaptive immune system. Characteristics of such impairment are the loss of immunoeffector cells from the peripheral blood stream through apoptosis, a decline in the expression of MHCII molecules and a decline in monocytes that can be stimulated by cytokines. Such impairment of an immune condition may be reversible. The consequence of such impairment on the one hand is an insufficiency of eliminating infections and controlling the source of an infection, so that it continues to remain active. On the other hand, the probability that secondary nosocomial infections are formed is very high. Such infections frequently are caused by minor pathogenic bacteria that are no hazard in an intact immune condition.

[0022] A macroscopic post-mortem examination of 235 critically ill patients the death of which was caused by sepsis or septic shock, showed that in 80% of those cases an active infection source was ascertained [Torgersen et al., 2009]. The organs that were hit the most were the lung, abdomen, and the genitor-urinary tract. A large number of those patients was transferred to the intensive care unit on account of their being diagnosed with sepsis and treated for more than 7 days prior to their death. Such a period of time may be regarded as being sufficiently long in order to bring an infectious source under control. Although an immediate control of the infectious source in combination with antibiosis constitute the central measures of a sepsis therapy, the measures for controlling the infectious source had not been successful in the majority of patients participating in trials and appear to have been the cause of their death. The authors of the publication recommend the development of improved diagnostic and therapeutic methods in order to cope with the medical needs in this field.

[0023] A recently published study draws the conclusion that about 20% of patients admitted to hospital under suspicion of sepsis after careful examination in fact exhibit non-infectious causes of the disease the presentation of which, however, being equal to that of sepsis. The authors interpret their findings to the effect that sepsis rather comprises the continuum of a syndrome and does not constitute a definite specific disease [Heffner et al., 2010].

[0024] In a cohort of 857 patients the endotoxin level was examined on the day of their being transferred to the intensive care unit. In so doing, it was found that endotoxemia, a significantly increased level of endotoxins in the patients' blood, is widespread in critically ill patients. In more than half of all patients examined an endotoxin level was measured that was higher than two standard deviations of the value determined in healthy test persons. At the same time, a large discrepancy between a high endotoxin value and the number of confirmed infections with gram-negative pathogens was observed. It is concluded that the origin of the endotoxin is of endogenous nature and has to lie in the enteric flora, both endotoxin and viable bacteria being able to find their way into the blood stream on account of translocation processes. High endotoxin values were correlated with higher APACHE II scores and a higher prevalence of severe sepsis, so that it is assumed that endotoxemia is an indication for a high-risk sub-population in critically ill patients [Marshall et al., 2004]. Endotoxemia likewise may be regarded as being the cause of an excessive stimulation of the immune system.

[0025] A review gives an overview on clinical and immunological parameters that determine the risk of developing a septic complication with lethal consequences after serious surgical operations and trauma [Kimura et al., 2010]. The current prior art suggests that surgical operations and traumatic injuries have such heavy impact on the so-called innate and adaptive immune response that suppression of cellular immunity of the body as a result of an excessive inflammatory reaction is responsible for a high susceptibility of a subsequent septic episode. The reaction cascades of an innate and adaptive immune response are initiated and modulated by so-called Pathogen-Associated Molecular Structures (PAMPS) and tissue Damage-Associated Molecular Structures (DAMPS) through the corresponding identification receptors.

[0026] The spectrum of the incidence of disease that is thus comprised by the invention is the progression of an infectious-inflammatory reaction of the body that also is referred to as host response, from the ability of effectively combating pathogens to the suppression of immune defense, in which the pathogens persist in the location of the infection and secondary and/or nosocomial infections occur.

[0027] In the use of molecular-diagnostic DNA-based pathogen identification clinically irrelevant results such as non-illness-associated bacteremia, the presence of freely circulating bacterial and fungal nucleic acids from colonization as well as the detection of non-vital pathogen cells are problematic to assessing the result. Evidence of the presence of circulating microbial DNA from translocation processes or the transient presence of non-disease-associated bacteria in the blood was proved in vivo [Dagan et al., 1998; Isaacman et al., 1998]. The origin and clinical significance of such false positive findings are mostly unclear and could result from so far unknown interactions of a host and the pathogen [Schrenzel, 2007]. Moreover, cases are known in which bacteria were isolated from the blood of symptome-free blood donors and even transient fungemia without visible clinical significance was already reported [Davenport et al., 2007, Rodero et al., 2002].

[0028] In the “unclear” cases described above the measurement of an immune condition by definition may be used so as to more reliably assess the significance and clinical relevance of the findings resulting from DNA-based pathogen detection.

[0029] The subject matter of the invention may be summarized as follows. An excessive stimulation of the immune system through PAMPS and DAMPS, e.g. by way of an uncontrolled center of infection or excessive inflammatory occurrence after a severe surgical operation, has influence on the innate and adaptive immune system. The resulting reaction of the body, also referred to as host response, and the resulting “immune burden” depends on the extent, quantity, duration and/or frequency of an infectious and/or inflammatory stimulation. The stimulation cannot be measured directly, but as a reaction of the body to the stimulation, as severity of the host response. The reaction is subject to continuous change in form of an increase from the state of a healthy person to a maximum as is e.g. the case in the extreme example of an infection in the blood stream. As was shown in a large number of studies, the body in such a state no longer is equipped with the protective mechanisms of the immune system. Existing infections can no longer be combated effectively. There is a high risk in this phase of developing a secondary infection. This applies especially in cases in which sterile processes were the cause of inducing an immunosuppression. Clinical measures such as, for example, identifying the cause of the excessive stimulation, controlling the center of infection, surgical control of the source of an infection, specific antibiosis or preventive medicinal therapies for termination/blocking of immunosuppression have to be initiated promptly in those cases.

[0030] The invention provides a diagnostic test that may be used for determination and follow-up observation of the described process of the disease as well as for controlling the success of therapeutic measures taken.

[0031] An excessive stimulation may have the following causes:

[0032] Uncontrolled center of infection

[0033] Insult through sterile inflammatory event
[0034] Tissue damage on account of an operation
[0035] Tissue damage on account of trauma
[0036] Necrotic processes

[0037] Endotoxemia
[0038] Translocation from the intestines due to a severe pathological event

[0039] The indicated processes lead to a transient induced immunosuppression of the innate and adaptive immune system and are correlated with:
[0040] High mortality through an uncontrolled center of infection
[0041] High risk of a nosocomial or secondary infection associated with life-threatening complications

[0042] Such a pathophysiologic event has to be countered by clinical measures that are suited for the respective case:
[0043] Identification of an infection through escalation of diagnostic measures
[0044] Infectious source control, also through surgical intervention
[0045] Specific antibiosis in known pathogens
[0046] Calculated antibiosis for the prevention of a secundary infection
[0047] Immunostimulatory therapeutic measures
[0048] Anti-inflammatory therapeutic measures in sterile infectious events

[0049] Several approaches to the diagnosis of SIRS and sepsis have been developed.

[0050] One group contains scoring systems such as APACHE, SAPS and SIRS, which can stratify the patients on the basis of a wide variety of physiological indices. While in some studies a diagnostic potential could be proven for the APACHE II score, other studies have shown that APACHE II and SAPS II are not able to differentiate between sepsis and SIRS [Carrigan et al., 2004].

[0051] In their review, Pierrakos and Vincent [Pierrakos et al., 2010] summarize the state of the search for a biomarker for the indication of sepsis. 3370 publications for 178 different biomarkers were inspected. It was concluded that most biomarkers were examined predominantly in clinical trials and mainly as prognostic markers. Few were tested as diagnostic markers. None of those candidates has shown sufficient sensitivity or specificity for a routine application in hospital. None of the markers was tested for the problem of a patient's immune status. Although Procalcitonin (PCT) and C-reactive Protein (CRP) are used, they likewise exhibit only limited properties in differentiating sepsis and other inflammatory conditions, or the usefulness of predicting specific outcomes.

[0052] Procalcitonin is a 116 amino acid protein that plays a role in inflammatory responses. Despite the wide acceptance of the biomarker PCT international studies have revealed that the achieved sensitivies and specificities of the sepsis marker PCT are still insufficient, especially in differentiating between a systemically bacterial SIRS, i.e. sepsis, and a non-bacterial SIRS [Ruokonen et al., 1999; Suprin et al., 2000; Ruokonen et al., 2002; Tang et al., 2007a]. The meta-analysis by Tang and colleagues [Tang et al., 2007a] in which 18 studies were considered, shows that PCT is poorly suited to discriminate SIRS from sepsis. Moreover, the authors emphasize that PCT has a very weak diagnostic accuracy with an Odd Ratio (OR) of 7.79.

[0053] C-reactive protein (CRP) is a 224 amino acid protein that plays a role in inflammatory reactions. The CRP measurement serves as an indicator of the progress of the disease as well as to effectiveness of the chosen therapy.

[0054] Several reports have described that in the intensive care area PCT is more suited as a marker for diagnostics than CRP [Sponholz et al., 2006; Kofoed et al., 2007]. In addition, PCT is considered better suited than CRP for distinguishing a non-infectious vs. infectious SIRS and to distinguish bacterial infection vs. a viral infection [Simon et al., 2004].

[0055] It is obvious to the person of ordinary skill in the art that the solution provided with this invention can be combined with the above-indicated biomarkers such as PCT or CRP, but not limited to these, in order to expand the diagnostic value.

[0056] A further group includes biomarkers or profiles, which were identified on the transcriptome level. Gene expression profiles or classifiers are suitable for determining the severity of sepsis [WO 2004/087949], the distinction between local and systemic infection [unpublished DE 10 2007 036 678.9], identifying the source of infection [WO 2007/124820] or of gene expression signatures for distinguishing between various etiologies and pathogen-associated signatures [Ramilo et al., 2007]. However, due to insufficient specificity and sensitivity of the consensus criteria according to [Bone et al., 1992], of the currently available protein markers and also due to the time required for proof of the source of infection through blood culture, there is an urgent need for new procedures which take into consideration the complexity of the disease. Many gene expression studies that are based on either individual genes and/or combinations of genes identified as classifiers, and numerous descriptions of statistical methods to derive a score and/or index [WO 2003/084388; U.S. Pat. No. 6,960,439] are part of the prior art.

[0057] In the use of gene expression markers for identifying a pathophysiological condition the quantities of the corresponding mRNA that are present in a sample, the gene expression levels, are quantified. The information determined by such gene expression levels is the respective over- or under-expression of these mRNAs that is determined experimentally based on a control state or based on control genes. Ascertainment of an over- or under-expression may be considered analogously to determining the concentration of a protein bio marker.

[0058] Several applications of gene expression profiles are known in the prior art.

[0059] Pachot and colleagues [Pachot et al., 2006] examined whether, based on differential whole blood gene expressions, predictions for the outcome variable survival vs. non-survival in patients with septic shock may be made. For this problem they identified, by screening on an affimetrix array, a signature of 28 differentially expressed genes. In a very small test data set they demonstrated that by this signature, survivor and non-survivor can be differentiated with high sensitivity and specificity. For plausibility of their result they reason that the late phase of a septic shock is characterized by the development of an immunosuppressed condition and that restoration of the immune function is necessary for the survival of the patients. In this respect, they state that a number of over-expressed genes in survivors are to be allocated to the innate immune system and explain the ascertained over-expression by a recovery of the immune system.

[0060] US 2008/0020379 A1 relates to the diagnosis and prognosis of infectious diseases, clinical phenotypes and other physiological conditions, thereby using host gene expression biomarkers in blood.

[0061] According to the abstract, the point of US 2008/0020379 A1 is that specific sets of gene expression markers from peripheral blood (leukocytes) may be an indication to a host response to exposure, response and recovery of infectious pathogen infections.

[0062] US 2008/0020379 A1 merely generally points out to the fact that by using the unique technique disclosed in US 2008/0020379 A1 it is possible to diagnose a large number of various diseases. Furthermore, in paragraph [0293] on page 22, right column of US 2008/0020379 A1, reference is merely made to customary statistical methods.

[0063] On page 24 in paragraph [0324], US 2008/0020379 A1 lists possibilities in diagnostics and in so doing refers to inflammatory diseases, wherein 48 inflammation genes for rheumatoid arthritis were used that come from a commercial source, i.e. “Source Precision Medicine”. Paragraph [0608] of page 45, right column, to page 46, left column, first section, quotes a list of genes conducted as “batch search” in the “Genetic Association database”.

[0064] Paragraph [0533] on page 44, left column, discloses that the biomolecular pathways that are expressed differentially at cell level are able to differentiate between adenovirus infections and non-adenovirus infections. To determine these pathways reference was made to the analysis following in paragraph [0533] by way of the KEGG pathway and the “Genetic Association” databases using EASE (70) to elucidate the functions of these genes with regard to molecular issues.

[0065] The aforementioned list of genes indicated in paragraph [0608] likewise belongs to this and US 2008/0020379 A1 thus relates to a distinction between adenovirus infections and non-adanovirus infections.

[0066] Nowhere in the description of US 2008/0020379 A1 are the test persons classified into local and systemic, depending on their status of infection and/or information.

[0067] Document US 2009/0307181 A1 relates to genetic analyses and the determination of genetic health scores for specific phenotypes such as, for example, diseases, disorders, treatments and conditions both for organ systems and for specific medical specialties and the overall state of health.

[0068] Paragraph [0195] of US 2009/0307181 A1 mentions, thereby referring to FIGS. 15 to 24, 26 to 33 and 39, that so-called panels of phenotype groups can be scrutinized within the scope of the document. The indicated panels are held generally and relate—without individual evidence—more or less to the entire clinical diagnostics and e.g. comprise such different inflammatory diseases as gastrointestinal diseases of unclear etiology, viral hepatitis, rheumatoid arthritis, systemic Lupus erythematosus, malaria, chronically obstructive lung diseases, autoimmune diseases as well as an infection panel (page 42, right column). In FIG. 15R of US 2009/0307181 A1, for example, rheumatoid arthritits is treated with a list of genes indicated in column 2 and so-called “reflex testing phenotypes”. However, now division into systemic or non-systemic was performed here, but the risk of falling ill with rheumatoid arthritis is scrutinized in connection with an exposure to the smoke of cigarettes.

[0069] FIG. 15V of US 2009/0307181 A1 includes Morbus Crohn as inflammatory bowel disease and/or ulcerative colitis. Moreover, as phenotypes, age and onset of the Crohn disease and localization and/or severity of the colitis are indicated therein. Paragraph makes reference to a set of phenotypes that, according to US 2009/0307181 A1, can be identified for a correlation of infectious diseases and pulmonology. Such phenotypes may include two or several phenotypes. Here, however, reference is merely made to general panels such as, for example, the World Infectious Disease Panel, HIV Panel, Malaria Panel, Viral Hepatitis Panel, Infection Panel, etc.

[0070] Paragraph [0408] on page 94, left column, of US 2009/0307181 A1, among numerous other possibilities, e.g. also indicates acute and chronic infections, sepsis and SIRS in addition to atrial fibrillation.

[0071] To a skilled person, the abundance of examples indicated in US 2009/0307181 A1, which, for the most part, are provided without biostatistical data, lack a reproducible teaching. This view is substantiated, for example, by feature b) of claim 1 of US 2009/0307181 A1, which reads “using a computer to determine the predisposition or carrier status of said individual for at least two phenotypes . . . .” Since no algorithms are referred to as to how such determination is to be performed, the teaching of US 2009/0307181 A1—as far as it is to be discerned at all—is inexplicable and not executable.

[0072] Document US 2010/0293130 A1 relates to genetic analysis systems and methods for these systems. According to the abstract the document essentially is about providing methods of determining a genetic composite index score for assessing an association between an individual's genotype and at least one disease or condition.

[0073] In particular, US 2010/0293130 A1 compares an individual's genomic profile with a database of medically relevant genetic variations that was established to be associated with one specific disease or one specific pathophysiological condition.

[0074] Document US 2010/0293130 A1, in paragraph [0115] on page 12, right column, discloses that a specific phenotype may be associated with corresponding genotypes correlated therewith. According to US 2010/0293130 A1, this may include Morbus Crohn, Lupus, Psoriasis as well as rheumatoid arthritis as inflammatory diseases.

[0075] Claim 1 of US 2010/0293130 A1 relates to a general method of generating at least one genetic composite index score based on a phenotype correlation without an explicit indication which genes are to be used. For lupus and rheumatoid arthritis in addition to a large number of other diseases it is to be seen from claim 133 on page 33 that a specific gene expression profile is generated and compared to a correlation between an SNP and a phenotype, and that a list of specific SNPs associating with a specific phenotype, is indicated.

[0076] Boldrick et al. (2002): Stereotyped and specific gene expression programs in human innate immune responses to bacteria, PNAS 99, 972-977 describes in particular on page 973, left column, last section, the host response to an immunological provocation with gram-negative bacteria, analyzed based on a group of 206 genes, however, nowhere in Boldrick et al. (2002) is a phenotype classification into local and systemic to be found.

[0077] Tang et al. (2007b): The Use of Gene Expression Profiling to Identify Candidate Genes in Human Sepsis, Am J Respir Crit. Care Med 176, 676-684 relates to the use of gene expression profiles for identifying gene candidates in human sepsis.

[0078] According to the abstract and the box indicated on page 676, right column, Tang et al. (2007b) relates to the diagnosis of sepsis by way of gene expression profiles and also mentions a mechanistic-biological insight into the host response in sepsis.

[0079] Tang et al. (2007b) thus relates to the “classic” approach of searching for specific “lead genes” for sepsis and correlating the gene expression thereof with a prognosis on the course of sepsis.

[0080] This is to be seen from the fact that a set of 50 signature genes, according to Tang et al. (2007b) correctly identified sepsis, with a prognosis probability of 91% and 88% in the training and validation sets. Tang et al. (2007b) further argue that specific genes that play a role in immunomodulation and inflammatory response showed a reduced expression in sepsis patients.

[0081] In particular, Tang et al. (2007b) demonstrate that activation of the core factor Kappa B metabolic pathway was diminished, whereas the corresponding inhibitor gene NFKBIA was controlled significantly high.

[0082] Accordingly, Tang et al. (2007b) concluded that the found signature genes suppress a suppression of the immune and inflammatory function of neutrophils in sepsis. In the view of authors Tang et al. (2007b) gene expression profiles thus offer a new approach in order to comprehend the host response in sepsis.

[0083] According to page 678 of Tang et al. (2007b) it is set forth under the key word “Statistical Analysis” that the authors developed a model for the prognosis of sepsis, thereby using the data of the training set. According to page 679, left column, section under the table, as well as FIG. 3A, Tang et al. (2007b) identified three clusters of coordinately expressed genes. According to the heat map of FIG. 3A, these clusters relate to a mitochondrial functional cluster, an immune regulation cluster as well as an inflammatory response cluster.

[0084] However, nowhere in Tang et al. (2007b) it is discernible that phenotypes are to be formed in accordance with claim 1 of the present application.

[0085] Warren et al. (2009): A Genomic Score Prognostic of Outcome in Trauma Patients, Mol Med 15, 220-227, relates to a genomic score that is to be prognostic to the outcome in trauma patients.

[0086] Finally, Xu et al. (2010) describe: Human transcriptome array for high-throughput clinical studies, PNAS 108, 3707-3712, a transcriptome array for high-throughput in clinical studies and in particular describes oligonucleotide arrays with 6.9 million oligonucleotides.

[0087] The present invention may be delimited against the prior art discussed at the beginning. The subject matter of the invention is the determination and follow-up observation of a reaction of the body to infectious and/or inflammatory stimulation, also referred to as host response, and a resulting “immune burden”. It is independent of the presence of a septic shock and is not restricted to such a group of patients. The present invention was made for determining a specific condition and not for distinguishing between survival vs. non-survival after a septic shock. Moreover, the present invention is independent of the presence of an infection in accordance with the current definition of sepsis. As will be shown in the present description, a critical condition, i.e. a maximum “immune burden” may exist even without an infection, e.g. an excessive stimulation of the innate system through other causes. The application of the invention consists in deriving suitable therapeutic measures and monitoring the follow-up of the disease, but not in predicting which of the patients will survive.

[0088] In a Review [Monneret et al., 2008] the importance of an effectively functioning immune system is illustrated based on a number of scientific results, and it is summarized which trials render such hypothesis plausible. At the same time the review sets forth that suitable methods for routine determination of an immune state still have to be determined.

[0089] The prior art includes numerous studies for identifying gene expression markers [Tang et al., 2007b] or gene expression profiles for determining a systemic infection [Johnson et al., 2007].

[0090] Tang and colleagues [Tang et al., 2007b] looked in a particular blood cell population, the neutrophils, for a signature which makes it possible to distinguish between patients with SIRS and sepsis. 50 markers from this cell population suffice to reproduce an immune response to systemic infection and enable new discoveries into the pathophysiology and the involved signaling pathways.

[0091] The classification of patients with and without sepsis succeeds with high reliability (PPV 88% and 91% in training and test data sets). The applicability for clinical diagnosis is, however, limited by the fact that in blood the signature of signals from other blood cell types can be overlaid. Regarding the applicability, the preparation of such a blood cell population is associated with a significantly increased effort. The significance of the results published in this study, however, is limited for practical applications because the patient selection was very heterogenous. Patients were included in the study that had very different concomitant diseases such as e.g. up to 11% to 16% tumor diseases, or were subjected to very different therapeutic measures (e.g. 27% to 64% vasopressor therapy), whereby gene expression profiles were strongly affected.

[0092] Johnson and colleagues [Johnson et al., 2007] describe on the basis of a group of trauma patients that the expression of sepsis can be measured based on molecular alterations already up to 48 hours prior to clinical diagnosis. The trauma patients were examined over several days. Part of the patients developed sepsis. Noninfectious SIRS patients were compared to pre-septic patients. The identified signature of 459 transcripts consisted of markers of the immune response and inflammatory markers. The sample was whole blood, the analyses were performed on a microarray. It is unclear as to whether this signature can be expanded also to other types of groups of septic or pre-septic patients. A classification and diagnostic benefit of this signature was not shown.

[0093] The objective of all those papers is to identify an infectious occurrence by differential gene expression. Thus, those publications can be delimited well from the subject matter of the present invention, i.e. the identification and follow-up observation of a reaction of the body to infectious and/or inflammatory stimulation, also referred to as host response, and a resulting “immune burden”.

[0094] The goal of Feezor and colleagues [Feezor et al., 2003] was to identify differences between infections with gram-negative and gram-positive pathogens. Blood samples of three different donors were stimulated ex vivo with E. coli-LPS and heat-activated S. aureus. Using microarray technology, gene expression studies were performed. The work group found both genes that were up-regulated after S. aureus stimulation and down-regulated after LPS stimulation, and that were more strongly expressed after treatment with LPS than after the addition of heat-activated S. aureus germs. At the same time, many genes were upregulated to the same extent by gram-positive and gram-negative stimulation. This relates, for example, to cytokines TNF-α, IL-1β and IL-6. The differentially expressed genes unfortunately were not published by name, so that only an indirect comparison with other results is possible. In addition to the gene expression, Feezor and colleagues also examined the plasma concentrations of some cytokines. It was found that the gene expression data did not necessarily correlate with the plasma concentrations. In gene expression, the quantity of mRNA is measured. This, however, is subject to posttranscriptional regulation prior to protein synthesis, from which the observed differences may have resulted.

[0095] The most interesting publication on this subject was published by the Texan research group of Ramilo [Ramilo et al., 2007]. Here, gene expression studies on human blood cells also were carried out, which uncovered differences in the molecular host response to various pathogens. For this, pediatric patients with acute infections such as acute respiratory diseases, urinary tract infections, bacterimea, local abscesses, bone and joint infections and meningitis were examined. Microarray experiments were carried out with RNA samples which were isolated from peripheral mononuclear blood cells of ten patients respectively, with E. coli or S. aureus infection. Identification of the pathogens was carried out by blood culture. On the basis of the training data set 30 genes were identified by the use of which the causative pathogen germs could be diagnosed with high accuracy.

[0096] Those papers can be delimited clearly from the present invention as herein, the host response of the causative pathogens is to be identified by way of gene expression signatures, whereas the invention is to be used for determination and follow-up observation of the reaction of a body to infectious and/or inflammatory stimulation and a resulting “immune burden”.

[0097] None of those publications offers the reliability, accuracy and robustness of the invention disclosed here. These studies are focused on identifying the, from a scientific perspective, “best” multi-gene biomarker (classifier), but not, as in the present invention, the optimal multi-gene biomarker for a specific clinical problem [Simon et al., 2005].

[0098] Thus, it is the object of the present invention to provide a test system with which rapid and reliable assessment of a pathophysiological condition, in the present case the determination and follow-up observation of the reaction of a body to infectious and/or inflammatory stimulation, also referred to as host response, and the resulting “immune burden”, can be made without having to rely on condition-specific biomarkers.

[0099] The invention relates in particular to a method for identifying a subset of polynucleotides from an initial set of polynucleotides corresponding to the human genome for the in vitro determination of the severity of the host response of a patient being in an acutely infectious and/or acutely inflammatory condition, in a sample, a measuring device being used that comprises a plurality of different gene probes that essentially represent the entire human genome, wherein
[0100] samples of nucleic acid of a plurality of test persons exhibiting a known phenotypic physiological condition are brought into contact with the probes of the measuring device so as to obtain signals of the respective expression of a gene;
[0101] of the total number of gene probes deployed, those are selected that provide an expression signal of detectable intensity for at least one sample of nucleic acid of a test person;
[0102] the test persons, depending on their infectious and/or inflammatory status, are divided into at least two of the following clinically determined groups of phenotypes:

Inflammation

| | Systemic | Local | None |
|---|---|---|---|
| Infection | [S] | [L] | [N] |
| Systemic [S] | SaS | | |
| Local [L] | LaS | LaL | |
| None [N] | NaS | NaL | NaN |

wherein a“ represents an AND-operation between the properties S, L and N;

[0103] the changes of the gene expression signals between the groups of phenotypes are compared statistically and it is assessed as to whether there is a significant difference between at least two of the groups of phenotypes;
[0104] those gene probes are selected the gene expression signals of which have significantly changed statistically between at least two groups of phenotypes and an estimated number of those gene probes is excluded that provide a false positive result in relation to a predetermined threshold value;
[0105] a master score is determined as measurement for the severity of the host response of a test person being in an acutely infectious and/or acutely inflammatory condition, by quantifying an increase and decrease in the gene expression intensity of the selected gene probes; and

[0106] compared to the initial set, a considerably reduced number of polynucleotides is identified by determining a score that comprises at most a predetermined deviation from the master score and that likewise serves as a measurement for the severity of the host response of a test person being in an acutely infectious and/or acutely inflammatory condition.

[0107] Moreover, the present invention relates to the method of use of k-tuples of polynucleotides selected from the group consisting of m polynucleotides with SEQ ID No: 1 to SEQ ID NO: 7704, wherein k is at least 7 and equal to or lower than the number of polynucleotides m in the group; for identifying a score as measurement for the severity of the host response of a test person being in an acutely infectious and/or acutely inflammatory condition.

[0108] The method of use of k tuples of polynucleotides selected from a group consisting of m poly-nucleotides with SEQ ID No: 1 to SEQ ID No: 7704, wherein k is at least 7 and equal to or lower than the number of polynucleotides m in the group for performing the method in accordance with the invention.

[0109] The sub-claims relate to preferred embodiments of the present invention.

[0110] In Applicant's practice it has turned out that such a method of use is particularly suited that is characterized by the gene activities being captured by way of enzymatic methods, particularly amplification methods, preferably polymerase chain reaction (PCR), preferably real time PCR, especially probe-based methods such as Taq-Man, Scorpions, Molecular Beacons; and/or by way of hybridization methods, particularly those on micro arrays; and/or direct proof of mRNA, particularly sequencing or mass spectrometry; and/or isothermal amplification [Valasek et al., 2005; Klein 2002]. Those classical methods allow for proving in a highly sensitive manner DNA and, via reverse transcription (RT), also RNA [Wong et al., 2005; Bustin, 2002].

[0111] Real time PCR, also referred to as quantitative PCR (qPCR), is a method for detecting and quantifying real time nucleic acids [Nolan et al., 2006]. In molecular biology, it has already been part of established standard techniques for several years.

[0112] The quantitative determination of a template may be done by way of absolute or relative quantification. In absolute quantification, the measurement is done based on external standards, e.g. plasmid DNA in various dilutions. In contrast thereto, relative quantification makes use of so-called housekeeping or reference genes as reference [Huggett et al., 2005].

[0113] For the methods in accordance with the invention (array technique and/or amplification methods) the sample is selected from tissue, body fluids, particularly blood, serum, plasma, urine, saliva or cells or cell components, or a mixture thereof.

[0114] It is preferred that samples, particularly samples of cells, are subjected to lytic treatment so as to liberate the cell contents thereof.

[0115] It is clear to a skilled person that the individual features of the invention set forth in the claims may be combined with each other arbitrarily without restriction.

[0116] Further advantages and features of the present invention are revealed by the description of embodiments as well as the drawing.

[0117] A further preferred embodiment of the present invention lies in an application that is characterized by an index being formed of the individual specific gene activities, which index, after corresponding calibration, constitutes a measurement for the degree of severity and/or the process of a pathophysiological condition, wherein the index preferably is shown on a scale that can be interpreted easily.

[0118] Furthermore, it is preferred that the gathered gene activity are used for creating software for describing at least one pathophysiological condition and/or examination question and/or adjuvant for diagnostic purposes and/or management systems for the data of patients, particularly for the use of patient stratification and as inclusion criterion for clinical studies.

[0119] Moreover, an application is preferred in which for compiling gene activity data, specific gene loci, sense and/or antisense strands of pre-mRNA and/or mRNA, small RNA, particularly scRNA, snoRNA, micro RNA, siRNA, ncRNA, or transposable elements, genes and/or gene fragments with a length of at least 5 nucleotides are used that have a sequence homology of at least approximately 10%, in particular approximately 20%, preferably approximately 50%, and a particularly preferred sequence homology of about 80% with regard to the polynucleotide sequences in accordance with SEQ ID No: 1 to SEQ ID No: 7704.

[0120] Preferably, the sample nucleic acid is RNA, in particular whole RNA or mRNA, or DNA, in particular cDNA.

[0121] However, it has to be emphasized that the above-indicated primers are merely examples.

[0122] The above-indicated amplicons may be used, for example, as probes for hybridization methods.

[0123] Within the scope of optimized EDP-supported hospital management and for further research in the field of sepsis it has turned out to be advantageous that the gene activity data gathered are utilized for creating software for the description of at least one pathophysiological condition and/or an examination question and/or as adjuvant for diagnostic purposes and/or for management systems for the data of patients.

[0124] What is preferred is a multi-gene biomarker, a combination of several poly-nucleotide sequences, particularly gene sequences, based on the gene activities of which a classification may be performed by way of an interpretation function and/or an index or score formed.

[0125] For the purpose of the present invention it has turned out to be advantageous that the gene activities are detected by way of enzymatic methods, especially amplification methods, preferably polymerase chain reaction (PCR), preferably real time PCR; and/or by way of hybridization methods, particularly those on microarrays.

[0126] Differential expression signals of polynucleotide sequences contained in the multi-gene biomarker occurring during the detection of the gene activities, can be associated with a pathophysiological condition, process and/or therapy monitoring in an advantageous and clear manner.

[0127] The score can put a rapid diagnostic tool in the hands of the doctor in charge.

[0128] Applicant has developed several methods that make use of different sequence pools in order to ascertain and/or differentiate conditions or respond to defined research issues. Examples for this are to be found in the following printed patent specifications: differentiating between SIRS, sepsis and sepsis-like conditions [WO 2004/087949; WO 2005/083115], establishing criteria for predicting the disease course in sepsis [WO 05/106020], differentiating between non-infectious and infectious causes of multiple organ failure [WO 2006/042581], in vitro classification of gene expression profiles of patients with infectious/non-infectious multiple organ failure [WO 2006/100203], establishing the local causes of fever of unclear origin [WO 2007/144105], polynucleotides for detecting gene activities for distinguishing between local and systemic infections [DE 10 2007 036 678.9].

[0129] The invention relates to polynucleotide sequences, a method and also kits for creating multi-gene biomarkers that in one and/or several modules exhibit features of an “In Vitro Diagnostic Multivariate Index Assay” (IVDMIA) [FDA: In Vitro Diagnostic Multivariate Index Assays, 2007].

[0130] With regard to the nucleotide sequences used in the present application the following is to be noted:

[0131] RefSeq is a public database which includes information of nucleotide and protein sequences with their properties as well as bibliographic information.

[0132] The RefSeq database was established by the National Center for Biotechnology Information (NCBI), a division of the National Library of Medicine which is part of the US National Institute of Health, and is maintained and updated continuously [Pruitt et al., 2007].

[0133] The NCBI creates RefSeq from the sequence data of the archive database “GenBank” [Benson et al., 2009], a comprehensive public database of sequences set up in GenBank in the U.S.A, the EMBL data library in the United Kingdom, and the DNA database of Japan and also data exchanged between these databases.

[0134] The RefSeq collection is unique with regard to the provision of error-corrected, non-redundant, explicitly linked nucleotide and protein databases. The entries are non-redundant with the aim to represent the different biological molecules that are characteristic to an organism, strain or haplotype.

[0135] If certain entries in the collection occur multiple times, there may be several reasons for this:
[0136] alternative spliced transcripts encode for the same protein product (so-called transcript variants),
[0137] there are several genomic areas within a species or between species which encode for the same protein product,
[0138] when RefSeqs are created, which represent alternative haplotypes, and some of mRNA and protein sequences are identical in all haplotypes.

[0139] The RefSeq database provides the critical foundation for sequence integration, genetic and functional information and is regarded internationally as the standard for genome annotation. In a sequence search using BLAST, the RefSeq indications are available in several NCBI resources including Entrez Nucleotide, Entrez Protein, Entrez Gene, Map Viewer, the FTP download, or by networking with PubMed [Pruitt et al., 2007; The NCBI handbook 2002]. RefSeq information may be identified by the unique accession format including an underscore (_).

[0140] Workgroups make use of various methods and listings and compile the RefSeq collection for different organisms. RefSeq records are created by using several different methods [The NCBI handbook 2002]:
[0141] 1. Scientific cooperation
[0142] 2. Computer-assisted genome annotation processes
[0143] 3. Error-correction by the NCBI staff
[0144] 4. Extracts from GenBank

[0145] Each item of data is provided with a comment indicating the status of the corresponding error correction as well as the allocation to the cooperating workgroup. Thereby the RefSeq indication either contains an essentially unchanged, initially valid copy of the original GenBank entries, or corrected and additional information added by cooperation partners or experts [The NCBI handbook 2002].

[0146] If a molecule in GenBank is represented by several sequences, the NCBI staff makes the decision for the “best” sequence, which is then presented as RefSeq.

[0147] The decision to use the marker population named in the present application on the basis of its RefSeq identity for the purpose of the present invention was made on account of the above-described properties of the RefSeq database. The characteristic features of the database concerning the preparation, quality, care and updates on biological sequences, as well as the existence of functional information on the nucleic acid level, equally for alternative splice variants, were the decisive factor.

[0148] As was already explained, the biological mechanism of alternative splicing offers flexibility to a skilled person to extend the scope of protection. Thus, it is conceivable that with new transcript variants completely new primary structures will be identified, or that sequence changes will occur in the known transcript variants. On the other hand, those genomic regions are claimed that encompass for all these known and unknown variants of coding transcripts, including their cis-regulatory sequences as complete genomic functional units and thus fall within the scope of the present invention, or at least make available to the person of ordinary skill in the art easily obtainable equivalents to those sequences indicated in the claims, the description and sequence listing.

### DEFINITIONS

[0149] For the purpose of the present invention the following definitions are used:

[0150] SIRS: Systemic Inflammatory Response Syndrome, according to Bone [Bone et al., 1992] and Levy [Levy et al., 2003], a generalized, inflammatory, non-infectious condition of a patient.

[0151] Sepsis: according to Bone [Bone et al., 1992] and Levy [Levy et al., 2003], a generalized, inflammatory, infectious condition of a patient.

[0152] Inflammation: this is a reaction of the body caused by injury or destruction of tissue that is intended to remove, dilute or isolate the injuring agent or injured tissue.

[0153] An inflammatory process may be caused by physical, chemical or biological agents, including mechanical traumas, exposure to radiation by the sun, Roentgen rays and radioactive radiation, corrosive chemicals, extreme heat or cold and infectious agents such as bacteria, viruses, fungi, and other pathogen organisms. However, the terms inflammation and infection cannot be used as synonyms.

[0154] Classical indices of an inflammation are heat, redness, swelling, pain and loss of function of the tissue concerned. These are manifestations of physiological changes that occur during an inflammatory process. The three main components of such a process are:
[0155] 1) Changes in the diameter of blood vessels and rate of the blood flow through these vessels (hemodynamic changes)
[0156] 2) Enhanced permeability of the capillaries, and
[0157] 3) Wandering of leukocytes

[0158] Infection: the penetration of pathogen microorganisms into the body and their multiplying therein, which cause a disease through injury of cells or cell complexes, secretion of toxins, or through antigen-antibody reaction of the host.

[0159] A systemic infection is an infection in which the pathogens have spread via the bloodstream throughout the body.

[0160] Biological fluid: biological fluid, within the context of the invention, refers to all body fluids of mammals, including humans.

[0161] Gene: a gene is a segment of desoxyriobonucleic acid (DNA), which contains the basic information for making a biologically active ribonucleic acid (RNA) as well as regulatory elements that activate or inactivate such manufacture. As genes within the context of the invention, also all derived DNA sequences, partial sequences and synthetic analogs (e.g. peptidonucleic acids (PNA)) are understood. The description of the invention being related to determining gene expression on an RNA level thus expressly does not constitute a restriction, but merely an exemplary application.

[0162] Gene locus: Gene locus is the position of a gene in the genome. If the genome consists of several chromosomes, the position within the chromosome is meant on which the gene is located. Different forms or variants of this gene are referred to as alleles, which are all located in the same location on the chromosome, i.e. the gene locus. Thus, the term “gene locus” on the one hand includes the pure genetic information for a specific gene product and on the other hand all regulatory DNA segments as well as all additional DNA sequences which are related to the gene on the gene locus in any functional relationship. The latter attach to sequence regions that are located in the immediate vicinity (1 Kb), but outside of the 5- and/or 3′-end of a gene locus. The specification of the gene locus is done by the accession number and/or RefSeq ID of the RNA main product which is derived from the locus.

[0163] Gene activity: By gene activity, the ability of a gene to be transcribed and/or to form translation products is comprehended.

[0164] Gene expression: The process of forming a gene product and/or expression of a genotype into a phenotype.

[0165] Multi-gene biomarker: A combination of several gene sequences, the gene activities of which produce a combined overall result (e.g. a classification and/or index), using an interpretation function. This result is specific to one condition and/or a research issue.

[0166] Hybridization conditions: The physical and chemical parameters well known to a skilled person, which may influence the establishment of a thermodynamic equilibrium of free and bound molecules. In the interest of optimal hybridization conditions the duration of contact of the probe and sample molecules, the cation concentration in the hybridization buffer, temperature, volume as well as concentrations and concentration ratios of the hybridizing molecules must be coordinated.

[0167] Amplification conditions: Constant or cyclically changing reaction conditions which allow for the multiplication of the base material in the form of nucleic acids. The reaction mixture includes the individual components (desoxyribonucleotides) for the resulting nucleic acids, as well as short oligonucleotides which may attach to complementary areas in the base material, and a nucleic acid syntheses enzyme referred to as polymerase. Cation concentrations, pH-value, volume and duration and temperature of individual reaction steps that a skilled person is well aware of, are of importance in the progress of amplification.

[0168] Primer: In the present invention, an oligonucleotide is referred to as primer, which serves as starting point for nucleic acid replicating enzymes such as, for example, DNA polymerase. Primers may consist both of DNA and RNA (Primer3, confer e.g. http://frodo.wi.mit.edu/cgi-bin/primer3 www.cgi of the MIT).

[0169] Probe: In the present application, a probe is a nucleic acid fragment (DNA or RNA) that may be provided with a molecular marker (e.g. fluorescent label, especially Scorpion®, molecular beacons, Minor Groove Binding probes, TaqMan® probes, isotope marking, etc.) and is used for sequence-specific detection of target DNA and/or target RNA molecules.

[0170] PCR: is the abbreviation for the English term “Polymerase Chain Reaction” (PCR). The polymerase chain reaction is a method for reproducing DNA in vitro outside a living organism with the aid of a DNA-dependent DNA polymerase. In accordance with the present invention PCR is used in particular to reproduce short segments—of up to about 3,000 base pairs—of a DNA strand of interest. This may be a gene or only part of a gene or even non-coding DNA sequences. The skilled person is well aware of the fact that a number of PCR methods are known in the art, all of which are encompassed by the term “PCR”. This is particularly true for the “Real-Time PCR” (also cf. the explanations below).

[0171] Transcript: For the purpose of the present application, a transcript is to be understood as any RNA product that is manufactured based on a DNA template.

[0172] Small RNA: refers to small RNAs in general. Representatives of this group are in particular, but not exclusively:

[0173] a) scRNA (small cytoplasmatic RNA) which is one of several small RNA molecules in the cytoplasm of a eukaryote.

[0174] b) snRNA (small nuclear RNA), one of many small forms of RNA that occur only in the nucleus. Some of the snRNAs play a role in splicing or other RNA-processing reactions.

[0175] c) small non-protein-coding RNAs, which include the so-called small nucleolar RNAs (snoRNAs), microRNAs (miRNAs), short interfering RNAs (siRNAs) and small double-stranded RNAs (dsRNAs) involved in gene expression at many levels, including chromatin architecture, RNA editing, RNA stability, translation and possibly also transcription and splicing. In general, these RNAs are processed in multiple ways from the introns and exons of longer primary transcripts, including protein-coding transcripts. Although approximately only 1.2% of the human genome encodes proteins, a large portion is nevertheless transcribed. In fact, approximately 98% of the transcripts found in mammals and humans consist of non-protein-coding RNAs (ncRNA) from introns of protein-coding genes and the exons and introns of non-protein-coding genes, including many which are anti-sense to protein-coding genes or overlap with these. Small nucleolar RNAs (snoRNAs) regulate the sequence-specific modification of nucleotides in target RNAs. Herein, there are two types of modifications, i.e. 2′-O-ribose methylation and pseudouridylation, which are regulated by two large snoRNA families referred to, on the one hand, as box C/D-snoRNAs and, on the other hand, as box H/ACA snoRNAs. Such snoRNAs have a length of approximately 60 to 300 nucleotides. miRNAs (microRNAs) and siRNAs (short interfering RNAs) are even smaller RNAs with 21 to 25 nucleotides in general. miRNAs come from endogenous short hairpin precursor structures and usually use other loci with similar, but not identical sequences as the target of translational repression. siRNAs arise from longer double-stranded RNAs or long hairpins, often of exogenous origin. They usually have homologous sequences at the same locus or elsewhere in the genome as the target, where they are involved in the so-called gene silencing, a phenomenon also referred to as RNAi. The boundaries between miRNAs and siRNAs, however, are blurred.

[0176] d) In addition, the term “small RNA” also may include the so-called transposable elements (TEs), especially the retro elements, which likewise, for the purpose of the present invention, fall within the meaning of the term “small RNA”.

[0177] RefSeq ID: This term refers to the entries in the NCBI database (www.ncbi.nlm.nih.gov). The database provides non-redundant reference standards for genomic information. Such genomic information includes, inter alia, chromosomes, mRNAs, RNAs and proteins. Each RefSeq ID represents a single, naturally occurring molecule of an organism. The biological sequences, which represent a RefSeq, are derived from GenBank entries (also NCBI), but are a compilation of information elements. These information elements come from primary research on DNA, RNA and protein level.

[0178] Accession number: An accession number is the entry number of a polynucleotide in the NCBI GenBank database which is known to a skilled person. In this database, both RefSeq IDs and less well-characterized and redundant sequences are administered and made available to the public (www.ncbi.nlm.nih.gov/genbank/index.html).

[0179] Local infection: The infection is limited to the portal of entry of the pathogen (e.g. wound infection).

[0180] Generalized infection: Pathogens penetrate into the vascular system, thereby affecting the whole organism. Generalized infections may lead to sepsis.

[0181] Colonization: The presence of micro-organisms does not provoke any symptoms of a disease in the organism.

[0182] Bacteremia: A condition in which bacteria are present in the blood shortly and temporarily, without this necessarily being associated with the occurrence of bacterial clinical symptoms.

[0183] Alternative splicing: a process in which the exons of the primary gene transcript (pre-mRNA) are reconnected after excision of introns in various combinations.

[0184] BLAST: Basic Local Alignment Search Tool [according to Altschul et al., J Mol Biol 215: 403-410; 1990]. Sequence comparison algorithm, speed-optimized, is used for the search in sequence databases for optimal local conformity to the request sequence.

[0185] cDNA: Complementary DNA. DNA sequence, product of reverse transcription of mRNA.

[0186] Coding sequence: Protein-coding segment of a gene or an mRNA to distinguish it from introns (non-coding sequences) and 5′- or 3′-nontranslated segments. Coding sequences of cDNA or the mature mRNA include the area between the start (AUG or ATG) and stop codon.

[0187] EST: Expressed Sequence Tag. Short ssDNA segments of cDNA (typically ≈300-500 bp), usually produced in large quantities. Represent the genes that are expressed in particular tissues and/or during certain development phases. Partially coding or non-coding labels of expression for cDNA libraries. Valuable for determining the size of complete genes and in the context of mapping.

[0188] Exon: Coding sequence area of typical eukaryotic genes corresponding to mRNA. Exons may include the coding sequences, the 5′-nontranslated area, or the 3′-nontranslated area. Exons encode specific sections of the complete protein and are usually separated by long segments (introns) which sometimes are referred to as “junk DNA”, the function of which is not precisely known, but which probably encode short, nontranslated RNAs (snRNA) or regulatory information.

[0189] GenBank: Nucleotide sequence database with sequences from more than 100,000 organisms. Records that are annotated with properties of the coding areas, also include the translation products. GenBank is part of the international cooperation of sequence databases, which also includes EMBL and DDBJ.

[0190] Intron: Non-coding sequence area of a typical eukaryotic gene which is excised out of the primary transcript during RNA splicing and thus is no longer present in the mature, functional mRNA, rRNA or tRNA.

[0191] mRNA: Messenger RNA or sometimes only “message”. RNA which contains the sequences necessary for protein coding. The term mRNA is used, to distinguish it from the (unspliced) primary transcript, merely for the mature transcript with polyA-tail (exclusive of the introns removed by splicing). Has 5′-nontranslated, amino acid coding, 3′-nontranslated areas and (almost always) a poly(A)-tail. Typically constitutes about 2% of the total cellular RNA.

[0192] Poly(A)-tail: ss adenosine extension 50-200 monomers) which, during splicing, is hung to the 3′-end of the mRNA. The poly(A)-tail presumably increases the stability of the mRNA (possibly protection against nucleases). Not all mRNA have this construct, for example, the histone mRNA.

[0193] RefSeq: NCBI database of reference sequences. Error-corrected, non-redundant sequence collection of genomic DNA contigs, mRNA and protein sequences and sequences or of known genes and complete chromosomes.

[0194] SNPs: Single Nucleotide Polymorphisms. Genetic differences between alleles of the same gene based on single nucleotide deviations. Emerge at specific individual positions within a gene.

[0195] Transcript variants: Alternative splicing products. The exons of the primary gene transcript (pre-mRNA) were reconnected in different ways and are subsequently translated.

[0196] 3′-non-translated region: Transcribed 3′-terminal mRNA area without protein-coding information (region between stop codon and poly(A)-tail). May influence the translation efficiency or stability of the mRNA.

[0197] 5′-non-translated region: Transcribed 5′-terminal mRNA area without protein-coding information (area between initial 7-methylguanosine and the base immediately before the ATG start codon). May influence the translation efficiency or stability of the mRNA.

[0198] Polynucleotide isoforms: Polynucleotides with the same function, but different sequence.

### ABBREVIATIONS

[0199] CRP C-reactive Protein
[0200] OR Odd Ratio
[0201] PCT Procalcitonin
[0202] Sensitivity Proportion of correct tests in the group with specified disease (infectious SIRS or sepsis)
[0203] Specificity proportion of correct tests in the group without specified disease (non-infectious SIRS)

[0204] Moreover, non-prepublished DE 10 2009 044 085 discloses a system comprising the following elements:
[0205] A set of gene activity markers
[0206] Reference genes as internal control of gene activity marker signals in whole blood
[0207] Detection mainly via Real Time PCR or other amplification or hybridization methods
[0208] Use of an algorithm to convert the individual results of the gene activity markers into a common numeric value, index or score
[0209] Representation of this numeric value on a correspondingly scaled scale
[0210] Calibration, i.e. dividing up the scale according to the intended application by previous validation experiments.

[0211] The system provides a solution to the problem of determining disease conditions such as, for example, the distinction of infectious and non-infectious multiple organ failure, but also for other applications and problems relevant in this context.

[0212] All approaches for the diagnostic/prognostic detection of inflammatory and/or infectious conditions that were pre-published in the prior art and contained in the above-indicated document DE 10 2009 044 085 that had not yet been published at the filing date of the present application, however, have, as was set forth at the beginning, found access to clinical routine merely with restraint.

[0213] A trial for differential gene expression from peripheral samples of whole blood was carried out, thereby using a broad spectrum of inflammatory-infectious clinical phenotypes, ranging from the healthy test person over patients with local inflammation and local infection to intensive care patients with systemic inflammation (SIRS) and systemic infection (sepsis), and a measuring platform representing the total human genome in the form of 25,000 different probes. As a result, surprisingly a transcriptomic signature was identified that, instead of erratic changes based on the different phenotypes, represents an inflammatory-infectious continuum of differential gene expression. A further surprising result that followed from this finding was the lack of infection-specific gene groups. Moreover, in the group with systemic inflammation a differential gene expression could be ascertained that was comparable to that of patients with infections in the blood stream.

[0214] These results may provide an explanation to the finding explained in the following that the detection of a pathogen from blood samples succeeds in less than half of the cases under suspicion of sepsis. A condition that is represented by wide, simultaneous over- and under-expression of specific gene transcripts, may be regarded as critical and may include features of sepsis indicated in the subsequent sections. It is characterized by a reaction of the body to infectious and/or inflammatory stimulation and a resulting “immune burden”, also referred to as host response. The information on such a condition, which is represented by all significant differentially expressed gene transcripts, may be summarized mathematically to a non-dimensional numeric value, a score, and can be depicted as an interval to the condition of a healthy person. The larger the numeric value of the score, the larger is the intensity of a reaction of the body to infectious and/or inflammatory stimulation and the resulting “immune burden”. Comparable information on the reaction of the body to infectious and/or inflammatory stimulation and the resulting “immune burden” likewise may be gathered on the basis of scores, formed of sub-selection from all differentially expressed genes.

[0215] The reaction of the body to infectious and/or inflammatory stimulation and the resulting “immune burden” cannot only become stronger or deteriorate, but also may move in the opposite direction, i.e. move towards the condition of a healthy person or improve. This reversion may be regarded as recovery process. If this recovery follows directly on a therapeutic measure, it is an indication of success of the therapy.

[0216] Progression of the condition into a critical area is indicative of a patient's high risk of mortality. In such a condition there is a high probability for the patient to suffer a life-threatening complication in the form of an uncontrolled primary infection and/or secondary infection and/or die of the consequences of an uncontrolled inflammatory-infectious host response.

[0217] The progression towards a critical condition may be utilized as early diagnosis based on which the required therapeutic measures and interventions are initiated.

[0218] The reaction of the body to infectious and/or inflammatory stimulation and the resulting “immune burden” may be used as relevant specification for the detection of a condition.

[0219] The immune status may be used by means of timely succeeding multiple determinations for follow-up monitoring and therapy control in patients.

[0220] Medical measures may be medicinal treatment and its escalation or de-escalation, invasive measures such as surgical operations for infectious source control and/or further diagnostic measures.

[0221] The determination of the immune status may be used for differential diagnosis in that it is ascertained whether the immune system contributes to the acute incidence of the disease, or is ineligible as cause of the life-threatening condition of a patient.

[0222] The objective of most gene expression studies for sepsis diagnosis so far was to find markers that distinguish as to whether or not a systemic inflammatory response syndrome (SIRS, ACCP/SCCM, 1992) was caused by pathogens. In these studies, especially samples of intensive care patients were analyzed. Distinction into the groups “sterile SIRS” vs. “sepsis” (SIRS and positive detection of a pathogen) was done particularly in accordance with the microbiological proof. The studies provided very heterogeneous results, as was ascertained in a current comparative publication [Tang et al. (2010)]. With its experimental approach, the present invention examines the causes for this. The trial scheme of the inventors was based on the following concept:

[0223] The previous approach for diagnosing sepsis was gathered from the modus operandi in case of a local inflammation. Here, too, one wants to distinguish as to whether or not the inflammation on an organ was caused by a pathogen (this is e.g. referred to as bacterial or sterile myocarditis or pancreatitis). Infection-specific gene markers must exhibit an increased or else reduced expression even in an infection, which manifests itself not necessarily by a systemic inflammation, but merely causes an inflammation in the organ/locus affected. However, this could not be shown in case of the gene markers found so far in the prior art.

[0224] Another explanation for heterogeneous results would be that the gene expression studies make use of RNA samples from blood. Thus, the best chances of finding infection-specific gene markers should be provided if merely samples with a positive blood culture, which is a “gold standard” for infections in the blood stream, are measured. The previous studies viewed sepsis patients as one study group, independent of a spread of the infection.

[0225] Applicant bases its studies on a trial scheme in which the features of infection and inflammation in their spatial proliferation are classified independent of one another. A distinction was made as to whether the inflammation was systemic, local or not distinctive at all. In doing so, systemic inflammation was determined by the definition of the systemic inflammatory response syndrome (SIRS). Moreover, it was examined whether pathogens were found in the blood (systemic), on an organ (local), or not at all. The 9 possible phenotypes were defined from a combination of the proliferation of infection and inflammation. They are summarized in table 1.

TABLE 1
Representation of the phenotypes that result from the spatial
manifestation of an inflammation and/or infection. Each phenotype
is identified by a token of 3 letters. The first capital letter
refers to an escalation of the infection, the second letter
relates to an escalation of the inflammation. Both letters
were connected by an “a” (standing for and).

Inflammation

| | Systemic | Local | None |
|---|---|---|---|
| Infection | [S] | [L] | [N] |
| Systemic [S] | SaS | SaL | SaN |
| Local [L] | LaS | LaL | LaN |
| None [N] | NaS | NaL | NaN |

[0226] In the view of the present invention, such a division is clear, complete and independent of other factors, i.e any test person may be associated to one of the groups at the time of taking the samples.

[0227] While an inflammation is not necessarily caused by pathogens, an infection without an inflammatory reaction is not relevant diagnostically. A systemic infection that merely causes a localized inflammation (so-called bacteremia, e.g. in case of an endocarditis) is a rare phenomenon and constitutes a special case. Therefore, the combinations LaN, SaN and SaL do not form clinically relevant phenotypes and were disregarded for the purpose of the present invention.

[0228] For their study, the inventors divided diagnostically relevant samples of patients according to the spatial proliferation of an inflammation and/or infection, which resulted in 6 study groups (indicated in bold letters in table 1). These groups represent the most important and most frequent infection-inflammatory phenotypes. Particularly the 4 phenotypes with a local infection with local and systemic inflammation (LaL and LaS) as well as the corresponding control groups without an infection (NaL and NaS) make, in a statistical comparison, the discovery of infection-specific gene markers possible. A comparison with groups SaS and LaS provides hints as to whether in systemic inflammation the infection of the circulating cells (blood stream infection) is indicative of a different gene expression pattern than in case of a locally restricted infection.

[0229] A sequence listing with SEQ-ID-numbers 1-7718 is attached to the present application, the contents of which listing fully is part of the disclosure content of the present application.

[0230] Further advantages and features are to be seen from the description of embodiments as well as the drawing.

[0231] FIG. 1 shows a heat map in which the expression patterns are sorted by study groups;

[0232] FIG. 2 shows a sorted heat map in which the expression patterns are sorted by the score (master score);

[0233] FIG. 3 shows triangles formed of various distances for the study samples;

[0234] FIG. 4 shows triangles formed of various distances for two courses in patients;

[0235] FIG. 5 shows the course of the score for all samples in the study; and

[0236] FIG. 6 shows the course of the score calculated from Delta-CT values of real time PCR gene expression measurement, as compared with the master score.

### EXAMPLES

### Example 1

### Determination of the Severity of a Host Response to a Burden of the Immune System by an Acute Inflammation

### Groups of Patients

[0237] Samples of the following test persons were included in the selection: healthy donors, patients from the hospitals for otolaryngology (ear, nose, throat—ENT) and for anesthesia and intensive care of the university hospital of Jena (KAI). The groups were allocated as follows:

SaS: 6 intensive care patients being diagnosed with severe sepsis/septic shock. The examined sample was taken on the day on which, in two independent tests (blood culture and DNA proof), the identical pathogen in the blood was confirmed.
LaS: 13 intensive care patients being diagnosed with severe sepsis/septic shock in which during the disease at least one blood sample including two independent tests (blood culture and DNA proof) was examined for pathogens, but all findings remained negative. The examined sample was taken on the first day on which a pathogen was confirmed locally.
NaS: 13 intensive care patients being diagnosed with SIRS without the indication of an infection. The examined sample was taken within the first 3 days of the SIRS diagnosis.
LaL: 7 patients of the ENT hospital with an acute peritonsillar abscess (PTA). The examined sampe was taken just prior to surgical removal of the infectious abscess. The corresponding microbiological blood analysis (as in LaS) was negative.
NaL: 8 patients of the ENT hospital with chronic tonsillitis without an acute center of infection. The examined sample was taken within the first 3 days after the tonsillectomy (surgical removal of the tonsils) was performed. The patients did not exhibit any symptoms of SIRS, at the spot where surgery was performed a sterile inflammation of the wound could be detected. Further, 4 patients with chronic non-infectious pancreatitis without SIRS were included in the group.
NaN: 7 healthy donors, 3 patients with chronic tonsillitis without an acute center of infection. The examined sample was taken prior to the tonsillectomy; the postoperative samples of these patients were not included in the NaL group.
Collect samples: In the study, samples of 2 patients each were examined over 6 consecutive days. In both cases, the first sample was taken prior to a planned surgical intervention while the subsequent samples were taken in the intensive care unit. Case 1: The patient does not recover after surgery. The inflammation-relevant parameters increase from the 2^{nd} postoperative day, on the 3^{rd} day an infection was diagnosed, the patient dies after 10 days. Case 2: The patient recovers very slowly after surgery. On the third day, some inflammation-relevant parameters increase. After medical measures have been taken the patient's condition improves, the patient is moved after a total of 6 days. The most important clinical parameters for the examined samples were collected in table 2.

TABLE 2
Summary of clinical parameters of the test persons included in the study. Features
not retrieved or parameters not determined are provided with the abbreviation n.a.

| | Sex | | | | | Survival | | | | |
|---|---|---|---|---|---|---|---|---|---|---|
| | (f: | | | | | status | | | | |
| Sample- | female | Age | Study | | | (s: released | PCT | CRP | | |
| ID | m: male) | [Years] | Group | Center | Diagnosis at admission | ns: deceased) | [ng/ml] | [mg/l] | SOFA | Pathogen |
| 1 | w | 32 | NaN | HNO | Chronic tonsillitis, | s | 0.061 | 12.67 | n.a. | None |
| | | | | | preoperative | | | | | |
| 2 | m | 22 | NaN | HNO | Chronic tonsillitis, | s | 0.089 | 1.86 | n.a. | None |
| | | | | | preoperative | | | | | |
| 3 | w | 57 | NaN | HNO | Chronic tonsillitis, | s | n.a. | 5.12 | n.a. | None |
| | | | | | preoperative | | | | | |
| 4 | m | 43 | NaN | SL | Donor | s | n.a. | n.a. | n.a. | n.a. |
| 5 | m | 24 | NaN | SL | Donor | s | n.a. | n.a. | n.a. | n.a. |
| 6 | w | 25 | NaN | SL | Donor | s | n.a. | n.a. | n.a. | n.a. |
| 7 | w | 46 | NaN | SL | Donor | s | n.a. | n.a. | n.a. | n.a. |
| 8 | m | 58 | NaN | SL | Donor | s | n.a. | n.a. | n.a. | n.a. |
| 9 | m | 38 | NaN | SL | Donor | s | n.a. | n.a. | n.a. | n.a. |
| 10 | w | 48 | NaN | SL | Donor | s | n.a. | n.a. | n.a. | n.a. |
| 11 | w | 23 | NaL | HNO | Chronic tonsillitis, | s | 0.078 | 19.74 | n.a. | None |
| | | | | | postoperative | | | | | |
| 12 | w | 19 | NaL | HNO | Chronic tonsillitis, | s | 0.058 | 15.98 | n.a. | None |
| | | | | | postoperative | | | | | |
| 13 | w | 38 | NaL | HNO | Chronic tonsillitis, | s | 0.054 | 14.72 | n.a. | None |
| | | | | | postoperative | | | | | |
| 14 | w | 58 | NaL | HNO | Chronic tonsillitis, | s | 0.035 | 94.02 | n.a. | None |
| | | | | | postoperative | | | | | |
| 15 | m | 22 | NaL | HNO | Chronic tonsillitis, | s | 0.08 | 14.53 | n.a. | None |
| | | | | | postoperative | | | | | |
| 16 | m | 22 | NaL | HNO | Chronic tonsillitis, | s | 0.066 | 60.5 | n.a. | None |
| | | | | | postoperative | | | | | |
| 17 | w | 20 | NaL | HNO | Chronic tonsillitis, | s | 0.089 | 20.05 | n.a. | None |
| | | | | | postoperative | | | | | |
| 18 | w | 46 | NaL | HNO | Chronic tonsillitis, | s | 0.059 | 46.27 | n.a. | None |
| | | | | | postoperative | | | | | |
| 19 | n.a. | n.a. | NaL | KAI | Chronic pancreatitis | n.a. | n.a. | n.a. | n.a. | n.a. |
| 20 | n.a. | n.a. | NaL | KAI | Chronic pancreatitis | n.a. | n.a. | n.a. | n.a. | n.a. |
| 21 | w | n.a. | NaL | KAI | Chronic pancreatitis | n.a. | n.a. | n.a. | n.a. | n.a. |
| 22 | m | n.a. | NaL | KAI | Chronic pancreatitis | s | 0.45 | 3.5 | 0 | n.a. |
| 23 | m | 35 | LaL | HNO | Peritonsillar abscess | s | 0.055 | 42.39 | n.a. | Streptococci in |
| | | | | | | | | | | tonsillar smear test |
| 24 | m | 40 | LaL | HNO | Peritonsillar abscess | s | n.a. | n.a. | n.a. | Streptococci in |
| | | | | | | | | | | tonsillar smear test |
| 25 | m | 28 | LaL | HNO | Peritonsillar abscess | s | 0.1 | 115.59 | n.a. | Streptococci in |
| | | | | | | | | | | tonsillar smear test |
| 26 | m | 68 | LaL | HNO | Peritonsillar abscess | s | 0.096 | 179.24 | n.a. | Streptococci in |
| | | | | | | | | | | tonsillar smear test |
| 27 | m | 30 | LaL | HNO | Peritonsillar abscess | s | 0.076 | 77.71 | n.a. | Streptococci in |
| | | | | | | | | | | tonsillar smear test |
| 28 | w | 55 | LaL | HNO | Peritonsillar abscess | s | 0.034 | 42.14 | n.a. | Streptococci in |
| | | | | | | | | | | tonsillar smear test |
| 29 | m | 70 | LaL | HNO | Peritonsillar abscess | s | 0.181 | 143.44 | n.a. | Streptococci in |
| | | | | | | | | | | tonsillar smear test |
| 30 | w | n.a. | NaS | KAI | Malign neoformation on | s | 0.14 | 2 | 5 | n.a. |
| | | | | | head of pancreas, | | | | | |
| | | | | | preoperative | | | | | |
| 31 | m | n.a. | NaS | KAI | Duodenal carcinoma, | s | 0.27 | 3.3 | 7 | n.a. |
| | | | | | preoperative | | | | | |
| 32 | m | n.a. | NaS | KAI | Carcinoma on the head of | s | n.a. | 2.1 | 2 | n.a. |
| | | | | | pancreas, | | | | | |
| | | | | | Postoperative | | | | | |
| 33 | m | n.a. | NaS | KAI | Tumor in the distal | s | n.a. | 2 | 3 | n.a. |
| | | | | | esophagus, preoperative | | | | | |
| 34 | m | n.a. | NaS | KAI | Carcinoma on the head of | s | n.a. | 5.1 | 4 | n.a. |
| | | | | | pancreas, | | | | | |
| | | | | | preoperative | | | | | |
| 35 | w | 56 | NaS | KAI | Biliary carcinoma, | s | 2.01 | 108 | 1 | n.a. |
| | | | | | Postoperative | | | | | |
| 36 | w | 70 | NaS | KAI | Partial hepatic resection, | s | 0.3 | 30.2 | 2 | n.a. |
| | | | | | postoperative | | | | | |
| 37 | w | 70 | NaS | KAI | By-pass operation after | s | 0.36 | 47.2 | 2 | n.a. |
| | | | | | cardiac infarction | | | | | |
| 38 | m | 64 | NaS | KAI | By-pass operation, | s | 0.39 | 73.7 | 4 | n.a. |
| | | | | | postoperative | | | | | |
| 39 | m | 44 | NaS | KAI | Cardiomyopathy | ns | n.a. | 156 | 4 | n.a. |
| 40 | w | 64 | NaS | KAI | By-pass operation after | s | 13.3 | 235 | 8 | n.a. |
| | | | | | cardiac infarction | | | | | |
| 41 | m | 61 | NaS | KAI | By-pass operation after | s | 1.05 | 209 | 10 | n.a. |
| | | | | | cardiac infarction | | | | | |
| 42 | m | 74 | NaS | KAI | By-pass operation after | ns | 4.43 | 154 | 12 | n.a. |
| | | | | | cardiac infarction | | | | | |
| 43 | m | 73 | LaS | KAI | Colon carcinoma | s | 1.23 | 514 | 3 | Wound: Enterobacter |
| | | | | | | | | | | cloacae, Escherichia coli |
| 44 | m | 67 | LaS | KAI | Squamous cell carcinoma, | s | 0.13 | 149 | 3 | BAL: Enterobacter |
| | | | | | right maxilla | | | | | aerogenes |
| 45 | m | 80 | LaS | KAI | Partial colon resection in | ns | 3.51 | 201 | 9 | Wound: |
| | | | | | Crohn's disease | | | | | Pseudomonas |
| | | | | | | | | | | aeruginosa, |
| | | | | | | | | | | Enterococcus faecium |
| 46 | m | 56 | LaS | KAI | Perforation of right upper | s | n.a. | 114 | 8 | Wound: Escherichia |
| | | | | | quadrant of the abdomen | | | | | coli, Enterococcus |
| | | | | | | | | | | faecalis, Klebsiella |
| | | | | | | | | | | pneumoniae |
| 47 | w | 75 | LaS | KAI | Anastomosis insufficiency | s | 4.68 | 117 | 5 | Wound: Escherichia |
| | | | | | | | | | | coli, Klebsiella |
| | | | | | | | | | | pneumoniae, Morganella |
| | | | | | | | | | | morganii, Clostridium |
| | | | | | | | | | | perfringens |
| 48 | m | 52 | LaS | KAI | decompensated hepatic | s | 64.3 | 342 | 9 | Ascites: Enterococcus |
| | | | | | cirrhosis | | | | | faecalis |
| 49 | m | 69 | LaS | KAI | Recurring secondary | s | 1.11 | 207 | 12 | BAL: Enterobacter |
| | | | | | hemorrhage and wound | | | | | cloacae, Candida krusei |
| | | | | | infection | | | | | |
| 50 | m | 78 | LaS | KAI | Arteriosclerotic cardiac | s | 1.6 | 188 | 12 | BAL: Candida |
| | | | | | disease | | | | | albicans,, |
| | | | | | | | | | | Candida glabrata, |
| | | | | | | | | | | Tracheal swab: Candida |
| | | | | | | | | | | albicans |
| 51 | m | 83 | LaS | KAI | Adenocarcinoma of the | s | 2.25 | 256 | 7 | Ascites: Enterococcus |
| | | | | | gastric antrum of an intestinal | | | | | faecalis, Candida |
| | | | | | type | | | | | glabrata |
| 52 | w | 50 | LaS | KAI | Sigma perforation in | s | 0.23 | 203 | 8 | Wound: Other gram- |
| | | | | | sigma diverticulitis | | | | | positive bacteria |
| 53 | m | 74 | LaS | KAI | Secondary hemorrhage | s | 0.42 | 179 | 11 | BAL: Staphylococcus |
| | | | | | after pertrochanteric left | | | | | aureus, Klebsiella |
| | | | | | femoral fracture | | | | | pneumoniae, Candida |
| | | | | | | | | | | albicans |
| 54 | m | 49 | LaS | KAI | Abscess of the wound on | s | 9.81 | 177 | 7 | Wound: Escherichia |
| | | | | | sigmoidostoma | | | | | coli, Enterococcus |
| | | | | | | | | | | faecium |
| 55 | m | 83 | LaS | KAI | Arteriosclerotic cardiac | s | 0.53 | 132 | 11 | BAL: |
| | | | | | disease | | | | | Stenotrophomonas |
| | | | | | | | | | | maltophilia, |
| | | | | | | | | | | Citrobacter, Klebsiella |
| | | | | | | | | | | oxytocca, Candida |
| | | | | | | | | | | albicans |
| 56 | m | 66 | SaS | KAI | Polytrauma | ns | 36.6 | 260 | 13 | Blood: Escherichia coli |
| 57 | m | 71 | SaS | KAI | Traumatic Hematothorax | ns | 2.5 | 393 | 9 | Blood: |
| | | | | | | | | | | Staphylococcus |
| | | | | | | | | | | aureus, Pan Staph. |
| 58 | m | 77 | SaS | KAI | Arteriosclerotic three- | ns | 7.2 | 245 | 13 | Blood: Enterococcus |
| | | | | | vessel cardiac disease | | | | | faecalis |
| 59 | m | 84 | SaS | KAI | Necrotizing fasciitis | s | 32.8 | 241 | 10 | Blood: Escherichia coli |
| 60 | w | 77 | SaS | KAI | Squamous cell carcinoma | s | 0.32 | 309 | 8 | Blood: |
| | | | | | of the esophagus | | | | | Staphylococcus aureus |
| 61 | w | 64 | SaS | KAI | Planned trisector ectomy | s | 1.68 | 211 | 13 | Blood: Fungi |
| | | | | | in colorectal hepatic | | | | | |
| | | | | | metastases | | | | | |
| 1_t0 | m | 65 | Case 1 | KAI | Carcinoma on the head of | ns | n.a. | 32.9 | n.a. | n.a. |
| | | | | | pancreas, | | | | | |
| | | | | | preoperative | | | | | |
| 1_t1 | m | 65 | Case 1 | KAI | Carcinoma on the head of | ns | 1.61 | 101 | 9 | n.a. |
| | | | | | pancreas, | | | | | |
| | | | | | 1st postoperative day | | | | | |
| 1_t2 | m | 65 | Case 1 | KAI | Carcinoma on the head of | ns | 1.79 | 191 | 7 | n.a. |
| | | | | | pancreas, | | | | | |
| | | | | | 2nd postoperative day | | | | | |
| 1_t3 | m | 65 | Case 1 | KAI | Carcinoma on the head of | ns | 2.21 | 273 | 9 | Wound: Morganella |
| | | | | | pancreas, | | | | | morganii, Enterococcus |
| | | | | | 3rd postoperative day | | | | | faecalis, Citrobacter |
| 1_t4 | m | 65 | Case 1 | KAI | Carcinoma on the head of | ns | 2.37 | 282 | 11 | n.a. |
| | | | | | pancreas, | | | | | |
| | | | | | 4th postoperative day | | | | | |
| 1_t5 | m | 65 | Case 1 | KAI | Carcinoma on the head of | ns | 2.02 | 331 | 10 | n.a. |
| | | | | | pancreas, | | | | | |
| | | | | | 5th postoperative day | | | | | |
| 2_t0 | m | 47 | Case 2 | KAI | Esophagus carcinoma, | s | n.a. | 16.7 | 0 | n.a. |
| | | | | | preoperative | | | | | |
| 2_t1 | m | 47 | Case 2 | KAI | Esophagus carcinoma, 1st | s | n.a. | 122 | 5 | n.a. |
| | | | | | postoperative day | | | | | |
| 2_t2 | m | 47 | Case 2 | KAI | Esophagus carcinoma, | s | 1.14 | 250 | 5 | n.a. |
| | | | | | 2nd postoperative day | | | | | |
| 2_t3 | m | 47 | Case 2 | KAI | Esophagus carcinoma, 3rd | s | 0.69 | 234 | 1 | n.a. |
| | | | | | postoperative day | | | | | |
| 2_t4 | m | 47 | Case 2 | KAI | Esophagus carcinoma, 4th | s | 0.41 | 152 | 3 | n.a. |
| | | | | | postoperative day | | | | | |
| 2_t5 | m | 47 | Case 2 | KAI | Esophagus carcinoma, 5th | s | 0.25 | 106 | 3 | n.a. |
| | | | | | postoperative day | | | | | |

### Experimental Implementation

[0238] 73 RNA whole blood samples of 63 persons were measured. For this, commercial Microarray-BeadChips HumanHT-12 v3 of Illumina were used. 48803 different gene probes were located on the measuring platform used which gene probes represent the entire human genome independent of the tissue.

[0239] The samples were processed and measured using the following steps:

1. Isolation and stabilization of the total RNA from whole blood samples: the base material for analyzing the transcriptome of blood samples is 2.5 ml of whole blood. The whole blood was taken in a PAXgene tube (PAXgene Blood RNA Tube PrAnalytiX #762165 (Becton Dickinson)) and stored until reprocessing at −80° C.
2. Standard automatic RNA isolation from PAXgene blood samples: The QIAcube (Qiagen, Hilden) as well as the PAXgene Blood RNA Kit (PreAnalytiX #762174) were utilized, thereby using the program “PAXgene Blood RNA (CE)” for isolating the total RNA. After the end of the listing the elution tubes including the RNA isolates were sealed. Any remaining DNase enzyme activities were inactivated by heating the samples for 5 minutes at 65° C., the samples were then immediately cooled on ice and stored at −80° C.
3. Quality control of the total RNA: Examination of the isolated RNA is an important measure for ensuring the quality of the hybridization results. Merely an intact RNA is able to provide excellent hybridization results. Examination of the integrity of the isolated total RNA was done in a capillary-electrophoretic manner using the Bioanalyzer 2100 of Agilent Technologies thereby making use of the RNA 6000 Nano LabChip Kit (Agilent Technologies, catalog number 5067-1511) in accordance with the specifications of the manufacturer. A RIN value around 7.5 on a scale of 1-10 is regarded as guidance level. All samples used reached a RIN>5, which is sufficient for the purpose of gene expression analysis (cf. Fleige and Paffl, 2006).
4. Reduction of the globin mRNA: For improving the sensitivity of gene expression measurements in whole blood the highly abundant globin mRNA was recommended. To this end, the “GLOBINclear TM-Human” kit of Ambion/Applied Biosystems # AM 1980) was used. According to estimations of the manufacturer the globin transcripts with a proportion of 70% of all mRNAs in blood considerably overlay less present transcripts. 1 μg of total RNA of each sample was used for processing.
5. Amplification of total RNA to cRNA: Preparation of the globin-reduced RNA for hybridization was done using the “Illumina TotalPrep RNA Amplification kit” (AMIL 1791) of Ambion/Applied Biosystems in accordance with the specifications of the manufacturer, thereby using an amount of 500 ng. The cRNA eluates were cooled on ice, the cRNA concentration was measured spectrophotometrically on the Nanodrop ND-2000.
6. Hybridization on Illumina BeadChips: Pangenomic Illumina BeadChips, Version human HT-12v3 were used. 750 ng of the cRNA samples in a volume of 5 μl per array were applied and hybridized over night at 58° C. Signal detection of successfully hybridized probes is done via CY3-streptavidin staining (GE-Amersham) in accordance with the specifications of the manufacturer. Illumina listing: Whole-Genome Gene Expression with IntelliHyb™ Seal; Experienced User Card; Part #11226030 Rev. B, Illumina Inc. Read-out of the fluorescence signals was effected by using the Illumina® Bead Array Reader 500 and the corresponding Illumina “BeadScan” software (version 3.6.17).
7. Image analysis of the micro arrays: The BeadChips stained with fluorescent color are scanned with the Illumina® Bead Array Reader. The resulting images are analyzed by way of the Illumina® “Genome-Studio” software (Genome Studio 2009.2 version). For a first assessment of the hybridization technical control signals are retrieved. A first qualitative review is gained by way of the number of detected genes and the average signal strength per array. The raw data are subjected to quality control and statistical analysis.

### Data Analysis and Statistical Evaluation

[0240] Data analysis was performed using the freely available software R Project Version R 2.8.0 (R.app GUI 1.26 (5256), S. Urbanek & S. M. lacus, R Foundation for Statistical Computing, 2008), which is available under www.r-project.org [R Development Core Team (2006)]. The software is preferably used in analyzing gene expression data since it provides for numerous algorithms for processing such kind of data. In particular, the following software packages could be used in our study: lumi for reading in Illumina measuring values and the related gene annotation, vsn for data normalization (both in Du et al., 2008), fdrtool for determining the false-positive rate (Strimmer, 2008), and stats for performing statistical significance tests for clustering and visualizing the results.

[0241] The analysis was performed using the following steps. The raw data as well as additionally available annotation data were read in. On account of variations for technical reasons in processing the samples and deviations in the quantity of reagents, the fluorescence intensities of different samples as a rule cannot be compared to one another directly. To make this possible, such variations are compensated for by suitable standardization, a variance-stabilizing transformation being used [Huber et al., 2002].

[0242] Normalized data and measuring data of which their logarithms were taken with regard to basis 2, were included in the data analysis. In the statistical analysis 61 samples of the 6 study groups were examined. The gene expression between these groups was compared by way of one-way analysis of variance [Mardia et al., 1979]. In so doing, it was examined whether there is a significant difference between at least 2 of the analyzed groups. The corresponding significance test was computed, gene by gene, for 18517 gene probes that provided a signal of detectable intensity for at least one RNA sample. The number of false-positive tests was determined by way of a false discovery rate (FDR) [Storey et al. (2003)]. For each gene probe the so-called q value was calculated, which is defined as the minimum FDR under which the probe appears as being significantly modified. The method used for FDR control estimated 87.5% of the gene probes as being significantly modified. This corresponds to 16204 probes of a pool of 18517 examined probes.

[0243] Further, the gene expression patterns of the 6 groups of patients were compared by pairs by way of the t test. The test was applied gene by gene for a total of 15 group combinations. In so doing, the same selection of gene probes was considered and an FDR control performed that was described for the one-way analysis of variance. The results were summarized in table 3.

TABLE 3
Summary of false-positive rates (FDR) in comparing all study groups by pairs.
The table indicates how many gene probes, by comparison, have reached an FDR value
smaller than the indicated threshold. This interpretation is explained using an
example: In comparing NaS vs. NaL a group of 265 genes with an FDR of 1% and less
was determined, i.e. of the 265 gene probes 2-3 are false-positive.

| | | | | | | | Proportion of |
|---|---|---|---|---|---|---|---|
| | <0.01% | <0.1% | <1% | <2.5% | <5% | <10% | modified gene |
| FDR | (n) | (n) | (n) | (n) | (n) | (n) | probes [%] |
| LaS vs. NaN | 3412 | 5443 | 8309 | 9901 | 11314 | 13315 | 70.0 |
| SaS vs. NaN | 375 | 1909 | 6285 | 8518 | 10301 | 12549 | 69.4 |
| LaS vs. NaL | 2098 | 3962 | 6696 | 8232 | 9746 | 11850 | 65.5 |
| SaS vs. NaL | 137 | 912 | 4317 | 6531 | 8385 | 10591 | 62.7 |
| NaS vs. NaN | 0 | 73 | 3650 | 5654 | 7585 | 9932 | 59.8 |
| NaS vs. NaL | 0 | 0 | 265 | 2591 | 4799 | 7672 | 56.1 |
| LaS vs. LaL | 1 | 19 | 1019 | 2499 | 4416 | 6864 | 53.7 |
| SaS vs. LaL | 0 | 0 | 688 | 2620 | 4789 | 7276 | 53.3 |
| LaL vs. NaN | 0 | 0 | 527 | 2270 | 4398 | 7080 | 52.5 |
| SaS vs. NaS | 0 | 0 | 119 | 684 | 2048 | 4599 | 50.9 |
| LaL vs. NaL | 0 | 0 | 1 | 1 | 526 | 2589 | 44.5 |
| LaS vs. NaS | 0 | 0 | 0 | 0 | 0 | 522 | 33.1 |
| SaS vs. LaS | 0 | 0 | 0 | 0 | 0 | 0 | 27.8 |
| NaS vs. LaL | 0 | 0 | 0 | 1 | 6 | 154 | 27.0 |
| NaL vs. NaN | 0 | 0 | 5 | 86 | 236 | 841 | 26.0 |

[0244] As follows from the table (last column), the clearest differences are to be found between patients suffering from sepsis (LaS and SaS) and the groups NaN (no inflammation) and NaL (non-infectious local inflammation). In contrast thereto, there were little distinct differences between the group pairs NaS and LaL, SaS and LaS, as well as LaS and NaS. In comparing the amount of gene probes that, by comparison of LaS vs. NaS and NaS vs. LaL reached an FDR<0.1, no gene probes could be found that in an infection showed the same modification in gene expression. Thus, no gene probes could be detected that show an infection-specific expression pattern. It should be mentioned that also further statistical comparisons, inter alia the two-way analysis of variance [Mardia et al., 1979], between the groups NaL, NaS, LaL and LaS, as well as a comparison of groups LaL and LaS vs. NaS, lead to the same negative result.

[0245] Surprisingly, the comparisons by pairs make the following arrangement of the study groups possible: (1) NaN, (2) NaL, (3) LaL, (4) NaS, (5) LaS, (6) SaS. The arrangement is distinguished by the fact that the adjacent groups statistically differ only little in their expression. More exactly, in the statistical comparison, a sufficient number of modified gene probes were found, gene probe groups with a sufficiently small false-positive rate (approx. 5%) could not be found between the adjacent groups. The phenomenon occurs if average group values differ from each other, but the dispersion of the groups is high, so that this leads to overlapping of the two groups compared. The farther the groups are apart, the greater are the differences. It should be mentioned that a directed arrangement of the study groups was possible without a determination of gene expression.

[0246] In order to depict the uncovered change of gene expression within the study groups 8537 gene probes from the first statistical comparison in which group differences were generally examined by way of a one-way analysis of variance, were included in the further analysis. The selection was based on an estimation of a false-positive rate of 0.3%. This is interpreted statistically such that approximately 26 probes of a selection list of 8537 probes (i.e. 0.3%) are false-positive. Any extension of the selection would lead to a higher false-positive rate. The selected 8537 gene probes address a total of 7694 different RNA transcripts.

[0247] The gene expression of these gene probes within the study was grouped, based on their similarity, in 9 gene clusters by way of a k-means algorithm (Hartigan and Wong, 1979). For this, the R function kmeans was used, which standardizes the expression signals before hand gene by gene with regard to an average value and dispersion. Estimation of the number of clusters was done in accordance with the 2^{nd} derivation of the error function (cost function), resulting from a repetition of the clustering method for 1 to 20 clusters [Goutte et al., 1999].

[0248] The groups of patients were arranged in the sequence (1) NaN, (2) NaL, (3) LaL, (4) NaS, (5) LaS, (6) SaS. At the end, the 12 gene expression patterns from the 8537 gene probes of the collect samples of the two patients were added. The sorted expression matrix was visualized in a so-called heatmap. In FIG. 1, each line represents a gene probe and each column an RNA sample. The relative alteration of gene expression is depicted in gray shades. Thus, dark gray to black encodes a lower expression and light gray to white a higher expression than determined as an average per gene probe. The clusters were numbered from 1 to 9, the number in brackets below the cluster number indicating the number of gene probes in a cluster. Within a cluster, the gene probes were sorted in a declining manner, so that probes with larger differences within the study groups are located at the upper end of the cluster.

[0249] From FIG. 1 it is apparent that there is a trend in the expression from left to right. From group NaN to group SaS the expression in gene clusters 1 to 4 augments and declines in gene clusters 5 to 9. However, also high variability within the individual groups, particularly the NaS group, is shown. There are flowing transitions between individual groups, the groups overlap each other.

[0250] The average difference between groups NaN (no acute inflammation) and SaS (patients suffering from SIRS with a confirmed infection in the blood stream) is the most distinct one. This difference was quantified in the next step by way of a clearance (cf. the next section). All other samples were arranged according to their distance to these two groups. In the sorted heat map which is depicted in FIG. 2, such arrangement is visualized. Samples that resembled more the pattern of healthy persons, were sorted to the left and samples that resembled more the pattern of intensive care patients with an infection in the blood were sorted to the right.

[0251] The sorted heat map shows that the samples of the patients for the most part were sorted according to their group affiliation in the sequence as listed above, or were mixed into adjacent groups. However, individual samples are sorted into clearly higher or lower ranks than most group representatives. The gene expression pattern of the heat map shows that the gene activity of NaN to SaS increases and decreases at the same time. The individual gene clusters merely distinguish in the progression of the deviation.

[0252] The result points out to the fact that the gene expression particularly reflects the strength of the host response to the burden of an organism caused by an inflammation. In fact, an infection in the blood stream with systemic inflammation signifies the greatest stress to the immune system. Similar stress will arise through a local infection if the immune system is not capable of battling pathogens in the source of infection. But also through a traumatic event, e.g. a severe operation, the immune system, for a short time, may be used to the full up to the limit of the ability to withstand stress. Moreover, the gene expression shows the severity of the host response in case of lesser stress caused by local inflammation.

[0253] As was mentioned already, the selected genes are merely divided into 2 groups. In the first group of 3041 gene probes (36%), the gene expression increases with the burden of the immune system (cluster 1 to 4) while the gene expression decreases in the other group of 5496 gene probes (64%) (clusters 5 to 9). On account of known references [(cf. Calvano et al. (2005) and Foteinou et al., 2008], one would speak of a (pro- and anti-) inflammatory response in case of an increase in the gene expression, and of an energetic response in case of a decrease in the gene expression. The energetic exhaustion in case of ongoing inflammation will lead to an ungovernable immune response.

### Quantifying the Severity of the Host Response

[0254] Sorting of the heat map was done in accordance with the following score. Let X be the corresponding gene expression vector for an RNA sample, which sums up the expression signals of the selected gene probes. The Euclidean distance between the two vectors X₁ and X₂ be referred to as d(X₁, X₂). Furthermore, let cor(X₁, X₂) denote the correlation coefficient between X₁ and X₂ according to Pearson, which corresponds to the cosine value of the angle between X₁ and X₂ [Mardia et al., 1979].

[0255] The score is calculated in accordance with the following formula:

$$score ( X ) [ \% ] = \frac{100 \%}{d ( mS , mH )} \cdot cor ( X - mH , mS - mH ) d ( X , mS - mH ) \qquad Formula 1$$

mH and mS being the two gene expression vectors that sum up the average values of groups NaN (mH) and SaS (mS) gene by gene.

[0256] The score may be illustrated as follows. From the distances d(mS, mH), d(mS,X) and d(X,mH) a triangle is formed the corners of which, for reasons of simplification, are denoted by X, mH and mS (cf. FIG. 3). The value

L_{X}=cor(X−mH,mS−mH)d(X,mS−mH)

defines the position of the foot of the perpendicular from corner X to the straight line which is defined by d(mS, mH). The value of L_{X} corresponds to the distance of mH and the foot of the perpendicular. It also indicates how far corner X of the triangle is away from corner mH, the height of the triangle is not assessed.

[0257] Finally, the score, which is defined by formula 1, indicates the relative proportion of distance L_{X} with regard to distance d(mS, mH). In fact, one obtains from formula 1, for X=mH: score (mH)=0% and for X=mS: score(mS)=100%.

[0258] In FIG. 3, sample 3 is farther apart from mS than from mH and receives a score value of −9.3%. Sample 59 is farther apart from mH than from mS and receives a score value of 127.8%. Finally, sample 37 is between mH and mS and receives a score value of 27.7%. The value of 50% would be allocated to a sample that has an equal distance to mH and mS.

[0259] The distance d(mS, mH) is composed in an additive manner of the distances of the individual gene probes. If the total distance is divided into two components, the one component d⁺(mS, mH) being calculated from the gene probes of clusters 1 to 4, and the other component d⁻(mS, mH) being calculated from the gene probes of clusters 5 to 9, information is gained on the share of the expression increase and decrease of the total deviation. In the data set examined by us the increase the increase that is represented by 36% of the gene probes, was 51% of the total distance. The decrease, represented by 64% of all probes, was 49% of the total distance. Thus, on average, the expression of one gene probe from clusters 1 to 4 was declining more than in clusters 5 to 9. The total ratio of increase and decrease was approximately equal. If the ratio of increase and decrease is calculated for each sample, information is gained on the progression of the deviation in the direction shown.

[0260] FIG. 4 shows how the triangle formed by the above-indicated distances for the two cases of patients is moved in the course of the disease, the index above the tip of the triangle indicating the day of taking the sample, and 0 indicating the pre-operative sample.

[0261] FIG. 5 depicts the score for all study samples. The study groups and the two courses were arranged as in FIG. 1. The black points mark the score value, the bars an upward or downward deviation of 7.5% percentage points.

[0262] It should be noted that the proposed score is not the only one with which difference in the gene expression of the study groups may be quantified. The advantage of the score consists in that a relative measurement is defined thereby, i.e. a percentile proportion of the difference determined between the gene expression of the group without acute inflammation and SIRS patients with a blood infection. The score is independent of the measuring platform and the number of gene markers used.

[0263] Although merely simultaneous increase and decrease of gene activity is quantified by the score, it is calculated from the expression of several thousands of genes. The cause for this lies in the phenomenon examined. The used genes in general are responsible for different processes. Therefore, for an individual gene, the deviation in the expression from a healthy person may have various causes. However, the flocking behavior of many genes in the declared direction reflects the quantitative extent of an immune burden.

[0264] From the examples in which the post-operative condition was observed for 2 patients, it is to be seen that the score captures the current extent of a host response. Therefore, it may be used for observation/monitoring. In fact, the value of the score for a patient within 6 days changes from approximately 20% to approximately 90% of percentage points. Moreover, it is suited for generally assessing an immune burden. Indeed, the pre-operative samples of the two patients exhibit an increased score value of more than 20%. This may be one of the causes for a post-operative course abundant with complications.

### Example 2

### Determination of the Severity of the Host Response in Patients with an Acute Inflammation by Way of a Reduced Number of Markers

### Selection of Gene Markers Based on Simulations

[0265] For determining the intensity of a host response a high number of gene markers were used. In general, the examined genes are responsible for different processes and for the individual gene; the deviation in the expression from a healthy person has various causes. The more genes are observed, the better a different cause than a burden of the immune system may be excluded for a deviation in the expression. The observation of all relevant genes totally excludes other causes. However, there is the well-founded assumption that even a reduced number of gene probes would reflect the stress condition of an immune system sufficiently enough. However, a reduction in the number of genes is only plausible if the resulting score lies sufficiently close to the original score (master score). In our study, the master score could be determined with high accuracy from the 4372 gene probes the average expression of which between the two study groups amounted to at least 0.8. In fact, the deviation amounted to no more than 1 percentage point. If the score was calculated from the remaining 4165 gene probes the deviation was below 8 percentage points.

[0266] Since there is no algorithm for selecting a marker, it is obvious to examine via computer simulations as to whether there is a preferred number and amount of genes that depict the master score. In order to estimate the number of required gene probes, a maximum of 1500 out of the 8357 gene probes of the master score was randomly selected in first simulations. 36% thereof were from clusters 1 to 4, and 64% from clusters 5 to 9. For each selection, the score was calculated for all 73 RNA samples in accordance with formula 1. Those sets of gene probes were retained the score of which did not deviate from the master score for more than ±7.5 percentage points. In 500 repetitions, 241 of such sets of gene markers were found. Those sets represented all 8375 gene probes. The shortest set included 138 gene probes. Within the next 5000 repetitions, a maximum of 150 gene probes per run was randomly selected their distribution among the clusters was as that in the first run. As a result, we obtained 24 sets with a length of 86 to 148 gene probes; the corresponding score values did not deviate from the master score for more than ±7.5 percentage points. The results of the pre-examination demonstrate that the number of gene markers may be reduced considerably in case a reasonable deviation from the master score is accepted. In the simulation described in the following the maximum number of gene probes was reduced further. The results of these simulations were collected in Table 5.

[0267] The approach in the first simulation was as follows. The expression matrix of 8357 gene markers and 61 expression vectors from the 6 study groups was subjected to an analysis of main components (Mardia et al., 1979). For this, the R function prcomp was used. 512 gene probes were selected that correlated the strongest with the main component. This included 183 (36%) from gene clusters 1 to 4 and 329 (64%) from gene clusters 5 to 9. Thus, the selection amount was reduced to gene probes that represent the clearest the examined trend in the change in gene expression, wherein the increase and decrease were of the same ratio as in the primary selection.

[0268] From this pre-selection (512 gene probes) 40 to 50 gene probes were randomly selected in 5000 simulation steps and from those gene probes the score was calculated for all 73 gene patterns in accordance with formula 1. The selection was discarded if the absolute difference between the master score and the new score for at least one sample was more than 7.5 percentage points. Otherwise, the selection was stored. The simulation provided 2 sets of gene probes that fulfilled the condition. Those sets were described as set 1 and set 2 in Table 4 via the corresponding sequence number. They included 49 and 47 gene sequences.

[0269] In the next 5000 simulation steps those gene probe tuples were retained in which for 70 samples (95%) the reduced score did not deviate from the master score for more than 7.5 percentage points. In this simulation step 14 different combinations were found. The amounts, described as set 3 to set 16 in Table 4 via the corresponding sequence number, included 46 to 49 gene sequences.

[0270] In a third simulation, the number of randomly selected probes was reduced to a maximum of 20 and the selection procedure was repeated 50000 times. Likewise, those gene probe tuples were retained in which for 70 samples (95%) the reduced score did not deviate from the master score for more than 7.5 percentage points. In this simulation, 20 different combinations were found that fulfilled the selection condition.

[0271] The amounts described as set 17 to set 36 in Table 4 via the corresponding sequence number, included 18 to 20 gene sequences. The results of the simulation show that the score may be determined sufficiently accurate even from a clearly reduced number of probes. In fact, an error bar of 15 percentage points (which corresponds to an error of ±7.5 percentage points) appears acceptable if it leads to reducing the number of gene markers considerably. It is to be taken into consideration that also the original score is subject to random deviations and depends on the underlying random sample. Moreover, the simulations show that there are no preferred gene probes that determine the score. Indeed, different gene probe tuples lead to a similar estimation of the master score. In fact, the estimation includes a total of 423 different sequence numbers.

TABLE 4
Summary of the gene probe tuples fulfilling the described selection criteria in simulations. The sets
were numbered from 1 to 36, the number n in brackets indicating the number of sequences in the set. The
subsequent numerical order indicates the corresponding sequence numbers from the sequence listing.

Set 1 (n = 49) 508, 553, 611, 679, 734, 769, 851, 860, 871, 896, 1117, 1263, 1646, 1647, 1648, 1675, 1688,
1975, 2011, 2077, 2415, 2516, 2560, 2581, 3381, 3491, 3820, 3947, 4156, 4230, 4506, 4576, 5012, 5235,
5614, 5730, 5803, 5873, 6114, 6262, 6265, 6301, 6689, 6738, 6820, 6847, 6879, 7069, 7230
Set 2 (n = 47) 160, 309, 374, 428, 462, 911, 937, 1039, 1092, 1105, 1458, 1533, 1604, 1895, 1917, 1997,
2002, 2055, 2242, 2332, 2369, 2386, 2427, 2516, 2541, 2560, 2785, 3359, 3407, 3624, 4230, 4587, 4636,
5164, 5235, 5247, 5371, 5776, 6278, 6328, 6497, 6636, 7156, 7201, 7230, 7314, 7450
Set 3 (n = 48) 10, 366, 411, 462, 493, 495, 567, 1204, 1226, 1409, 1414, 1449, 1487, 1583, 1724, 1744,
2013, 2055, 2064, 2208, 2248, 2692, 2891, 3051, 3624, 4156, 4205, 4510, 4587, 4923, 5176, 5373, 5400,
5435, 5873, 5912, 5954, 6041, 6073, 6247, 6301, 6478, 6525, 6923, 7207, 7450, 7670, 7681
Set 4 (n = 47) 160, 359, 441, 493, 522, 541, 652, 691, 1128, 1408, 1583, 1651, 1652, 1664, 1688, 2002,
2077, 2248, 2273, 2415, 2676, 2690, 2755, 2876, 3053, 3623, 4216, 4327, 4525, 4587, 4765, 4870, 5013,
5164, 5431, 5614, 5950, 6098, 6265, 6432, 6497, 6981, 7062, 7202, 7314, 7450, 7607
Set 5 (n = 49) 97, 428, 441, 543, 611, 851, 1136, 1384, 1533, 1868, 1997, 2077, 2183, 2208, 2226, 2260,
2329, 2386, 2475, 2686, 2690, 2876, 3054, 3821, 4000, 4357, 4479, 4530, 4636, 4765, 4923, 5013, 5137,
5204, 5760, 5776, 5819, 5873, 5908, 6005, 6099, 6242, 6417, 6499, 6585, 6847, 7450, 7670, 7681
Set 6 (n = 48) 10, 97, 359, 475, 495, 627, 928, 1039, 1117, 1248, 1384, 1408, 1472, 1652, 1675, 1744, 1868,
1918, 2370, 2423, 2537, 2742, 2865, 3051, 3086, 3408, 3916, 4030, 4078, 4274, 4294, 4362, 4751, 5129,
5235, 5247, 5431, 5734, 5803, 5811, 5908, 5950, 6005, 6417, 6497, 6525, 6923, 7456
Set 7 (n = 49) 32, 160, 383, 414, 493, 611, 652, 679, 734, 885, 896, 946, 1177, 1640, 1650, 1704, 1882,
2077, 2248, 2250, 2260, 2415, 2561, 3086, 3488, 3623, 3624, 4135, 4156, 4160, 4510, 4525, 4530, 4742,
5137, 5204, 5247, 5730, 5950, 6114, 6210, 6225, 6430, 6478, 6497, 6545, 6668, 7314, 7607
Set 8 (n = 48) 359, 383, 515, 538, 544, 691, 769, 813, 1024, 1039, 1092, 1409, 1519, 1640, 1649, 1665,
1696, 1731, 1744, 2167, 2183, 2226, 2260, 2273, 2425, 2516, 2618, 2634, 2672, 3051, 3168, 3202, 4160,
4754, 4966, 5373, 5465, 5493, 5541, 5574, 5912, 6005, 6216, 6432, 6636, 6748, 6847, 7423
Set 9 (n = 46) 160, 352, 544, 691, 802, 885, 1126, 1147, 1163, 1336, 1416, 1639, 1969, 2002, 2058, 2077,
2183, 2331, 2332, 2426, 2526, 2742, 2855, 2860, 2891, 3054, 3138, 3488, 3947, 4560, 4576, 4707, 4776,
5235, 5371, 5400, 5431, 5760, 5873, 6247, 6301, 6417, 6673, 6820, 7447, 7604
Set 10 (n = 49)8, 164, 462, 494, 495, 510, 545, 567, 611, 679, 941, 1039, 1105, 1128, 1147, 1318, 1533,
1649, 1918, 1973, 1975, 2011, 2077, 2080, 2370, 2537, 3051, 3202, 3676, 4274, 4587, 4928, 5204, 5373,
5431, 5465, 5541, 5734, 5908, 5912, 5950, 6278, 6417, 6497, 6668, 6673, 7156, 7230, 7670
Set 11 (n = 46)89, 97, 160, 355, 359, 366, 374, 411, 462, 475, 515, 538, 543, 691, 1384, 1647, 1649, 1651,
1724, 2011, 2058, 2064, 2242, 2369, 2859, 3414, 4000, 4742, 4765, 4870, 4966, 5040, 5232, 5247, 5276,
5373, 5431, 5760, 5873, 5954, 6417, 6419, 6497, 6545, 6636, 7484
Set 12 (n = 49)8, 89, 515, 543, 585, 769, 969, 1126, 1163, 1526, 1583, 1639, 1744, 2019, 2393, 2415, 2453,
2618, 2690, 2692, 2810, 2855, 2863, 3153, 3158, 3190, 3408, 4000, 4083, 4104, 4248, 4479, 4491, 4550,
4661, 4877, 4995, 5176, 5276, 5599, 5695, 6073, 6114, 6265, 6417, 6499, 6585, 6632, 6673
Set 13 (n = 48)414, 538, 946, 1263, 1384, 1512, 1895, 2077, 2248, 2260, 2516, 2676, 2975, 3168, 3414,
4083, 4274, 4776, 4800, 4919, 4923, 5179, 5204, 5431, 5493, 5541, 5619, 5695, 5819, 6005, 6073, 6099,
6210, 6247, 6265, 6350, 6417, 6432, 6499, 6536, 6545, 6636, 6668, 6689, 7040, 7062, 7472, 7604
Set 14 (n = 47)383, 428, 538, 553, 691, 814, 871, 896, 911, 937, 1426, 1639, 1685, 1688, 1983, 2093, 2253,
2260, 2454, 2516, 2587, 2672, 2761, 2865, 2975, 3086, 3781, 4000, 4030, 4308, 4510, 4636, 4923, 5137,
5235, 5574, 5776, 5819, 5908, 6226, 6278, 6417, 6632, 7202, 7230, 7315, 7456
Set 15 (n = 46)97, 366, 383, 802, 1426, 1514, 1558, 1685, 1744, 1975, 2011, 2013, 2369, 2415, 2454, 2510,
2516, 2577, 2587, 2759, 2968, 3168, 3364, 3641, 3780, 4083, 4230, 4294, 4587, 4638, 4817, 5040, 5164,
5276, 5371, 5465, 5541, 6073, 6098, 6114, 6184, 6216, 6497, 6515, 7062, 7202
Set 16 (n = 49)10, 504, 541, 553, 567, 652, 802, 1024, 1092, 1136, 1197, 1519, 1646, 1647, 1648, 1652,
2055, 2058, 2260, 2273, 2330, 2331, 2415, 2491, 2581, 2618, 2676, 2742, 3053, 3408, 3652, 3915, 4216,
4870, 5235, 5641, 5695, 5954, 6114, 6278, 6419, 6461, 6791, 6820, 6847, 6923, 7428, 7604, 7670
Set 17 (n = 20)10, 160, 428, 871, 941, 1136, 1197, 1416, 1558, 1786, 1951, 2386, 2510, 2560, 3488, 3652,
3781, 5176, 5400, 6515
Set 18 (n = 20)871, 1163, 1414, 1416, 1426, 1487, 2001, 2055, 2369, 2386, 2552, 2577, 2865, 3051, 4550,
4577, 5614, 6098, 7369, 7423
Set 19 (n = 20)567, 958, 2226, 2250, 2260, 2427, 2516, 3364, 4030, 4135, 5235, 5574, 5950, 6114, 6226,
6267, 6278, 6418, 7069, 7518
Set 20 (n = 20)409, 1647, 1648, 1770, 1883, 1951, 2013, 2386, 2423, 3152, 3491, 4205, 4577, 4661, 4765,
4919, 7428, 7604
Set 21 (n = 20)355, 480, 494, 667, 1492, 2475, 2855, 2948, 3155, 3158, 3408, 3780, 4661, 5113, 5232, 5368,
5574, 6114, 6419, 6499
Set 22 (n = 19)769, 1163, 1472, 2077, 2370, 2759, 3488, 3567, 3737, 3780, 4230, 4245, 4274, 4550, 5950,
6497, 7069, 7109, 7681
Set 23 (n = 20)160, 164, 355, 411, 1106, 1408, 1675, 1679, 2386, 2453, 2516, 2810, 3168, 3202, 3652, 4230,
5574, 5986, 7428, 7484
Set 24 (n = 19)10, 164, 885, 1263, 1318, 1416, 1492, 1508, 1647, 1951, 2250, 2560, 2785, 2827, 3086, 4506,
5137, 5575, 5954
Set 25 (n = 19)32, 522, 679, 1519, 2001, 2491, 2516, 2676, 3412, 3737, 4205, 4294, 4560, 5235, 5954, 6005,
6114, 6499, 6525
Set 26 (n = 19)958, 1449, 1472, 1582, 2332, 2516, 2552, 2891, 2975, 3168, 3190, 3683, 3820, 3947, 4245,
4530, 7040, 7069, 7145
Set 27 (n = 20)428, 515, 544, 562, 567, 1263, 2002, 2332, 2526, 3438, 4577, 4754, 5574, 5614, 5912, 6328,
6515, 7156, 7423, 7456
Set 28 (n = 20)355, 508, 937, 1263, 1973, 2002, 2510, 4078, 4156, 4550, 4673, 4817, 5247, 5368, 5730,
6005, 6247, 6515, 7201, 7207
Set 29 (n = 20)10, 544, 871, 1408, 1487, 1649, 2002, 2415, 2690, 2859, 2975, 3126, 4577, 4636, 5541, 6073,
6417, 6432, 6866, 6879
Set 30 (n = 20)896, 1248, 1318, 1472, 1786, 1830, 1983, 2386, 2865, 2975, 3641, 3916, 4030, 4530, 4995,
5472, 5619, 6099, 6247, 6265
Set 31 (n = 20)355, 462, 1416, 1983, 2011, 2183, 2248, 2618, 3190, 3412, 4490, 4576, 4776, 4923, 5164,
6101, 6114, 6278, 7314, 7369
Set 32 (n = 20)310, 1226, 1895, 2248, 2427, 2516, 2552, 2690, 3086, 3438, 3915, 4216, 4587, 5235, 5276,
5954, 6265, 6478, 6515, 7207
Set 33 (n = 20)493, 584, 633, 937, 2330, 2377, 2491, 2587, 3153, 3683, 4216, 4248, 4530, 6114, 6419, 6478,
6525, 6689, 7202, 7456
Set 34 (n = 20)10, 359, 383, 478, 626, 1472, 1487, 1647, 2475, 3683, 3780, 4490, 4636, 5179, 5247, 5371,
5950, 6748, 6923, 7670
Set 35 (n = 20)97, 626, 1039, 1163, 1426, 1617, 1704, 2002, 2248, 2690, 3168, 4216, 4638, 5247, 5614,
5950, 6265, 6461, 6632, 7428
Set 36 (n = 20) 366, 414, 544, 734, 1263, 1416, 2167, 2208, 2250, 2370, 2491, 2526, 2855, 3190, 3488, 4083,
4248, 6673, 6845, 6847

[0272] It should be noted that individual sets 1 to 36 indicated in table 4 as well as the two following sets: Set 37 (n=10): SEQ-ID numbers: 1983, 507, 5431, 3043, 1665, 5776, 2902, 6585, 3167 and 745; and Set 38 (n=7): SEQ-ID numbers: 1983, 507, 5431, 3043, 1665, 5776 and 7695 each taken by itself constitute preferred embodiments of the present invention with which a score value may be obtained that merely lies within the limits of the deviation from a master score as indicated in the present invention, so that the individual sets 1 to 38 each allow for exact statements in the sample of a test person or patient with regard to the in vitro determination of the severity of the host response of a patient who is in an acutely infectious and/or acutely inflammatory condition.

### Preferred Gene Marker Tuples

[0273] In former non-pre-published patent application DE 10 2009 044 085 of applicant gene expression markers were found that are indicative of an infection in patients with a systemic inflammatory response syndrome (SIRS) (DE 10 2009 044 085). Of the 13 gene markers examined therein, 6 to 7 markers are found again in the list of 8537 gene probes examined herein. An explanation for this is that SIRS patients with an infection are subjected to a high immune burden more frequently than SIRS patients without an infection. In the following steps it is shown that the score calculated from the expression of those markers in accordance with formula 1 depicts the host response in a similar way as the master score introduced in the 1^{st} application example. Moreover, it is shown that by extending the marker set, a deviation from the master score can be reduced very clearly. In the gene selection of the 1^{st} application example 6 gene sequences from applicant's non-pre-published application (DE 10 2009 044 085) are to be found that are indicated herein by their symbols: TLR5 and CD59 in heat map cluster 2, CPVL and FGL2 in heat map cluster 5, HLA-DPA1 and IL7R in heat map cluster 6. For a further gene marker (CLU) the gene probe used on the micro array BeadChip HumanHT-12 v3 did not provide any signals. For these 7 gene markers, expression values for the 67 samples of patients from table 2 were provided that were measured on an alternative platform, the so-called real time PCR. From the list of 8537 gene probes the replacement TFPI for CLU was selected, the expression values of which on the micro array together with the expression values on the real time PCR corresponding to marker CLU, reached a correlation of 0.8 (correlation co-efficient according to Pearson).

[0274] From the gene expression of the 73 examined RNA samples that was determined on the micro array for the 7 tuple of gene probes, we calculated the score in accordance with formula 1. Its deviation from the master score amounted to a maximum of ±6 percentage points for half of the samples, a maximum of ±11 percentage points for three quarters of the samples, and ±18.3 percentage points for 90% of the samples.

[0275] In a next step, 1 gene probe of the remaining 8530 gene probes each was successively added to the set of 7 markers and the corresponding score was calculated in accordance with formula 1. The set was extended by the probe that provided the minimal error. The error was defined as the 95% quantile of all absolute deviations from the master score. The procedure was repeated until the error amounted to less than ±10 percentage points. This occurred after the gene marker tuple was extended to 10 gene probes. The value of the score for 7 and 10 gene probes as well as the master score were summarized in Table 5. The table further indicates the with regard to basis 2 logarithmized expression signals of the corresponding gene sequences.

TABLE 5
Score values for 7 and 10 selected gene probes as compared to the master score (columns 2 to 4).
Expression values logarithmized for basis 2 for 10 selected gene probes that are characterized
by the corresponding sequence number (2nd line), accession (3rd line) and symbol (4th line). The
5th line indicates the heat map cluster into which the corresponding probe was classified.

| | | | | Expression signals of gene sequences logarithmized for basis 2 | | | |
|---|---|---|---|---|---|---|---|
| | | | | 1983 | 507 | 5431 | 3043 |
| | Score | | | NM_003268 | NM_000611 | NM_031311 | NM_006682 |
| Sample | 7 Gene | 10 Gene | | TLR5 | CD59 | CPVL | FGL2 |
| ID | probes | probes | Master | (2) | (2) | (5) | (5) |
| 1 | 1.8 | 2.8 | −4.7 | 10.1 | 7.5 | 11.6 | 13.2 |
| 2 | 5.3 | 1.4 | 10.0 | 10.8 | 7.8 | 13.2 | 14.0 |
| 3 | 0.2 | −1.6 | −9.3 | 10.2 | 7.3 | 12.3 | 12.9 |
| 4 | 3.3 | 8.3 | 11.1 | 10.1 | 7.7 | 13.0 | 13.8 |
| 5 | −7.3 | −12.6 | −7.3 | 9.5 | 7.3 | 12.6 | 13.1 |
| 6 | −6.3 | 0.2 | −8.2 | 10.3 | 7.3 | 12.8 | 13.4 |
| 7 | −5.7 | −6.8 | −5.2 | 9.9 | 7.5 | 12.6 | 13.3 |
| 8 | 3.2 | 3.0 | 10.7 | 10.3 | 7.2 | 12.8 | 13.8 |
| 9 | −2.1 | −2.8 | −3.2 | 10.2 | 7.3 | 13.0 | 12.9 |
| 10 | 8.6 | 6.8 | 7.5 | 10.7 | 7.5 | 13.3 | 13.6 |
| 11 | 11.4 | 12.2 | 17.2 | 11.0 | 7.3 | 13.2 | 13.8 |
| 12 | 12.4 | 15.2 | 5.2 | 11.0 | 7.5 | 13.6 | 13.8 |
| 13 | 20.5 | 26.3 | 35.2 | 11.6 | 7.7 | 13.4 | 14.3 |
| 14 | 25.7 | 24.8 | 19.7 | 11.6 | 8.0 | 13.2 | 14.1 |
| 15 | 16.7 | 16.2 | 20.8 | 11.3 | 7.5 | 13.1 | 13.8 |
| 16 | 30.5 | 28.6 | 33.2 | 12.2 | 8.5 | 13.4 | 14.1 |
| 17 | 15.4 | 18.6 | 9.5 | 11.7 | 7.6 | 12.8 | 13.6 |
| 18 | 23.7 | 19.4 | 26.1 | 11.7 | 7.9 | 12.7 | 13.8 |
| 19 | 18.8 | 22.2 | 15.8 | 11.4 | 7.5 | 13.4 | 13.6 |
| 20 | 0.0 | 0.9 | 2.4 | 10.4 | 7.3 | 12.9 | 13.5 |
| 21 | 5.2 | 12.9 | 8.5 | 10.8 | 7.6 | 13.2 | 13.6 |
| 22 | −4.3 | 5.2 | 6.3 | 10.3 | 7.5 | 13.0 | 14.1 |
| 23 | 14.9 | 10.1 | 5.4 | 11.2 | 7.7 | 13.0 | 13.3 |
| 24 | 14.2 | 11.8 | 19.6 | 11.2 | 7.5 | 13.0 | 13.8 |
| 25 | 47.2 | 40.4 | 41.5 | 12.2 | 8.1 | 12.5 | 13.4 |
| 26 | 31.5 | 41.6 | 39.7 | 12.1 | 7.7 | 13.1 | 13.9 |
| 27 | 40.3 | 46.4 | 40.6 | 12.8 | 8.8 | 13.8 | 13.6 |
| 28 | 40.0 | 43.1 | 42.8 | 12.3 | 8.2 | 12.5 | 13.4 |
| 29 | 38.4 | 37.4 | 33.4 | 12.5 | 8.0 | 13.4 | 13.5 |
| 30 | 0.2 | 0.6 | 6.8 | 10.1 | 7.5 | 12.7 | 13.7 |
| 31 | 23.7 | 29.6 | 50.1 | 10.3 | 7.3 | 13.1 | 13.6 |
| 32 | 51.9 | 63.1 | 57.1 | 11.9 | 8.7 | 11.2 | 13.2 |
| 33 | 6.7 | 25.4 | 33.7 | 10.5 | 7.8 | 12.7 | 13.8 |
| 34 | 1.3 | 5.3 | 2.6 | 10.5 | 7.3 | 13.1 | 13.9 |
| 35 | 73.6 | 79.6 | 76.9 | 12.6 | 8.9 | 12.1 | 12.2 |
| 36 | 75.6 | 87.1 | 85.4 | 13.3 | 9.6 | 12.7 | 12.9 |
| 37 | 46.3 | 47.3 | 27.7 | 12.6 | 7.6 | 12.5 | 12.0 |
| 38 | 47.4 | 52.9 | 49.1 | 12.7 | 7.9 | 13.2 | 12.9 |
| 39 | 32.6 | 40.5 | 31.0 | 12.0 | 7.7 | 12.8 | 13.2 |
| 40 | 45.4 | 61.5 | 62.6 | 12.8 | 7.9 | 13.6 | 13.4 |
| 41 | 46.9 | 57.2 | 61.3 | 12.2 | 7.6 | 12.7 | 13.1 |
| 42 | 62.6 | 68.6 | 71.5 | 13.0 | 8.3 | 12.1 | 12.3 |
| 43 | 99.6 | 93.0 | 90.4 | 13.3 | 8.6 | 11.3 | 12.2 |
| 44 | 78.8 | 75.8 | 83.0 | 12.9 | 8.0 | 12.5 | 13.9 |
| 45 | 93.3 | 93.6 | 86.4 | 12.4 | 7.7 | 11.6 | 11.7 |
| 46 | 69.4 | 77.6 | 71.9 | 12.7 | 9.1 | 11.5 | 12.3 |
| 47 | 60.1 | 74.4 | 65.6 | 12.7 | 7.7 | 11.8 | 12.2 |
| 48 | 85.7 | 93.0 | 93.0 | 13.4 | 8.7 | 10.8 | 11.9 |
| 49 | 101.6 | 95.2 | 92.5 | 13.1 | 8.3 | 9.2 | 13.5 |
| 50 | 60.8 | 63.8 | 66.1 | 12.9 | 7.9 | 11.9 | 13.3 |
| 51 | 69.3 | 83.7 | 80.5 | 13.1 | 8.6 | 12.6 | 13.1 |
| 52 | 86.8 | 85.2 | 80.0 | 13.1 | 9.2 | 11.5 | 12.2 |
| 53 | 79.9 | 74.2 | 78.4 | 13.1 | 7.9 | 11.4 | 12.1 |
| 54 | 67.0 | 77.6 | 72.8 | 12.4 | 8.7 | 12.8 | 13.0 |
| 55 | 35.3 | 38.2 | 38.0 | 11.9 | 7.8 | 13.2 | 13.0 |
| 56 | 120.1 | 110.7 | 97.2 | 12.6 | 8.4 | 9.9 | 13.3 |
| 57 | 99.3 | 106.0 | 106.2 | 13.5 | 9.1 | 12.0 | 12.3 |
| 58 | 78.1 | 90.5 | 94.3 | 11.8 | 9.1 | 12.4 | 11.0 |
| 59 | 151.0 | 131.4 | 127.8 | 13.9 | 8.7 | 8.6 | 11.5 |
| 60 | 98.3 | 105.4 | 115.2 | 13.7 | 8.6 | 10.6 | 12.2 |
| 61 | 62.0 | 65.0 | 60.3 | 12.6 | 8.5 | 12.4 | 13.8 |
| 1_t0 | 0.9 | 20.1 | 22.4 | 10.7 | 7.9 | 13.5 | 14.4 |
| 1_t1 | 65.7 | 85.7 | 80.8 | 13.0 | 8.8 | 12.4 | 13.0 |
| 1_t2 | 78.4 | 95.6 | 95.3 | 13.2 | 9.1 | 12.5 | 13.1 |
| 1_t3 | 73.2 | 84.0 | 86.7 | 12.8 | 8.6 | 12.0 | 12.8 |
| 1_t4 | 86.6 | 95.2 | 94.2 | 12.9 | 8.5 | 11.5 | 12.9 |
| 1_t5 | 65.3 | 85.1 | 92.8 | 12.8 | 8.0 | 12.0 | 13.4 |
| 2_t0 | 13.1 | 24.7 | 33.8 | 10.3 | 7.6 | 13.3 | 13.8 |
| 2_t1 | 77.9 | 84.7 | 82.8 | 12.6 | 7.9 | 12.1 | 12.9 |
| 2_t2 | 82.3 | 88.4 | 83.4 | 13.3 | 8.6 | 12.8 | 13.4 |
| 2_t3 | 104.7 | 94.2 | 90.3 | 12.7 | 8.8 | 11.0 | 12.5 |
| 2_t4 | 56.8 | 53.3 | 56.7 | 12.2 | 7.8 | 12.7 | 13.6 |
| 2_t5 | 57.5 | 52.7 | 59.4 | 11.5 | 7.7 | 12.9 | 13.5 |

| | Expression signals of gene sequences logarithmized for basis 2 | | | | | |
|---|---|---|---|---|---|---|
| | 1665 | 5776 | 2902 | 6585 | 3167 | 745 |
| | NM_002185 | NM_033554 | NM_006287 | NM_174918 | NM_007111 | NM_001007535 |
| Sample | IL7R | HLA-DPA1 | TFPI | C19orf59 | TFDP1 | dJ341D10.1 |
| ID | (6) | (6) | (4) | (2) | (4) | (3) |
| 1 | 13.8 | 13.3 | 7.1 | 10.9 | 10.4 | 8.5 |
| 2 | 13.1 | 14.1 | 6.9 | 11.3 | 10.1 | 8.3 |
| 3 | 13.2 | 13.9 | 7.0 | 10.8 | 9.4 | 8.0 |
| 4 | 12.9 | 13.6 | 7.0 | 11.3 | 11.1 | 9.4 |
| 5 | 12.9 | 14.0 | 6.9 | 9.7 | 10.1 | 8.3 |
| 6 | 13.5 | 14.0 | 6.7 | 11.4 | 10.4 | 8.6 |
| 7 | 13.5 | 13.9 | 6.9 | 10.5 | 10.0 | 8.4 |
| 8 | 12.8 | 14.0 | 7.3 | 11.5 | 9.6 | 8.1 |
| 9 | 13.4 | 13.8 | 7.0 | 10.7 | 10.2 | 8.3 |
| 10 | 12.8 | 13.8 | 7.1 | 11.3 | 10.0 | 8.8 |
| 11 | 12.4 | 14.0 | 7.0 | 11.9 | 10.1 | 8.6 |
| 12 | 13.0 | 13.1 | 7.2 | 11.9 | 10.8 | 8.6 |
| 13 | 12.7 | 13.4 | 7.0 | 12.5 | 11.7 | 8.8 |
| 14 | 13.4 | 13.5 | 7.6 | 12.3 | 10.6 | 9.0 |
| 15 | 12.9 | 13.8 | 7.3 | 11.6 | 10.5 | 9.3 |
| 16 | 13.2 | 13.7 | 7.1 | 12.5 | 10.5 | 9.5 |
| 17 | 13.3 | 13.7 | 6.8 | 12.3 | 10.5 | 8.6 |
| 18 | 12.8 | 13.0 | 6.7 | 11.9 | 9.8 | 8.9 |
| 19 | 13.5 | 13.9 | 8.1 | 12.5 | 10.6 | 8.9 |
| 20 | 12.9 | 14.0 | 6.7 | 10.9 | 10.7 | 8.4 |
| 21 | 12.9 | 14.0 | 6.8 | 12.1 | 10.3 | 9.0 |
| 22 | 13.2 | 14.2 | 6.9 | 11.7 | 10.7 | 9.0 |
| 23 | 13.3 | 13.7 | 7.3 | 11.3 | 10.3 | 8.7 |
| 24 | 13.1 | 13.5 | 7.2 | 11.8 | 10.3 | 8.3 |
| 25 | 11.6 | 12.9 | 7.7 | 13.0 | 9.9 | 8.7 |
| 26 | 12.2 | 13.4 | 7.1 | 14.1 | 10.5 | 8.9 |
| 27 | 12.3 | 13.8 | 6.8 | 14.4 | 10.3 | 9.1 |
| 28 | 12.6 | 12.7 | 7.3 | 13.7 | 10.6 | 8.6 |
| 29 | 12.3 | 13.2 | 7.3 | 13.5 | 9.9 | 8.7 |
| 30 | 13.5 | 13.5 | 7.2 | 11.0 | 10.6 | 8.3 |
| 31 | 11.6 | 12.8 | 7.6 | 12.2 | 12.7 | 8.8 |
| 32 | 11.5 | 12.7 | 7.0 | 14.6 | 11.8 | 9.4 |
| 33 | 12.8 | 13.6 | 6.6 | 12.7 | 11.6 | 9.8 |
| 34 | 13.2 | 13.7 | 7.0 | 11.8 | 9.9 | 8.5 |
| 35 | 11.6 | 11.7 | 9.0 | 14.9 | 11.8 | 10.2 |
| 36 | 11.2 | 11.5 | 7.3 | 15.8 | 11.0 | 10.8 |
| 37 | 12.3 | 12.4 | 7.2 | 14.4 | 9.6 | 7.4 |
| 38 | 11.6 | 13.0 | 7.5 | 14.7 | 9.9 | 8.7 |
| 39 | 12.6 | 13.0 | 7.5 | 13.1 | 12.0 | 9.0 |
| 40 | 12.7 | 12.4 | 7.9 | 14.9 | 11.9 | 9.4 |
| 41 | 12.5 | 12.3 | 8.7 | 14.2 | 12.4 | 9.0 |
| 42 | 12.0 | 12.3 | 8.2 | 15.1 | 11.3 | 8.7 |
| 43 | 10.3 | 11.2 | 9.5 | 15.2 | 11.6 | 9.5 |
| 44 | 10.4 | 10.5 | 7.7 | 14.5 | 10.2 | 10.3 |
| 45 | 9.6 | 10.9 | 7.9 | 15.6 | 12.8 | 8.9 |
| 46 | 11.2 | 12.1 | 7.0 | 15.3 | 11.4 | 9.6 |
| 47 | 12.0 | 12.4 | 8.6 | 15.4 | 11.0 | 10.2 |
| 48 | 11.3 | 11.1 | 7.7 | 15.9 | 11.3 | 10.5 |
| 49 | 10.5 | 10.2 | 7.9 | 14.7 | 12.6 | 10.0 |
| 50 | 12.0 | 12.2 | 8.4 | 14.8 | 11.0 | 8.7 |
| 51 | 11.6 | 12.5 | 8.8 | 15.6 | 12.9 | 9.6 |
| 52 | 11.0 | 10.7 | 7.5 | 15.1 | 10.5 | 10.3 |
| 53 | 10.9 | 11.9 | 8.7 | 14.4 | 11.2 | 9.1 |
| 54 | 10.6 | 12.1 | 7.9 | 15.6 | 11.1 | 9.7 |
| 55 | 12.9 | 12.9 | 8.4 | 13.1 | 11.4 | 8.7 |
| 56 | 8.0 | 10.6 | 8.5 | 15.7 | 11.6 | 9.9 |
| 57 | 9.6 | 11.7 | 8.7 | 16.0 | 12.1 | 11.2 |
| 58 | 10.7 | 11.2 | 8.6 | 15.5 | 12.0 | 11.2 |
| 59 | 8.0 | 9.5 | 7.7 | 16.2 | 10.6 | 9.9 |
| 60 | 10.6 | 11.7 | 9.0 | 16.0 | 12.7 | 10.7 |
| 61 | 10.9 | 12.7 | 8.0 | 14.5 | 11.4 | 9.0 |
| 1_t0 | 13.0 | 14.3 | 6.8 | 12.8 | 11.0 | 9.9 |
| 1_t1 | 11.0 | 12.8 | 7.6 | 15.8 | 11.9 | 10.9 |
| 1_t2 | 10.8 | 11.9 | 8.0 | 16.0 | 12.0 | 11.5 |
| 1_t3 | 11.2 | 11.7 | 8.4 | 15.4 | 12.5 | 9.9 |
| 1_t4 | 10.1 | 11.8 | 8.6 | 15.7 | 13.3 | 9.6 |
| 1_t5 | 11.3 | 12.2 | 8.3 | 15.8 | 12.8 | 10.2 |
| 2_t0 | 12.0 | 14.3 | 7.9 | 12.3 | 12.5 | 9.4 |
| 2_t1 | 9.6 | 12.4 | 8.4 | 15.4 | 11.8 | 9.9 |
| 2_t2 | 9.5 | 12.6 | 8.0 | 15.7 | 11.9 | 9.6 |
| 2_t3 | 9.0 | 11.0 | 8.2 | 14.1 | 12.0 | 11.3 |
| 2_t4 | 10.2 | 13.3 | 8.0 | 13.3 | 11.2 | 9.3 |
| 2_t5 | 9.9 | 12.8 | 8.4 | 13.2 | 11.2 | 9.0 |

### Example 3

### Determining the Severity of a Host Response on Alternative Platforms

[0276] As was already mentioned in the 2nd example, gene expression signals were measured by way of a real time PCR for 7 relevant gene markers from table 5 and for 67 RNA samples. For this, the following measuring and analyzing steps were performed.

### Real-Time-PCR

[0277] The Platinum SYBR Green q PCR SuperMix-UDG kit of Invitrogen (Invitrogen Germany, Karlsruhe, Federal Republic of Germany) was used. The cDNA of the patients was diluted with water in a ratio of 1:25, of which 1 μl was utilized in the PCR. Each of the samples was replicated 3 times using a pipette.

PCR formulation per well (10 μl) 2 μl of template cDNA 1:100
[0278] 1 μl of forward primer, 10 mM
[0279] 1 μl of reverse primer, 10 mM
[0280] 1 μl of Fluorescin Reference Dye
[0281] 5 μl of Platinum SYBR Green qPCR SuperMix-UDG

[0282] A master mix without a template was manufactured which was aliquoted in the PCR plate in 9 μl aliquots; for this, the patients' cDNAs, respectively, were pipetted.

[0283] The subsequent PCR program consisted of the following steps:

| | |
|---|---|
| 95° C. | 2 min (activation of polymerase) |
| 95° C. | 10 sec (denaturation)* |
| 58° C. | 15 sec (apposition)* |
| 72° C. | 20 sec (extension)* |
| 55° C.-95° C. | 10 sec (generation of a melting graph, ** |
| | increase of the initial temperature |
| | after each step by 1° C.) |

*40 x
** 41 x

[0284] The iQ™ 5 Multicolor Real-Time-PCR Detection System of BIORAD with the corresponding evaluation software was used. The so-called Ct values (estimated number of cycles in exceeding a threshold) were calculated by the program automatically as measuring result in the range of a linear increase of the curve. The measuring values were stored in the string format.

### Data Analysis:

[0285] The data analysis was performed using the free software R Project version R 2.8.0 (R.app GUI 1.26 (5256), S. Urbanek & S. M. lacus, © R Foundation for Statistical Computing, 2008), which is available under www.r-project.org (cf. R Development Core Team, 2006).

[0286] The data matrices of the measured Ct values that were used in the analysis, were processed as follows. Together with the marker genes 3 so-called housekeeper genes were measured that were used as references. For normalizing, an average value of the 3 selected housekeeper genes was computed for each sample. From this value, the Ct value of each individual marker was deducted. Each Delta Ct value thus gained reflects the relative abundance of the target transcript related to the calibrator, a positive Delta Ct value signifying one abundance higher than an average value of the references, and a negative Delta Ct value signifying one abundance lower than an average value of the references.

[0287] The data mix of normalized Delta Ct values was summarized in table 6. In accordance with formula 1 and the description in the 1^{st} example, the corresponding score for quantifying the severity of a host response was computed from the expression signals that were measured by way of real time PCR. A comparison of this score with the master score is shown in FIG. 6, the master score being depicted by a corresponding error bar of 10 percentage points upwards and downwards, and the score determined from the PCR measurement being depicted as rhombus. As was already described in the 1^{st} example, the calculation provision of the score is independent of the number of gene markers used and of the measuring platform; for calculating the score, merely the average expression signals of phenotype groups NaN and SaS, which were defined in table 1, are required. As is apparent from FIG. 6, the score, which was determined by real time PCR measurement of 7 markers, exhibits a similar trend as the master score and thus points out to the severity of the host response under an acute inflammatory burden of the organism. It should be mentioned that real time PCR is a simpler, quicker and less expensive measuring platform for determining gene expression than a micro array. Its constraint is the lower number of markers measurable concurrently.

TABLE 6
Summary of the Delta Ct values normalized with regard to 3 references for 7 selected gene sequences
and 67 RNA samples. The sample ID relates to samples of the patients that were depicted in table 2.

| | Sequence-IDs | | | | | | |
|---|---|---|---|---|---|---|---|
| | | 507, 7695, | | | | | |
| | | 7696, 7697, | | | | | |
| | | 7698, 7699, | | | | | 7702, |
| | 1983 | 7700, 7701 | 5431, 4636 | 3043 | 1665 | 5776 | 7703, 7704 |
| | Symbol | | | | | | |
| | TLR5 | CD59 | CPVL | FGL2 | IL7R | HLA-DPA1 | CLU |
| backward | Primer sequence: forward | | | | | | |
| Sample ID | 7717 7718 | 7705 7706 | 7709 7710 | 7711 7712 | 7715 7716 | 7713 7714 | 7707 7708 |
| 1 | −2.25 | −1.84 | −0.19 | 1.14 | −1.33 | −1.50 | 0.01 |
| 2 | −4.07 | −2.43 | −0.62 | 1.53 | −0.18 | 2.41 | −1.59 |
| 3 | −6.00 | −2.30 | −1.01 | 0.87 | −0.44 | 2.85 | −1.29 |
| 4 | −5.53 | −2.87 | −0.32 | 1.84 | −0.65 | 2.12 | −0.43 |
| 6 | −5.11 | −3.84 | −0.97 | 0.67 | −1.12 | 2.19 | −1.26 |
| 7 | −6.00 | −2.70 | −0.74 | 1.18 | −0.47 | 2.46 | −3.19 |
| 9 | −5.17 | −2.00 | 0.06 | 1.58 | −0.03 | 2.49 | −0.94 |
| 10 | −4.54 | −2.54 | 0.45 | 1.87 | −0.80 | 1.94 | −0.38 |
| 11 | −3.66 | −2.07 | 0.00 | 2.20 | −1.48 | 2.55 | −1.04 |
| 12 | −3.85 | −2.41 | 0.49 | 1.14 | −0.52 | −1.41 | 0.13 |
| 13 | −2.62 | −1.92 | 0.59 | 2.77 | −1.36 | 1.47 | −0.48 |
| 14 | −2.65 | −1.73 | −0.08 | 1.59 | −1.06 | 1.53 | −0.03 |
| 15 | −4.17 | −2.43 | −0.24 | 1.22 | −1.08 | 2.15 | 0.56 |
| 16 | −2.84 | −1.89 | −0.68 | 1.47 | −2.00 | 2.15 | −0.31 |
| 17 | −3.57 | −2.58 | 0.00 | 1.94 | −0.53 | 2.09 | −1.00 |
| 18 | −2.82 | −2.15 | −0.61 | 1.02 | −1.05 | 0.97 | −0.69 |
| 21 | −5.03 | −2.02 | −0.29 | 1.30 | 0.06 | 2.31 | −0.90 |
| 22 | −4.66 | −2.56 | −0.53 | 1.77 | −0.46 | 2.52 | −1.58 |
| 23 | −4.49 | −2.83 | −1.05 | 0.88 | −1.38 | 2.46 | 0.18 |
| 24 | −3.68 | −2.79 | −0.55 | 1.57 | −0.67 | 2.04 | −1.22 |
| 25 | −5.12 | −1.60 | −0.04 | 1.68 | −1.53 | 1.17 | 0.93 |
| 26 | −2.89 | −1.75 | 0.11 | 2.35 | −2.04 | 1.71 | −0.23 |
| 27 | −1.61 | −0.87 | 0.15 | 1.26 | −1.27 | 1.15 | 0.10 |
| 28 | −5.16 | −1.62 | −0.26 | 1.26 | −1.01 | 1.08 | −0.24 |
| 29 | −2.63 | −2.23 | 0.49 | 1.77 | −1.22 | 0.75 | 0.76 |
| 30 | −5.35 | −2.54 | −0.83 | 1.62 | −0.98 | 2.42 | −0.21 |
| 31 | −4.71 | −2.30 | 0.23 | 2.13 | −2.87 | 2.14 | 1.16 |
| 32 | −4.07 | −0.74 | −1.33 | 1.66 | −1.79 | 1.84 | −0.34 |
| 33 | −4.12 | −2.46 | −0.56 | 1.77 | −0.40 | 1.53 | −0.37 |
| 34 | −5.24 | −3.25 | −0.25 | 1.38 | −0.05 | 0.86 | −1.17 |
| 35 | −1.59 | 0.20 | −0.94 | 1.07 | −2.55 | −0.44 | 2.73 |
| 36 | −0.43 | 0.74 | −0.73 | 0.49 | −3.11 | −0.77 | −0.27 |
| 37 | −2.15 | −2.19 | −0.22 | 1.36 | −1.80 | 2.00 | 0.57 |
| 40 | −1.32 | −1.13 | 0.61 | 1.47 | −2.70 | 0.96 | 1.71 |
| 41 | −5.74 | −1.33 | −0.50 | 0.88 | −2.97 | 0.61 | 1.25 |
| 42 | −2.07 | −0.67 | −1.92 | −0.11 | −3.74 | −0.09 | 1.01 |
| 43 | −1.61 | −0.66 | −2.33 | 0.06 | −5.89 | −0.32 | 2.98 |
| 44 | −1.12 | −1.14 | −1.18 | 1.60 | −3.10 | −1.50 | 0.86 |
| 45 | −4.55 | −0.58 | −1.26 | −0.36 | −1.22 | −0.54 | 0.89 |
| 46 | −1.81 | 0.49 | −1.78 | 0.41 | −1.95 | 1.31 | 0.26 |
| 47 | −4.57 | −1.01 | −1.51 | 0.09 | −2.03 | 0.86 | 0.37 |
| 48 | −1.95 | 0.51 | −4.10 | −1.18 | −3.53 | −0.60 | 0.23 |
| 49 | −6.00 | −0.58 | −5.08 | 1.61 | −3.96 | −1.15 | 0.62 |
| 50 | −4.77 | −1.53 | −1.65 | 0.56 | −2.74 | 0.24 | 1.91 |
| 51 | −0.66 | −0.40 | −0.69 | 0.65 | −3.07 | 0.27 | 2.06 |
| 52 | −1.53 | 0.70 | −1.82 | 0.38 | −2.45 | −0.79 | 0.87 |
| 53 | −3.70 | −0.65 | −1.85 | 0.69 | −2.93 | 0.35 | 1.92 |
| 54 | −1.64 | 0.40 | −0.27 | 1.05 | −2.89 | 0.92 | 1.61 |
| 55 | −5.13 | −1.34 | 0.20 | 0.88 | −0.68 | 1.70 | 1.85 |
| 56 | −1.13 | 0.47 | −2.00 | 1.20 | −3.25 | 0.03 | 1.44 |
| 57 | −1.54 | 0.77 | −1.23 | −0.16 | −4.08 | 0.15 | 2.15 |
| 58 | −1.53 | 1.35 | −0.03 | 0.11 | −1.94 | −0.08 | 2.23 |
| 59 | 0.15 | 1.01 | −4.02 | −1.40 | −4.17 | −1.50 | 1.06 |
| 60 | −0.18 | 0.51 | −3.53 | −0.24 | −5.21 | −0.63 | 2.41 |
| 61 | −2.23 | −0.74 | −0.62 | 1.66 | −3.92 | 0.92 | 1.03 |
| 1_t0 | −5.06 | −2.18 | −0.25 | 2.04 | −0.15 | 2.46 | −1.88 |
| 1_t1 | −1.61 | 0.06 | −0.86 | 0.75 | −2.41 | 1.23 | 0.98 |
| 1_t2 | −1.91 | 0.09 | −1.61 | 0.15 | −3.13 | 0.17 | 1.20 |
| 1_t3 | −1.87 | 0.60 | −1.27 | 0.85 | −2.96 | 1.02 | 2.22 |
| 1_t4 | −2.50 | 0.75 | −2.16 | 0.85 | −4.17 | 0.85 | 1.87 |
| 1_t5 | −2.09 | 0.11 | −1.94 | 0.95 | −3.28 | 0.65 | 1.92 |
| 2_t0 | −6.00 | −1.30 | 0.71 | 2.09 | −0.85 | 3.32 | 2.22 |
| 2_t1 | −4.17 | −0.35 | −0.83 | 0.99 | −3.37 | 0.46 | 2.15 |
| 2_t2 | −3.12 | −0.57 | −0.42 | 1.40 | −3.80 | 0.58 | 2.21 |
| 2_t3 | −4.70 | −0.66 | −2.42 | 0.39 | −3.65 | −0.68 | 1.75 |
| 2_t4 | −4.65 | −1.53 | 0.23 | 1.92 | −2.69 | 1.20 | 1.82 |
| 2_t5 | −5.62 | −1.56 | −0.15 | 1.79 | −3.43 | 0.65 | 1.32 |

### Example 4

### Differential Expression of Proteins for In Vitro Determination of the Severity of a Host Response of Patients

[0288] The differential expression of markers for in-vitro determination of the severity of a host response of patients cannot only be effected by means of transcriptomic markers, but also on a protein level. There are numerous examples for the use of proteins as bio markers, which was already addressed shortly (Pierrakos, 2010). Likewise, it is pointed out to the fact that individual protein markers so far do not provide satisfactory results or provide merely mediocre results and that combinations of protein markers preferably should be applied.

[0289] As an example, experiments are described in the following the result of which proves that protein markers are equally suited for in vitro determination of the severity of a host response of patients. Preferably those proteins were selected for examination for the gene transcripts of which it could already be shown in previous examples that they are suited for the purpose indicated.

### Examined Group of Patients

[0290] Samples of 9 patients with sepsis, 3 patients after cardiac surgery interventions and 7 healthy test persons were examined (EDTA blood samples). The patients that had undergone a cardiac surgery intervention (ICU patients) according to clinical criteria were classified with the diagnosis of SIRS (Systemic Inflammatory Response Syndrome) at the time the samples were taken. The three groups of patients represent the phenotypes LaS and SaS (together), NaS and NaN form table 1.

### Experimental Implementation

[0291] From the blood samples two cell populations of white blood cells were isolated with the aid of a density-gradient (Lymphocyte Separation Medium LSM 1077, PAA Laboratories GmbH, Colbe): peripheral mononuclear cells (peripheral blood mononuclear cells, PBMCs) and polymorphonuclear cells (polymorphonuclear cells, PMNs). The cells used for the experiments represented two sub-populations of the PBMCs: the T lymphocytes and the monocytes.

[0292] Detection of the proteins was done by way of flow cytometry and Western Blot, flow cytometry being used for surface proteins, and Western Blot being used for intracellular proteins. For both methods monoclonal antibodies were preferably used.

[0293] By way of flow cytometry (FACSCalibur Flow Cytometer, Becton Dickinson GmbH Heidelberg) the expression of proteins of the following genes was examined for T lymphocytes and monocytes: CD59, HLA-DPA1, IL7R, TLR5, and HLA-DR complex. The analyzed blood samples were composed as follows: sepsis patients (n=9), ICU patients (n=3) and healthy controls (n=7). T lymphocytes and monocytes were distinguished with the aid of two surface markers: CD3 coreceptor for T lymphocytes [Tsoukas et al., 1985], and CD14 receptor for monocytes [Goyert et al., 1988]. Moreover, the cells were identified by means of their cell size (FSC-H) and their granularity (SSC-H).

[0294] By way of Western Blot the expression of the proteins from the following genes was examined in the lysate of the total population of PBMCs in sepsis patients and healthy test persons: FGL2, CLU and CPVL. The experiments were carried out using Standard Western Blot listings. Positive controls (lysates of transfected cells) were always performed and normalization of the experiments was done on the basis of β actin. The anti-fibrinogen-like protein 2 (product of FGL2), anti-clusterin (product of CLU gene) and anti-vitellogenic carboxypeptidase-like protein (product of CPVL gene) antibodies were monoclonal mouse antibodies, the secondary antibody was a HRP-coupled rabbit-anti-mouse-antibody. The antibody for β actin was a monoclonal (13E5) rabbit antibody (Cell Signalling Technology Inc., Danvers, USA).

### Data Analysis

[0295] The measuring data were provided by the software of the respective measuring device. They are summarized in table 7. The expression of individual proteins for the 2 to 3 examined groups of phenotypes was tested for statistically significant differences. In so doing, as in the 1^{st} embodiment, the one-way analysis of variance (Anova) and the pairwise t-test were used. The results of the comparisons are listed at the end of table 7. They are summarized in the following.

[0296] In T lymphcytes the protein expression from the IL7R gene was significantly lower in sepsis patients than in healthy donors. Thus, a change in the same direction as in the gene expression was to be noted. The expression of MHC class II HLA-DPA1 antigen (product from HLA-DPA1 gene) was significantly higher in sepsis patients than in healthy donors. Thus, a change in the contrary direction than in gene expression was to be noted. In the protein expression from CD59, TLR5 and HLA-DR genes the T lymphocytes exhibited no significant differences between the examined groups of phenotypes. In the protein expression from genes HLA-DPA1 and TLR5 the monocytes did not exhibit any differences in the 3 groups: the protein expression from the CD59 and HLA-DR gene, however, was significantly higher in healthy test persons than in SIRS and sepsis patients. An IL7R gene product could not be traced in monocytes.

[0297] The Western-Blot analysis of PBMC lysates revealed that the protein expression from the FGL2 gene is significantly increased in sepsis patients in comparison to healthy controls, whereas the protein expression from the CLU gene is reduced in sepsis patients. Thus, for both proteins a change in the expression in a contrary direction than in gene expression was revealed. A CPVL gene product could not be traced in the lysates.

TABLE 7
Protein expression values for selected markers. Non-measured values were referred to by n.a.
Average values of patients that were significantly different from those of healthy persons,
were marked correspondingly (“**” for p <0.01, “*” for p <0.05, und “⁺” for p <0.1).

| | | Protein from gene | | | | | | |
|---|---|---|---|---|---|---|---|---|
| | | TLR5 | | CD59 | | CPVL | FGL2 | IL7R |
| | | Cell type | | | | | | |
| | | T-Lympho- | Mono- | T-Lympho- | Mono- | Whole blood | Whole blood | T-Lympho- |
| | | cytes | cytes | cytes | cytes | [Ratio for β | [Ratio for β | cytes |
| Sample number | | [%] | [%] | [%] | [%] | Actin] | Actin]] | [%] |
| Donor | 1 | 85,.2 | n.a. | 76.1 | 86.9 | 0 | 0.41 | 28.7 |
| | 2 | 39.8 | 73.2 | 78.8 | 77.1 | 0 | 0.52 | 33 |
| | 3 | 58.9 | 87.1 | 86.5 | 88.4 | n.a. | n.a. | 49.3 |
| | 4 | 62.7 | n.a. | 72.7 | 75.4 | 0 | 1.23 | 30.8 |
| | 5 | 54 | 91.5 | 84.2 | 63.5 | 0 | 0.87 | 39.6 |
| | 6 | 74.6 | 64.3 | 64.8 | 65 | n.a. | n.a. | 24.3 |
| | 7 | 75.8 | 81 | 81.7 | 76.4 | n.a. | n.a. | 43.3 |
| SIRS | 8 | 38.9 | 60.6 | 69.3 | 82 | n.a. | n.a. | 32.7 |
| | 9 | 77.2 | 80.9 | 64 | 58.9 | n.a. | n.a. | 20.7 |
| | 10 | 35.7 | 75.8 | 44.6 | 84.1 | n.a. | n.a. | 8.3 |
| severe | 11 | 60.3 | n.a. | 63.9 | 0 | n.a. | n.a. | 17 |
| sepsis/ | 12 | 89.3 | 54.9 | 80.7 | 37.6 | n.a. | n.a. | 19.7 |
| septic | 13 | 35.2 | 20.5 | 93.3 | 23.2 | 0 | 1.01 | 10.3 |
| shock | 14 | 80.2 | 93.7 | 68 | 73.3 | 0 | 1.34 | 18.9 |
| | 15 | 87.9 | 53.5 | 93.8 | 26.3 | n.a. | n.a. | 4.9 |
| | 16 | 68.8 | n.a. | 78.7 | 8.5 | n.a. | n.a. | 15 |
| | 17 | 51.8 | 68.1 | 79.9 | 47.7 | n.a. | n.a. | 9.4 |
| | 18 | 71.1 | 72.9 | 83.8 | 51.3 | 0 | 1.68 | 23.6 |
| | 19 | n.a. | n.a. | 86.8 | 77.2 | n.a. | n.a. | 33.2 |
| Average | Donor | 64.4 | 79.4 | 77.8 | 76.1 | 0 | 0.76 | 35.6 |
| value | SIRS | 50.6 | 72.4 | 59.3⁺ | 75.0 | n.a. | n.a. | 20.6 |
| | Sepsis | 68.1 | 60.6 | 81 | 38.3** | 0 | 1.34⁺ | 16.9** |
| P value | Anova | 0.381 | 0.270 | 0.013 | 0.004 | n.a. | 0.084 | 0.003 |
| | SIRS vs. | 0.416 | 0.416 | 0.118 | 0.909 | n.a. | n.a. | 0.151 |
| | Donor | | | | | | | |
| | Sepsis vs. | 0.324 | 0.345 | 0.082 | 0.018 | n.a. | n.a. | 0.664 |
| | SIRS | | | | | | | |
| | Sepsis vs. | 0.685 | 0.133 | 0.487 | 0.003 | n.a. | 0.084 | 0.001 |
| | Donor | | | | | | | |

| | | Protein from gene | | | | |
|---|---|---|---|---|---|---|
| | | HLA-DPA1 | | CLU | HLA-DR | |
| | | Cell type | | | | |
| | | T-Lympho- | Mono- | Whole blood | T-Lympho- | Mono- |
| | | cytes | cytes | [Ratio for β | cytes | cytes |
| Sample number | | [%] | [%] | Actin]] | [%] | [%] |
| Donor | 1 | 22.4 | 26.6 | 0.51 | n.a. | n.a. |
| | 2 | 12.7 | 45.3 | 0.54 | n.a. | n.a. |
| | 3 | 33.1 | 77.3 | n.a. | n.a. | n.a. |
| | 4 | 24.6 | 51 | 0.59 | 15.8 | 44.6 |
| | 5 | 31.3 | 35.4 | 0.37 | 16.3 | 57.6 |
| | 6 | 34.5 | 38 | n.a. | 22 | 58.8 |
| | 7 | 24.6 | 49 | n.a. | 11.8 | 67.3 |
| SIRS | 8 | 15 | 34 | n.a. | 17.1 | 17 |
| | 9 | 13.1 | 24.9 | n.a. | 7.2 | 7.8 |
| | 10 | 35.8 | 40.5 | n.a. | 26.3 | 7.8 |
| severe | 11 | 43.2 | 0 | n.a. | n.a. | n.a. |
| sepsis/ | 12 | 50 | 32.1 | n.a. | n.a. | n.a. |
| septic | 13 | 52.9 | 16.5 | 0.35 | 8.31 | 5.19 |
| shock | 14 | 42.3 | 82.6 | 0.4 | 23 | 27.1 |
| | 15 | 82.3 | 19.4 | n.a. | 2.91 | 2.89 |
| | 16 | 17.8 | 5 | n.a. | 15.6 | 4.9 |
| | 17 | 18.8 | 25.5 | n.a. | 6.6 | 15 |
| | 18 | 30.2 | 23.3 | n.a. | 11.5 | 6.1 |
| | 19 | 40.7 | 61.7 | n.a. | 14.4 | 45.1 |
| Average | Donor | 26.2 | 46.1 | 0.5 | 16.48 | 57.08 |
| value | SIRS | 21.3 | 33.1 | n.a. | 16.87 | 10.87 |
| | Sepsis | 42.0* | 29.6 | 0.38 | 11.76 | 15.18 |
| P value | Anova | 0.07 | 0.325 | 0.153 | 0.427 | 0.000 |
| | SIRS vs. | 0.582 | 0.129 | n.a. | 0.952 | 0.001 |
| | Donor | | | | | |
| | Sepsis vs. | 0.081 | 0.728 | n.a. | 0.464 | 0.536 |
| | SIRS | | | | | |
| | Sepsis vs. | 0.048 | 0.148 | 0.153 | 0.185 | 0.000 |
| | Donor | | | | | |

### SUMMARY

[0298] The example described above makes clear that the severity of the host response in case of an acute inflammation also is reflected in the expression of proteins from selected genes. The results of gene expression analysis provide for an extensive collection of marker candidates. It is therefore obvious to determine a suitable severity score from protein expression, which sufficiently resembles the master score from the gene expression introduced in example 1.

### LITERATURE

[0299] ACCP/SCCM (1992), Crit. Care Med 20, 864-74
[0300] Altschul S F, Gish W, Miller W, Myers E W, Lipman D J. (1990) Basic local alignment search tool. J Mol. Biol. October 5; 215(3):403-10.
[0301] Benson D. A., Karsch-Mizrachi I., Lipman D. J., Ostell J., Sayers E. W. (2009) GenBank. Nucleic Acids Res. 37(Database issue):D26-31.
[0302] Boldrick et al. (2002): Stereotyped and specific gene expression programs in human innate immune responses to bacteria, PNAS 99, 972-977.
[0303] Bone R C, Balk R A, Cerra F B, Dellinger E P, Fein A M, Knaus W A, Schein R M, Sibbald W J, the ACCP/SCCM Consensus Conference Committee (1992) Definitions for Sepsis and organ failure and guidelines for the use of innovative therapies in Sepsis. Chest 101, 1656-1662
[0304] Brun-Buisson C, Doyon F, Carlet J, Dellamonica P, Gouin F, Lepoutre A, Mercier J C, Offenstadt G, Regnier B (1995) Incidence, risk factors, and outcome of severe Sepsis and septic shock in adults. A multicenter prospective study in intensive care units. French ICU Group for Severe Sepsis. JAMA 274, 968-974
[0305] Brun-Buisson C, Roudot-Thoraval F, Girou E, Grenier-Sennelier C, Durand-Zaleski I (2003) The costs of septic syndromes in the intensive care unit and influence of hospital-acquired Sepsis. Intensive Care Med 29, 1464-1471
[0306] Bustin S A. (2002) Quantification of mRNA using real-time reverse transcription PCR (RT-PCR): trends and problems. J Mol. Endicronol. 29:23-29.
[0307] Calandra T, Cohen J. (2005) International Sepsis Forum Definition of Infection in the ICU Consensus Conference. Critical Care Med. 33(7):1538-48.
[0308] Calvano S E, Xiao W, Richards D R, Felciano R M, Baker H V, Cho R J, Chen R O, Brownstein B H, Cobb J P, Tschoeke S K, Miller-Graziano C, Moldawer L L, Mindrinos M N, Davis R W, Tompkins R G, Lowry S F (2005). Nature 437: 10327.
[0309] Centers for Disease Control (CDC). (1990) Increase in National Hospital Discharge Survey rates for septicemia—United States, 1979-1987. MMWR Morb Mortal Wkly Rep. 19; 39(2):31-4.
[0310] Carrigan S D Scott G Tabrizian M (2004) Toward resolving the challenges of Sepsis. Clin Chem 50(8), 1301-1314
[0311] Dagan R, Shriker O, Hazan I, Leibovitz E, Greenberg D, Schlaeffer F, Levy R. (1998) Prospective study to determine clinical relevance of detection of pneumococcal DNA in sera of children by PCR, J Clin Microbiol. 36:669-73.
[0312] Davenport P and Land K J. (2007) Isolation of Leclercia adecarboxylata from the blood culture of an asymptomatic platelet donor. Transfusion 47:1816-9.
[0313] Du P, Kibbe W, Lin S (2008). Bioinformatics 24(13):1547-1548
[0314] FDA: In Vitro Diagnostic Multivariate Index Assays. Draft Guidance for Industry, Clinical Laboratories, and FDA Staff (2007) http://www.fda.gov/downloads/MedicalDevices/DeviceRegulationandGuidance/GuidanceD ocuments/ucm071455.pdf
[0315] Feezor R J, Oberholzer C, Baker H V, Novick D, Rubinstein M, Moldawer L L, Pribble J, Souza S, Dinarello C A, Ertel W, Oberholzer A. (2003) Molecular characterization of the acute inflammatory response to infections with gram-negative versus gram-positive bacteria. Infect Immun. 71(10):5803-13.
[0316] Feezor R J, Baker H V, Xiao W et al. (2004) Genomic and Proteomic Determinants of Outcome in Patients Untergoing Thoracoabdominal Aortic Aneurysm Repair. J Immun 172, 7103-7109
[0317] Fine J M, Fine M J, Galusha D, Petrillo M, Meehan T P. (2002) Patient and hospital characteristics associated with recommended processes of care for elderly patients hospitalized with pneumonia: results from the medicare quality indicator system pneumonia module. Arch. Intern. Med. 162:827-833.
[0318] Fleige S, Pfaffl M W (2006). Mol Aspects Med 27: 126-139
[0319] Foteinou P T, Calvano S E, Lowry S F, Androulakis I P (2009) Mathematical Biosciences 217: 27-42
[0320] Garnacho-Montero J, Garcia-Garmendia J L, Barrero-Almodovar A, Jimenez-Jimenez F J, Perez-Paredes C, Ortiz-Leyba C. (2003) Impact of adequate empirical antibiotic therapy on the outcome of patients admitted to the intensive care unit with sepsis. Crit. Care Med. 31:2742-2751.
[0321] Goyert S M, Ferrero E, Rettig W J, Yenamandra A K, Obata F, Le Beau M M (1988). The CD14 monocyte differentiation antigen maps to a region encoding growth factors and receptors. Science 29; 239(4839):497-500
[0322] Goutte C, Toft P, Rostrup E, Nielsen F, Hansen L K (1999). Neuroimage, 9(3):298-310
[0323] Hartigan, J A, Wong, M A (1979). Applied Statistics 28, 100-108
[0324] Heffner A C, Horton J M, Marchick M R, Jones A E (2010) Etiology of Illness in Patients with Severe Sepsis Admitted to the Hospital from the Emergency Department. CID 50:814-820.
[0325] Hotchkiss R S, Coopersmith C M, McDunn J E, Ferguson T A. (2009) The sepsis seesaw: tilting toward immunosuppression. Nat. Med. 15(5):496-7.
[0326] Hotchkiss R S, Opal S. (2010) Immunotherapy for sepsis—a new approach against an ancient foe. N Engl J. Med. 363(1):87-9.
[0327] Huber W, von Heydebreck A, Sueltmann H, Poustka A, Vingron M (2002) Bioinformatics 18 Supp1.1:96-5104
[0328] Huggett J, Dheda K, Bustin S, Zumla A. (2005) Real-time RT-PCR normalisation: strategies and considerations. Genes Immun. 6(4):279-284.
[0329] Ibrahim E H, Sherman G, Ward S, Fraser V J, Kollef M H. The influence of inadequate antimicrobial treatment of bloodstream infections on patient outcomes in the ICU setting. Chest. 2000; 118(1):146-55.
[0330] Inoue S, Unsinger J, Davis C G, Muenzer J T, Ferguson T A, Chang K, Osborne D F, Clark A T, Coopersmith C M, McDunn J E, Hotchkiss R S. (2010) IL-15 prevents apoptosis, reverses innate and adaptive immune dysfunction, and improves survival in sepsis. J. Immunol. 184(3):1401-9.
[0331] Iregui, M., Ward, S., Sherman, G., Fraser, V. J., Kollef, M. H. (2002) Clinical importance of delays in the initiation of appropriate antibiotic treatment for ventilator-associated pneumonia. Chest 122(1):262-268.
[0332] Isaacman, D. J. et al., Accuracy of a polymerase chain reaction-based assay for detection of pneumococcal bacteremia in children, Pediatrics, 1998; 101:813-6.
[0333] Johnson S B, Lissauer M, Bochicchio G V, Moore R, Cross A S, Scalea T M. (2007) Gene Expression Profiles Differentiate Between Sterile SIRS and Early Sepsis Annals of Surgery 245(4), 611-621
[0334] Koulaouzidis A, Bhat S, Saeed A A (2009) Spontaneous bacterial peritonitis. World J. Gastroenterol. 15(9):1042-9.
[0335] Increase in National Hospital Discharge Survey rates for septicemia—United States, 1979-1987. MMWR Morb Mortal Wkly Rep 1990 39, 31-34
[0336] Kimura F, Shimizu H, Yoshidome H, Ohtsuka M, Miyazaki M. (2010) Immunosuppression following surgical and traumatic injury. Surg. Today 40(9):793-808.
[0337] Klein D. (2002) Quantification using real-time PCR technology: applications and limitations. Trends Mol. Med. 8(6):257-260.
[0338] Kofoed K, Andersen O, Kronborg G, Tvede M, Petersen J, Eugen-Olsen J, Larsen K (2007), Use of plasma C-reactive protein, procalcitonin, neutrophils, macrophage migration inhibitory factor, soluble urokinase-type plasminogen activator receptor, and soluble triggering receptor expressed on myeloid cells-1 in combination to diagnose infections: a prospective study. Critical Care 11, R38
[0339] Kumar A, Roberts D, Wood K E et al. (2006) Duration of hypothension before initiation of effective antimicrobial therapy is the critical determinant of survival in human septic shock. Crit. Care Med 34(6), 1589-1596
[0340] Le-Gall J R, Lemeshow S, Leleu G, Klar J, Huillard J, Rue M, Teres D, Artigas A (1995) Customized probability models for early severe Sepsis in adult intensive care patients. Intensive Care Unit Scoring Group. JAMA 273, 644-650
[0341] Levy M M, Fink M P, Marshall J C, Abraham E, Angus D, Cook D, Cohen J, Opal S M, Vincent J L, Ramsay G et al. (2003) 2001 SCCM/ESICM/ACCP/ATS/SIS International Sepsis Definitions Conference. Intensive Care Med 29, 530-538
[0342] Mardia, K V, Kent, J T, Bibby, J M (1979): Multivariate Analysis, New York 1979
[0343] Marshall J C, Foster D, Vincent J L, Cook D J, Cohen J, Dellinger R P, Opal S, Abraham E, Brett S J, Smith T, Mehta S, Derzko A, Romaschin A; MEDIC study. (2004) Diagnostic and prognostic implications of endotoxemia in critical Illness: Results of the MEDIC Study. J Infect Dis. 190(3):527-34.
[0344] Meisel C, Schefold J C, Pschowski R, Baumann T, Hetzger K, Gregor J, Weber-Carstens S, Hasper D, Keh D, Zuckermann H, Reinke P, Volk H D. (2009) Granulocyte-macrophage colony-stimulating factor to reverse sepsis-associated immunosuppression: a double-blind, randomized, placebo-controlled multicenter trial.
[0345] Am J Respir Crit. Care Med. 180(7):640-8.
[0346] Monneret G, Venet F, Pachot A, Lepape A. (2008) Monitoring Immune dysfunctions in the Septic Patient: A New Skin for the Old Ceremony, Mol. Med. 14(1-2):64-78.
[0347] Monneret G, Venet F, Meisel C, Schefold J C. (2010) Assessment of monocytic HLA-DR expression in ICU patients: analytical issues for multicentric flow cytometry studies. Crit. Care 14(4):432.
[0348] Muenzer J T, Davis C G, Chang K, Schmidt R E, Dunne W M, Coopersmith C M, Hotchkiss R S. (2010) Characterization and modulation of the immunosuppressive phase of sepsis. Infect Immun. 78(4):1582-92.
[0349] Nolan T, Hands R E, Bustin S A. (2006) Quantification of mRNA using realt-time RT-PCR. Nat. Protoc. 1(3):1559-1582.
[0350] Opal S M, Lim Y-P, Siryaporn E, et al. (2005) Longitudinal studies of inter-alpha inhibitor proteins in severly septic patients: A potential clinical marker and mediator of severe sepsis. Clin Invest 35(2), 387-292
[0351] Pachot A, Lepape A, Vey S, et al. (2006) Systemic transcriptional analysis in survivor and non-survivor septic shock patients: a preliminary study. Immunol Lett 106(1), 63-71. Epub 2006 May 17
[0352] Pierrakos C, Vincent J L. (2010) Sepsis biomarkers: a review, Crit. Care 14:R15.
[0353] Pruitt K. D., Tatusova T., Maglott D. R. (2007) NCBI reference sequences (RefSeq): a curated non-redundant sequence database of genomes, transcripts and proteins. Nucleic Acids Res. 35 (Database issue):D61-5.
[0354] Rodero L, Cuenca-Estrella M, Córdoba S, Cahn P, Davel G, Kaufman S, Guelfand L, Rodriguez-Tudela J L. (2002) Transient fungemia caused by an amphotericin B-resistant isolate of Candida haemulonii. J Clin Microbiol. 40:2266-9.
[0355] R Development Core Team (2006), Vienna, Austria. ISBN 3-900051-07-0, URL http://www.R-project.org
[0356] Ramilo O, Allman W, Chung W, Mejias A, Ardura M, Glaser C, Wittkowski K M, Piqueras P, Bancherau J, Palucka K A, Chaussabel D, (2007) Gene expression patterns in blood leukocytes discriminate patients with acute infections. Blood 109, 2066-2077
[0357] Ruokonen E et al. (1999) Procalcitonin concentrations in patients with neutropenic fever. Eur J Clin Microbiol Infect Dis 18(4), 283-5
[0358] Ruokonen E et al. (2002) Procalcitonin and neopterin as indicators of infection in critically ill patients. Acta Anaesthesiol Scand 46(4), 398-404
[0359] Schrenzel J. (2007) Clinical relevance of new diagnostic methods for bloodstream infections. Int J Antimicrob Agents. 30 Suppl 1:S2-6.
[0360] Simon L, Gauvin F, Amre D K, Saint-Lois P, Lacroix J, 2004) Serum procalcitonin and C-reactive protein levels as marker of bacterial infection: A systematic review and meta analysis. Clin Infec Dis 39, 206-217
[0361] Simon R. (2005) Roadmap for Developing and Validating Therapeutically Relevant Genomic Classifiers. J Clin Oncol 23, 7332-7341
[0362] Sponholz C, Sakr Y, Reinhart K, Brunkhorst F, (2006) Diagnostic value and prognostic implications of serum procalcitonin after cardiac surgery: a systematic review of the literature, Critical Care 10, R145
[0363] Storey J D, Tibshirani R (2003). PNAS 100 (16): S9440-S9445
[0364] Strimmer, K. (2008). Bioinformatics 24: 1461-1462
[0365] Suprin E et al. (2000) Procalcitonin: a valuable indicator of infection in a medical ICU Intensive Care Med 26(9), 1232-1238
[0366] Tang B M P, Eslick G D, Craig J C et al. (2007a) Accuracy of procalcitonin for sepsis diagnosis in critically ill patients: systematic review and meta-analysis. Lancet Infect Dis 7, 210-217
[0367] Tang B M P, McLean A S, Dawes I W, Huang S J, Lin R C Y (2007b) The Use of Gene-Expression Profiling to Identify Candidate Genes In Human Sepsis, American Journal of Respiratory and Critical Care Medicine 176(7), 676-684
[0368] Tang B M, Huang S J, McLean A S (2010). Critical Care, 14:R237, doi:10.1186/cc9392
[0369] Tsoukas C D, Landgraf B, Bentin J, Valentine M, Lotz M, Vaughan J H, Carson D A (1985). Activation of resting T lymphocytes by anti-CD3 (T3) antibodies in the absence of monocytes. J. Immunol. 135(3):1719-23
[0370] The NCBI handbook. Bethesda (MD): National Center for Biotechnology Information (US) 2002-.
[0371] Torgersen C, Moser P, Luckner G, Mayr V, Jochberger S, Hasibeder WR, Dünser MW. (2009), Macroscopic postmortem Findings in 235 surgical intensive care patients with sepsis. Critical Care and Trauma 108(6):1841-7.
[0372] US 2010/0293130 A1
[0373] US 2009/0307181 A1
[0374] US 2008/0020379 A1
[0375] US 20060246495
[0376] U.S. Pat. No. 6,960,439
[0377] Valasek M A, Repa J J. (2005) The power of real-time PCR. Advan Physiol Educ. 29:151-159.
[0378] Valles, J., Rello, J., Ochagavia, A., Garnacho, J., Alcala, M. A. (2003) Community-acquired bloodstream infection in critically ill adult patients: impact of shock and inappropriate antibiotic therapy on survival. Chest 123:1615-1624.
[0379] Venet F, Davin F, Guignant C, Larue A, Cazalis M A, Darbon R, Allombert C, Mougin B, Malcus C, Poitevin-Later F, Lepape A, Monneret G. (2010) Early assessment of leukocyte alterations at diagnosis of septic shock. Shock 34(4):358-63.
[0380] Warren et al. (2009): A Genomic Score Prognostic of Outcome in Trauma Patients, Mol Med 15, 220-227.
[0381] WO 2006/100203
[0382] WO 2004/087949
[0383] WO 2005/083115
[0384] WO 2005/106020
[0385] WO 2006/042581
[0386] WO 2007/144105
[0387] WO 2007/124820
[0388] WO 2003/084388
[0389] Wong M L, Medrano J F (2005) Real-time PCR for mRNA quantification. Biotechniques 39(1):1-11.

1-22. (canceled)

23. A method for identifying a subset of polynucleotides from an initial set of polynucleotides corresponding to a transcriptome for the in vitro determination of the severity of the host response of a patient being in an acutely infectious and/or acutely inflammatory condition, in a sample, a measuring device being used that comprises a plurality of different gene probes that essentially represent the entire human genome, wherein
samples of nucleic acid of a plurality of test persons exhibiting a known phenotypic physiological condition, are brought into contact with the probes of the measuring device so as to obtain signals of the respective expression of a gene;
of the total number of gene probes used those are selected that provide an expression signal of detectable intensity for at least one sample of nucleic acid of a test person;
the test persons, depending on their infectious and/or inflammatory status, are divided into at least two of the following clinically determined phenotype groups:
Inflammation

| | Systemic | Local | None |
|---|---|---|---|
| Infection | [S] | [L] | [N] |
| Systemic [S] | SaS | | |
| Local [L] | LaS | LaL | |
| None [N] | NaS | NaL | NaN |

wherein a“ represents an AND-operation between the properties S, L and N;
the changes of the gene expression signals between the groups of phenotypes are compared statistically and it is assessed as to whether there is a significant difference between at least two of the phenotype groups;
those gene probes are selected from the gene expression signals of which have significantly changed statistically between at least two phenotype groups and an estimated number of those gene probes is excluded that provide a false positive result in relation to a predetermined threshold value;
a master score is determined as measurement for the severity of the host response of a test person being in an acutely infectious and/or acutely inflammatory condition, by quantifying an increase and decrease in the gene expression intensity of the selected gene probes; and
compared to the initial set, a considerably reduced number of polynucleotides is identified by determining a score that comprises at most a predetermined deviation from the master score and that likewise serves as a measurement for the severity of the host response of a test person being in an acutely infectious and/or acutely inflammatory condition.

24. The method of claim 23, characterized in that a measuring device is used that comprises 20,000 to 50,000 gene probes, and/or that the measuring device is a bio chip with matrix-shaped immobilized gene probes thereon, wherein each individual gene probe is associated one-to-one with location coordinates on said bio chip.

25. The method of claim 23, characterized in that the expression signals are obtained by way of hybridization and/or amplification, in particular PCR, preferably quantitative PCR, preferably real time PCR and/or evidence of protein.

26. The method of claim 23, characterized in that the 6 phenotype groups from table 1 are compared with each other in pairs.

27. The method of claim 23, characterized in that a statistically significant difference between groups is determined of which at least one group includes more than one phenotype group.

28. The method of claim 23, characterized in that a predetermined threshold value for an estimated number of gene probes providing a false positive result is within a range of 0.1 to 5%, particularly within a range of 0.3% of the number of gene probes used, and that the estimated number of false positive gene probes is excluded.

29. The method of claim 23, characterized in that the relative distance of the gene expression signals with regard to an Euclidean distance between an average value mS of phenotype group SaS and an average value mH of phenotype group NaN servers as master score.

30. The method of claim 29, characterized in that the relative distance is obtained as follows:
$$score ( X ) [ \% ] = \frac{100 \%}{d ( mS , mH )} \cdot cor ( X - mH , mS - mH ) d ( X , mS - mH )$$
wherein d(X₁, X₂) denotes the Euclidean distance and cor(X₁, X₂) denotes the correlation coefficient according to Pearson between the two vectors X₁ and X₂.

31. The method of claim 23, characterized in that the score is to deviate upward and downward from the master score by at most 5 to 15 percentage points, in particular 10 percentage points.

32. The method of claim 23, characterized in that the master score is formed from the group of polynucleotides with SEQ ID No: 1 to SEQ ID No: 7704.

33. The method of claim 23, characterized in that a series of score values is measured, each at different points of time, so as to determine the time-dependent course of the severity of the host response of a patient being in an acutely infectious and/or inflammatory condition.

34. The method of claim 23, characterized in that the acutely infectious condition comprises at least one of the following patho-physiological conditions selected from the group consisting of abscesses, bacteremia, postoperative infections, wound infections, local infections, systemic infections, sepsis, severe sepsis, and septic shock.

35. The method of claim 23, characterized in that the acutely inflammatory condition comprises at least one of the following pathophysiological conditions selected from the group consisting of traumata, burns, radiation injuries, toxic injuries, ischemia/reperfusion injuries, acute rejection reactions, inflammatory bowel diseases, oncologic diseases, post-operative conditions, local inflammation, systemic inflammation, SIRS, allergic reaction, and anaphylactic shock.

36. A method of use of k tuples of polynucleotides that are selected from the group consisting of m polynucleotides with SEQ ID No: 1 to SEQ ID No: 7704, wherein k is at least 7 and equal to or smaller than the number of polynucleotides m in the group and at least one of the subsequent subsets of polynucleotides is used, “n” indicating the number of polynucleotides of the respective set; for assessing a score as measurement of the severity of the host response of a test person being in an acutely infectious and/or acutely inflammatory condition:
Set 1 (n=49) SEQ ID No: 508, 553, 611, 679, 734, 769, 851, 860, 871, 896, 1117, 1263, 1646, 1647, 1648, 1675, 1688, 1975, 2011, 2077, 2415, 2516, 2560, 2581, 3381, 3491, 3820, 3947, 4156, 4230, 4506, 4576, 5012, 5235, 5614, 5730, 5803, 5873, 6114, 6262, 6265, 6301, 6689, 6738, 6820, 6847, 6879, 7069, and 7230;
Set 2 (n=47) SEQ ID No: 160, 309, 374, 428, 462, 911, 937, 1039, 1092, 1105, 1458, 1533, 1604, 1895, 1917, 1997, 2002, 2055, 2242, 2332, 2369, 2386, 2427, 2516, 2541, 2560, 2785, 3359, 3407, 3624, 4230, 4587, 4636, 5164, 5235, 5247, 5371, 5776, 6278, 6328, 6497, 6636, 7156, 7201, 7230, 7314, and 7450;
Set 3 (n=48) SEQ ID No: 10, 366, 411, 462, 493, 495, 567, 1204, 1226, 1409, 1414, 1449, 1487, 1583, 1724, 1744, 2013, 2055, 2064, 2208, 2248, 2692, 2891, 3051, 3624, 4156, 4205, 4510, 4587, 4923, 5176, 5373, 5400, 5435, 5873, 5912, 5954, 6041, 6073, 6247, 6301, 6478, 6525, 6923, 7207, 7450, 7670, and 7681;
Set 4 (n=47) SEQ ID No: 160, 359, 441, 493, 522, 541, 652, 691, 1128, 1408, 1583, 1651, 1652, 1664, 1688, 2002, 2077, 2248, 2273, 2415, 2676, 2690, 2755, 2876, 3053, 3623, 4216, 4327, 4525, 4587, 4765, 4870, 5013, 5164, 5431, 5614, 5950, 6098, 6265, 6432, 6497, 6981, 7062, 7202, 7314, 7450, and 7607;
Set 5 (n=49) SEQ ID No: 97, 428, 441, 543, 611, 851, 1136, 1384, 1533, 1868, 1997, 2077, 2183, 2208, 2226, 2260, 2329, 2386, 2475, 2686, 2690, 2876, 3054, 3821, 4000, 4357, 4479, 4530, 4636, 4765, 4923, 5013, 5137, 5204, 5760, 5776, 5819, 5873, 5908, 6005, 6099, 6242, 6417, 6499, 6585, 6847, 7450, 7670, and 7681;
Set 6 (n=48) SEQ ID No: 10, 97, 359, 475, 495, 627, 928, 1039, 1117, 1248, 1384, 1408, 1472, 1652, 1675, 1744, 1868, 1918, 2370, 2423, 2537, 2742, 2865, 3051, 3086, 3408, 3916, 4030, 4078, 4274, 4294, 4362, 4751, 5129, 5235, 5247, 5431, 5734, 5803, 5811, 5908, 5950, 6005, 6417, 6497, 6525, 6923, and 7456;
Set 7 (n=49) SEQ ID No: 32, 160, 383, 414, 493, 611, 652, 679, 734, 885, 896, 946, 1177, 1640, 1650, 1704, 1882, 2077, 2248, 2250, 2260, 2415, 2561, 3086, 3488, 3623, 3624, 4135, 4156, 4160, 4510, 4525, 4530, 4742, 5137, 5204, 5247, 5730, 5950, 6114, 6210, 6225, 6430, 6478, 6497, 6545, 6668, 7314, and 7607;
Set 8 (n=48) SEQ ID No: 359, 383, 515, 538, 544, 691, 769, 813, 1024, 1039, 1092, 1409, 1519, 1640, 1649, 1665, 1696, 1731, 1744, 2167, 2183, 2226, 2260, 2273, 2425, 2516, 2618, 2634, 2672, 3051, 3168, 3202, 4160, 4754, 4966, 5373, 5465, 5493, 5541, 5574, 5912, 6005, 6216, 6432, 6636, 6748, 6847, and 7423;
Set 9 (n=46) SEQ ID No: 160, 352, 544, 691, 802, 885, 1126, 1147, 1163, 1336, 1416, 1639, 1969, 2002, 2058, 2077, 2183, 2331, 2332, 2426, 2526, 2742, 2855, 2860, 2891, 3054, 3138, 3488, 3947, 4560, 4576, 4707, 4776, 5235, 5371, 5400, 5431, 5760, 5873, 6247, 6301, 6417, 6673, 6820, 7447, and 7604;
Set 10 (n=49) SEQ ID No: 8, 164, 462, 494, 495, 510, 545, 567, 611, 679, 941, 1039, 1105, 1128, 1147, 1318, 1533, 1649, 1918, 1973, 1975, 2011, 2077, 2080, 2370, 2537, 3051, 3202, 3676, 4274, 4587, 4928, 5204, 5373, 5431, 5465, 5541, 5734, 5908, 5912, 5950, 6278, 6417, 6497, 6668, 6673, 7156, 7230, and 7670;
Set 11 (n=46) SEQ ID No: 89, 97, 160, 355, 359, 366, 374, 411, 462, 475, 515, 538, 543, 691, 1384, 1647, 1649, 1651, 1724, 2011, 2058, 2064, 2242, 2369, 2859, 3414, 4000, 4742, 4765, 4870, 4966, 5040, 5232, 5247, 5276, 5373, 5431, 5760, 5873, 5954, 6417, 6419, 6497, 6545, 6636, and 7484;
Set 12 (n=49) SEQ ID No: 8, 89, 515, 543, 585, 769, 969, 1126, 1163, 1526, 1583, 1639, 1744, 2019, 2393, 2415, 2453, 2618, 2690, 2692, 2810, 2855, 2863, 3153, 3158, 3190, 3408, 4000, 4083, 4104, 4248, 4479, 4491, 4550, 4661, 4877, 4995, 5176, 5276, 5599, 5695, 6073, 6114, 6265, 6417, 6499, 6585, 6632, and 6673;
Set 13 (n=48) SEQ ID No: 414, 538, 946, 1263, 1384, 1512, 1895, 2077, 2248, 2260, 2516, 2676, 2975, 3168, 3414, 4083, 4274, 4776, 4800, 4919, 4923, 5179, 5204, 5431, 5493, 5541, 5619, 5695, 5819, 6005, 6073, 6099, 6210, 6247, 6265, 6350, 6417, 6432, 6499, 6536, 6545, 6636, 6668, 6689, 7040, 7062, 7472, and 7604;
Set 14 (n=47) SEQ ID No: 383, 428, 538, 553, 691, 814, 871, 896, 911, 937, 1426, 1639, 1685, 1688, 1983, 2093, 2253, 2260, 2454, 2516, 2587, 2672, 2761, 2865, 2975, 3086, 3781, 4000, 4030, 4308, 4510, 4636, 4923, 5137, 5235, 5574, 5776, 5819, 5908, 6226, 6278, 6417, 6632, 7202, 7230, 7315, and 7456;
Set 15 (n=46) SEQ ID No: 97, 366, 383, 802, 1426, 1514, 1558, 1685, 1744, 1975, 2011, 2013, 2369, 2415, 2454, 2510, 2516, 2577, 2587, 2759, 2968, 3168, 3364, 3641, 3780, 4083, 4230, 4294, 4587, 4638, 4817, 5040, 5164, 5276, 5371, 5465, 5541, 6073, 6098, 6114, 6184, 6216, 6497, 6515, 7062, and 7202;
Set 16 (n=49) SEQ ID No: 10, 504, 541, 553, 567, 652, 802, 1024, 1092, 1136, 1197, 1519, 1646, 1647, 1648, 1652, 2055, 2058, 2260, 2273, 2330, 2331, 2415, 2491, 2581, 2618, 2676, 2742, 3053, 3408, 3652, 3915, 4216, 4870, 5235, 5641, 5695, 5954, 6114, 6278, 6419, 6461, 6791, 6820, 6847, 6923, 7428, 7604, and 7670;
Set 17 (n=20) SEQ ID No: 10, 160, 428, 871, 941, 1136, 1197, 1416, 1558, 1786, 1951, 2386, 2510, 2560, 3488, 3652, 3781, 5176, 5400, and 6515;
Set 18 (n=20) SEQ ID No: 871, 1163, 1414, 1416, 1426, 1487, 2001, 2055, 2369, 2386, 2552, 2577, 2865, 3051, 4550, 4577, 5614, 6098, 7369, and 7423;
Set 19 (n=20) SEQ ID No: 567, 958, 2226, 2250, 2260, 2427, 2516, 3364, 4030, 4135, 5235, 5574, 5950, 6114, 6226, 6267, 6278, 6418, 7069, and 7518;
Set 20 (n=20) SEQ ID No: 409, 1647, 1648, 1770, 1883, 1951, 2013, 2386, 2423, 3152, 3491, 4205, 4577, 4661, 4765, 4919, 7428, and 7604;
Set 21 (n=20) SEQ ID No: 355, 480, 494, 667, 1492, 2475, 2855, 2948, 3155, 3158, 3408, 3780, 4661, 5113, 5232, 5368, 5574, 6114, 6419, and 6499;
Set 22 (n=19) SEQ ID No: 769, 1163, 1472, 2077, 2370, 2759, 3488, 3567, 3737, 3780, 4230, 4245, 4274, 4550, 5950, 6497, 7069, 7109, and 7681;
Set 23 (n=20) SEQ ID No: 160, 164, 355, 411, 1106, 1408, 1675, 1679, 2386, 2453, 2516, 2810, 3168, 3202, 3652, 4230, 5574, 5986, 7428, and 7484;
Set 24 (n=19) SEQ ID No: 10, 164, 885, 1263, 1318, 1416, 1492, 1508, 1647, 1951, 2250, 2560, 2785, 2827, 3086, 4506, 5137, 5575, and 5954;
Set 25 (n=19) SEQ ID No: 32, 522, 679, 1519, 2001, 2491, 2516, 2676, 3412, 3737, 4205, 4294, 4560, 5235, 5954, 6005, 6114, 6499, and 6525;
Set 26 (n=19) SEQ ID No: 958, 1449, 1472, 1582, 2332, 2516, 2552, 2891, 2975, 3168, 3190, 3683, 3820, 3947, 4245, 4530, 7040, 7069, and 7145;
Set 27 (n=20) SEQ ID No: 428, 515, 544, 562, 567, 1263, 2002, 2332, 2526, 3438, 4577, 4754, 5574, 5614, 5912, 6328, 6515, 7156, 7423, and 7456;
Set 28 (n=20) SEQ ID No: 355, 508, 937, 1263, 1973, 2002, 2510, 4078, 4156, 4550, 4673, 4817, 5247, 5368, 5730, 6005, 6247, 6515, 7201, and 7207;
Set 29 (n=20) SEQ ID No: 10, 544, 871, 1408, 1487, 1649, 2002, 2415, 2690, 2859, 2975, 3126, 4577, 4636, 5541, 6073, 6417, 6432, 6866, and 6879;
Set 30 (n=20) SEQ ID No: 896, 1248, 1318, 1472, 1786, 1830, 1983, 2386, 2865, 2975, 3641, 3916, 4030, 4530, 4995, 5472, 5619, 6099, 6247, and 6265;
Set 31 (n=20) SEQ ID No: 355, 462, 1416, 1983, 2011, 2183, 2248, 2618, 3190, 3412, 4490, 4576, 4776, 4923, 5164, 6101, 6114, 6278, 7314, and 7369;
Set 32 (n=20) SEQ ID No: 310, 1226, 1895, 2248, 2427, 2516, 2552, 2690, 3086, 3438, 3915, 4216, 4587, 5235, 5276, 5954, 6265, 6478, 6515, and 7207;
Set 33 (n=20) SEQ ID No: 493, 584, 633, 937, 2330, 2377, 2491, 2587, 3153, 3683, 4216, 4248, 4530, 6114, 6419, 6478, 6525, 6689, 7202, and 7456;
Set 34 (n=20) SEQ ID No: 10, 359, 383, 478, 626, 1472, 1487, 1647, 2475, 3683, 3780, 4490, 4636, 5179, 5247, 5371, 5950, 6748, 6923, and 7670;
Set 35 (n=20) SEQ ID No: 97, 626, 1039, 1163, 1426, 1617, 1704, 2002, 2248, 2690, 3168, 4216, 4638, 5247, 5614, 5950, 6265, 6461, 6632, and 7428;
Set 36 (n=20) SEQ ID No: 366, 414, 544, 734, 1263, 1416, 2167, 2208, 2250, 2370, 2491, 2526, 2855, 3190, 3488, 4083, 4248, 6673, 6845, and 6847;
Set 37 (n=10): SEQ ID No: 1983, 507, 5431, 3043, 1665, 5776, 2902, 6585, 3167 and 745; and
Set 38 (n=7): SEQ ID No: 1983, 507, 5431, 3043, 1665, 5776 and 7695.

37. The method of claim 36, characterized in that isoforms of the polynucleotides are used, particularly such isoforms that are selected from the group consisting of polynucleotides with SEQ ID No: 507, 7695, 7696, 7697, 7698, 7699, 7700, 7701; 5431, 4636; 7702, 7703, and 7704.

38. The method of claim 36, characterized in that fragments of the polynucleotides are used, particularly those with lengths of 20 to 1,000, in particular 15 to 500 nucleotides, preferably 15 to 200, particularly preferably 20 to 200 nucleotides and/or fragments having a sequence homology with regard to the polynucleotides of at least approximately 20%, preferably approximately 50%, and a particularly preferred sequence homology of approximately 80%.

39. The method of claim 36, characterized in that the score is assessed via expression signals, said expression signals being obtained by way of hybridization and/or amplification, in particular PCR, preferably quantitative PCR, preferably real time PCR and/or evidence of protein.

40. The method of claim 36, characterized in that the score is used for diagnosis, predicting the development, or monitoring the acutely infectious and/or inflammatory condition of a patient, and/or for controlling the progress of therapy and/or for focus control.

41. The method of claim 36, characterized in that the score is used for indicating the chance of recovery or non-recovery of a patient being in an acutely infectious and/or acutely inflammatory condition.

42. A method of use of a plurality of protein gene products selected from the group consisting of: TLR5, CD59, CPVL, FGL2, IL7R, HLA-DPA1, HLA-DR, and CLU, for assessing a score as measurement of the severity of the host response of a test person being in an acutely infectious and/or acutely inflammatory condition.

43. The method of claim 42, characterized in that k tuples of the protein gene products are used, wherein k is at least 7 and equal to or smaller than the number of polynucleotides m in the group.

44. The method of claim 42, characterized in that such fragments of the proteins are used that have a sequence homology with regard to the proteins of at least approximately 20%, preferably approximately 50%, and a particularly preferred sequence homology of approximately 80%.

The application's sequence listing, which the Patent Office published only in electronic form, follows.

SEQUENCE LISTING (7718 sequences)

SEQ ID NO: 1 - DNA, 420 bp, Homo Sapiens
  misc_feature (41)..(41): n is a, c, g or t.
  AA113137
tttttttttttttgagattgcagtgtggtagtgccaggagncctgacctcattccagctaaggtcccctcatttctctcattagtgttcccaggactggccctagccacaaggaccagcatagtttgtcccactatttgttgaaaaaaatacagtcatctggaaacatagtatgtgtgggaccccagacttctgttctttttcttttgtctcatcttaaaagctggaagatgtgtagtgttgatcttgggtcagaacagttgatctaaggcctttattgaaattagcaaaaagtgattgcaaataaattcctgaaacaactaacaacaacaaatggacaaaatccataacaacaaaagaagaaagaagattgaaaaagagaaaaaaagaaagaaaatccagaaatctagttagaaaactt

SEQ ID NO: 2 - DNA, 217 bp, Homo Sapiens
  misc_feature (215)..(215): n is a, c, g or t.
  AA179392
aactgaacaactgtgtttttaatgtcatatttttaagcgatttagatggaagtggccacagttgcgagtggctcccccctgggacaacagagctctcctgtgtgctggctgtggcgacccttattctcccattgccctactagacaggtattagctctgtttgtcatgagaaaaattggggtgtttcccaaaatcatacaaaagttaattttgantt

SEQ ID NO: 3 - DNA, 385 bp, Homo Sapiens
  AA188909
tttttttttttaggggcaaatgatttgtaaatttattgcataaaaagctcattattgaatactagtaatgaagaattctgataattcatatatactgttattcagtaggacaaatagttttttctaaatctgttggctgttaagtatataaactttctcttcaaattataaatatatgcaaatgcgtgtacatatacatgtatgtcatcagtgtaatatgacttgtgaattgctttttaattttattcctctaacttgatagttgtgatgtgcaggtggagagtaaatatacttgattcaattttagtttatctcttaacccttataatacctgataagaacatgaaatatgtaagtatagagtaatagtttgtgcataataaaa

SEQ ID NO: 4 - DNA, 495 bp, Homo Sapiens
  misc_feature (461)..(461): n is a, c, g or t.
  AA215505
gctgatcatccagtcctggtcctgatcactgggccctgattctaatcactcagacctccttttgatcactgaaccctagtatttatcactgagccctgatcctgatcgttgggccctatttctggtaactgagctctgatcctgaccactgacctctgttcctaatcactgagccctggaccagatcactggcccctggtcctgatcactggcccctggacctgatcactgacccttgttcccgattgctgagccctggacctgatcactgagccctgttcctgatcactaacccctattcctgaccactgagccctggtcctgattactgagccctggacccagtcaatgacccctggttcctgatcactgagccctggaccaaatcacttgagccctggaccagattactggggccctggtcttgaataactgggccctgggtcctgattactgagccntgatcctgaataactgggcccctgttccttgaaa

SEQ ID NO: 5 - DNA, 565 bp, Homo Sapiens
  AA401046
atatttcagatataagatttcagttctcagtgagtctaagtgacagaaggaatggagaccctcttgggcctgcttatcctttggctgcactgcaatgggtgagcagcaaacaggaggtgacgcagattcctgcagctctgagtgtcccagaaggagaaaacttggttctcaactgcagtttcactgatagcgctatttacaacctccagtggtttaggcaggaccctgggaaaggtctcacatctctgttgcttattcagtcaagtcagagagagcaaacaagtggaagacttaatgcctcgctggataaatcatcaggacgtagtactttatacattgcagcttctcagcctggtgactcagccacctacctctgtgctgtgagggacaatgacatgcgctttggagcagggaccagactgacagtaaaaccaaatatccagaaccctgaccctgccgtgtaccagctgagagactctaaatccagtgacaagtctgtctgcctattcaccgattttgattctcaaacaaatgtgtcccaagtaaggattctgatgtgtatatc

SEQ ID NO: 6 - DNA, 239 bp, Homo Sapiens
  AA416867
agagaggcgtggactaaggattttattgtaaatacaccgaaaagccagtggatgggcttaatctaaggagttacacatagtcaaattacatttaacaagtataaacagctgctttgtgaaaaaataggttgtagcacacaaaaagaaggcggggagaccagttaggacaccattgcagtagcccaggtaagatacgatagtgtcatggacgaggatgtgggcgatggaggtaaaccaca

SEQ ID NO: 7 - DNA, 442 bp, Homo Sapiens
  AA814136
tattatttttttttttttttttcacttttttcatagtttgtagaggcattctctctcctttgctcaacataaataaggaggtagggtctgatggcccaacctacagagaggagttgatgtgaagaggaatccaacactggatgtcaggacagaggcagaacctgggggcctggagacaaggcagagatacaggattcatcagccaaacctgaaggtgccttctctctagactctctgttatgtgagtcaaaaaatgccccattgttttagtcaattggagtttgtttttttttttcttcctgtaacttataatcaaacactctgataacctatgacaaaggattagtatacaattaaatgaagtaatgcataaagaggttgggcatataataaagacttacctcatgtgagctaaaaccactatcaaggcagtttctaggac

SEQ ID NO: 8 - DNA, 226 bp, Homo Sapiens
  AA828835
gctcgacgttactttgtggggtcttgaggggtgttgaagattatgggataatgtaagtatagcacagagcctgacatttgcgatgggctcagtaagtgccgtccgttctcttgtactatttttcttctccttctccttcttcttcttctttgagagagggagagagaaaagaaagaaagaaaagaaaagaaaagaaggaaagaaagaaaaaaaaaaaaaaaagtcg

SEQ ID NO: 9 - DNA, 294 bp, Homo Sapiens
  AA909740
tttaaattaaaaataaaatttcatgtattagcttgaaggctttcatttgcagttaacaaaacccgaaaggcataaacaatgtaaaattgtactagtcatagaaatgaaaagttgtaagctagattgagcttcaggcctccagttcccactttgagagggtctctacctcactctcatttgcattagctgtgccgtgaattcttttatgatggcaatatactgtcaccagtagcaacccacatgcttcttcctttacacctttccatgtggagaataataaatgcttagaagagc

SEQ ID NO: 10 - DNA, 2237 bp, Homo Sapiens
  AB074162
aatgcgagctgagcagacagggctgcaaggaaatctggcgcggttcaatacctcgtctagcctgggttccagtatctaattttttttttgttttaactgacaaactcatttctctactgggacaggatgctgtgctggctggaagttccatttctacagcaagaatcctatctggaaacacagaagttgtcctctagccacagcagctcgaacttttttgattgtcgttgctgctttctcccatcacccccatccccttttgacaaagatccaactgtaaaaagtcttacgtaacagttcaggactacttcggttcttttactgggtaagcactttcaattttttttttttaactaaaagccattttaaaattgaatctgttgaggggcttgactaaaatcttttaagtaatttgtgtaatggaatactgtcagtggattttttcgtctcatttctgcacgtgctcctttgttctcagaacagaagctttttatacacatcccataacgcagctggagagagttatgaagtcagttattataaggaacacaaaggttgctttccattctttgcctttagataattaatttttttgttttcttaaaatggagtatttaaagaaggaagaaattcacaagaaataaactgttggagaatttagaaaagtttgaagtttttaccaccttttctatctctagttttgtgtggccaaacacttgtgccgcctggggcggtgggggtagaggcaagcatagacagagaggaactaagccagacatggacaaaggcacgagccaaaaccagacagtcctggccgttcgataggccagcagtgggtgagacaggtcagccagctgcaggggcgggagcgggggggcgggtagggacatggatgtgtgaggtgctcatgcgtgcgatcgtgactagattctgaaactgccagccattttcccagctccgctttgtgcaatctaaaggaatgcatcccctctgaagcagtcttgccagagcctagtgagggagagaagtatggtaaataccacaacatatggaatcagaaaataccgggaactggagtgggcaagggggaatgcagagggtgtggaaattttttagtgatctggaatgtgttgagtgacaggaagtgccccaagcttctcccccaccaactcttctcagtcgcgcctgcttttgtctaactcttgtaatctacacactactgcttacaaagctgtctgagtttaagacaaaaagaaacctaaaagtctccttacttcatagtacctgtgatatggaaggaatgtaaaagcatgaccctttaagcctatggacattttttcaggtatacaggagaaagataaaataattttccacagaaaaatgagaattatgaattatatagttcaggttccaaatctaatttttaaaagaattctgattctgctacactttacaaatgcttaggttggttcctaatttgaaggagacttgttttatttggttaatgcattgcatttgaacttgtttctattttctttgcataaatttggactttgggagaaaaatgcaaagtaataagtagaatgcacttgggggaaaaaaggaggatttttcccttcatgggttggaaagtattttaaagggttgttttcttgaaaaaacaagctctctcttactttctgcatctatgctataaagataactatgctataataaatgtaaggtagaaaactttaaagagaaaataacagtgttctaagtgaaaagctacttagcattttcccaaactcacacattatcaacagaaacactaaaaattaagagaaaagcggccaactaattaaatagctagccttattttgggggtatgggatagaaaattaagtgtgaataaaatgatacttgggaatgtttctccctcgtaccacaaaggatgttagtggtcagcctacgagttaatccttcctagcatggctctgagccttcatgccgagcagacgttattcacatgacgattcgaaaagtccattcatatatctcgctacctggatttgaatagaaaccagacagcaattctttagttccagccaccattcgccccactggacaatagcgatttgttagcacagagtcacaggctgtgggacacaaagcttggagctgcagaaagatgggggattcagagaacaggaaattacaggctcgatgcactcctggcagctctgagaatacaaaaa

SEQ ID NO: 11 - DNA, 1426 bp, Homo Sapiens
  AF052160
gtcactggaatgatggatcttaggggcccaggggtagcagagtgggaaaggctgcacccatgctctggagggtaggaggattgttatatgggactcacagcacaaacacgtgtggatgcagtgattgtcaaatgatccaagggcatgtcttgttgctcctattttttttttcctgtctgaatggaaaacagcaatttcctccattcctggttattgcagatgatctgataatttaacctgagagccgttatttcattttattttattttaaaactcaaaagaagtatactgttctcatcttaaacagtgagatgtctggtctttaatattactctttcttaacatacaataagctagcagtgtggtgatgacatgtagatacctcctaatgtgccataaaatcaaggcatgcattttaaaatgtttcgtgcccagaaatccaaacttttatagttgttgagcagccatcttcatatggtctgttctgaattcttaaaacctgcaggagctcatcagcctaacctggccccttccagctcatccccatgtcctattttgctatatttgagcataacaagattttatctcttcctttttaaaaattaattacctaataaatatgatcaaaaattgttaaataattttttaattacctaataaatgtgaccacaaatattaaataaaattatatagattaaaatgctgacgttctcttctcccccatcctattcccttgcctagaaggaacttctgtataaaaaacttgctgggtatccttttagaaattttatggtatattaatcttgtatacatatacaactgtgggtacctatacaactatgtatctctttcttttaatacacttcaaattcttgctatataccataatatacttaaccatatctccatgatggacatttaaattgtttggagtttttggctattacaagcaatattgcagtaaacctgtttgtataatttttctgcacatactcctgtagaattactagaagtgccatttctgaataaaaaattgactagtattaccaagttaccctataaaatgcctaatcagtttatattctaacagggtatgaaagtgcccatttctagccaacattagataccctcagtctcatacttaagtattttttttcccctaatcagttagatgaaaggtgatttttttaactaacaattttctgattgaattttctgattgttccgtagcatttttttttcctaaggtattttagccatccttatttcttcttttcagaatggtatattcctgttgtatatccattttgatatcttaatgatttataaccctttataaaaatagaatgagtgctaatcctttgttatgtgtactacaaatacatatttttttccagtctgaaaaaaaaaaaaaaaaaaaaaaaaa

SEQ ID NO: 12 - DNA, 1914 bp, Homo Sapiens
  AF070595
gaccagaaaaagcatagaaaaattagatccacacacagcacccaaaaaaggccatagtcttttgtttacctagatgtattttaacctctttaccactaagcattttactataatagaactggggacatacattgtccttttgagtccgttgaatctgcaccatctaccttttggctgattcaccatacaggtggcaaaggcctttaaaaatggggagctaatacgtagggcacattctggtagggccaaaatattcagtgtctggggggtgctatgcaaatatcaatgactttttactaaaaacagtggatttcctcatttctttaagatccaagtagaaaatgtaaataacttacattctgtatgcaggactcaatacagacttagtcaatctgattttttttggtgcttttcagtatagcgcaactctaaaaggaaacccattcaccctccttagtcctttgaagtatacttttgaaattataccttattgttaatggcaacctaatcaagctaggatttgtcggttaaaattttgattcttgtaatctgtactgtcaatttttggccactctggctgttacagcaaacttttctcccactgtcataattggtctaaagtagtatttgtttcaggactatccaaaaagcaaggccagcacattgagaagatgcagaatcctactctattacaaacctcactcatgtttcttttattgaaacctttttctactttatatttcctcttttgtaaatttttccatgtcatttaaaaaattttttactttagaattacagattagttctttttttaaagcattatggcattttcaaaaaaaaaattattttggttacccaaaaagctatacaagaaatataacttcaattttttaggttgatatgggtatatttttaaagtttttattactttatacaaatacaaattaatttatattatagtttaacacctgctatgatgatagatatcacactgctatgatagaaaatccctgtctgtcattgaactattcatttagtgttactctgatatgttaataatgtattccttctaatgaagtccttgtaacaagaaaccctgtgagattggtataatgagatatcaaataatcagaagtataattaaaatagaacatgttggaaaatcccaacatttcctgttatgccgtcatacctccggtgttcagtttgttactcaaaagttcccagttcttaggctgaaaaacattcaagtaaaaatgtagcatagattacactgaaatattttcagtatcaatgatttaatatccacacaaactattaggaatggtatctggaacttgttacaaggtcagataaactgttacagaattttagaaataattatctctgtatgtgactgtgtattacatataaaaatgaatttttcaggaaaagtgcactttaaaaatactttctcttgctagttttttaaattgatgaaatagcctgtgctgctttggaatgcttattctttctttgatgaaaatacggtcattgattatgataattttaaaaatatctatttctgcatcgctgcaggatttcctacacttttctgttcctcatccctcttttatgtgtgcttggctcagttgcctgttacacagcctctgccttggttttgtgtattctaagataatttataaacacagatatttacagtgaagttcttccttttgaaactaatcttattcttttattcctctctctaaaaattggttggccatgctcactaatgattttttttcttaacaataagcatttcttggtattggtagatttggattgcatggtaagatgactgcccattttcaccatgtatacctttgtcaaataaagatttctgatctttggtcaaaaaaaaaaaaaaaaaaa

SEQ ID NO: 13 - DNA, 706 bp, Homo Sapiens
  AF088007
gctataaaattctgagactaaatatcaaattaaagaaagtactaattgtcagcgatgggggatgtactgctatttgcttctagtggtactcactgctcatttcctatattcactggtataaaaaaatttcaaacaccctcaaaaaagcatatactggtggtaccaggaaaacgctgaaaatcattactttctgtgtggtgtccagctcttttggttacatcatcacttcgaccattcacttttaaagaaaaacttttgtggaacaaaaatataaagatttattttttttcttggtggcttagcacagtggcctaatgtggctgaccatgtgcacctgttgtgtgagtcacttagacgtgctttgtttcttggtcacagttgatccctcaactcaagcatctcaccctcaaaatgtttgtttgggacccaagaggcaaaccttgagatgggttatttctttcaccttggattggctcatctgctgggagtggagccaagctgacatttcctttcctttttgtctgcctatcactacgtagaggcagcacataagagagggaaagccatgcgcgtggagtccagcacatcacccagaaggcagatgttctatctccattttactcattaaaacaaacaaaaccacacctggattgcctggtacttaaataaaatgcactatgatgattgaagaaaaataaaaaaaaaa

SEQ ID NO: 14 - DNA, 2586 bp, Homo Sapiens
  AF131784
gtacattaaaaataatttaatagccacaatatgatgttctttaagctgcaaattgagtacactgggaatcaacaaatttgatgaagcctgtctgtctcttcaccagtggagtgagtgcagcagttagaaagagaagcaatattgtgcaactggtgcagtggtgagttaatcatagtgtataaccttgtgttcatgaaacaggttgttcattgttctgcatctctcttcatttaaaaaggatacacaattctttcctcattgcatattacaccaaacgtttgagggaaaaatcctcattcgtaaaggattttggatttataatctaaaactcaacaataaagaaataatattccaagtctctggtttcctaatatacataataactgtttataaagaaggtctaagagctgatatttgccaaagtgatagaagagttgttttttcctctctactaccaagctttaagacattaaaagaagtctagtgtatttgaatattttagagaaagctttatcattttttaagatgccaagatgctgcctacgtttgcaaaagttgtctaagaattcaccatgagctatattttcttctggatctttgaccaaggtgatgtcagcttatttctggggaaggtgttgagctcttatacatgaaaatggatataggctattctctgggatgagtgtcatttcaatgctttataaatccatgaagctgcttgtctcataaagtagaactgatacaaattttggttggatatatagagaattttataaatgtattgccttagaatttctgggtggagacccaactacaatgacattgtcatgcaagaactataaagataattagagttaaaagttgtttaaattgtgcccttaaatacagcagaacctggagaaggtcatacttcaaaggtcgattttgagtccgaataaagaaagacctagtaacagatagtttttttttgttcattttcttctaccaagtagaggtttatgccctcagaactaaactagtaaaaatatctgaacaaaaaacctttcgttgttggcataaaaatgtgatacacttagagacattttgtttattgcatataaatctaatttttccataaattagatttatgatattttcataaagcacttgattagtttttcaaggcgtaccatcacaaagatgctttcctgcagagttctttgtatcaacagcctatggttgagatgttttctcatttcctgtagagagagaataccactaacaaacaagcaaaaactttagtgccaaaatagtggaactattttgtcatcttttgagaaaaaaatatacaaagaagtcatcttttcattaagtggattccctggttcctttccagctggttgtggaagtaatggctaacatccttcagctgactttgtctacaaggattattagcaaattctgtaggagcaagcatgtctgaccttaacttaatggatcccttattcaatcagtggcttctgtctttatgtctgttggcatatcaaaatggtttctgttcctagaaaagtaataacatatgcttatctttattctttttccaggtgattttgttttcaaatgctccttgtgaaaacacctagtgttgtagaaaggaaagtggccagaaagaacaacttgggaccatgagtaggtcattaaatagcttagtgatttatcctcatatagggcttataaaccctgtatgtgtttatatgtgcttcacagagttcgtgtcaggctgaaaggagatatgtataagaaagtggtttgtaaattatgttccatttcataaatagacactattcacaaactaaaatctaataaaaaaccacagttgtaatttaaactgcttgatataaaaagaggtatcatagcagggaaaacacactaattttcatacagtagaggtattgaaaactgaaaatgggaaggcaacttgaagtcattgtatttgattgaaaatgtttaatacatctcattattgacaaaatatgtcatcttgtatttatttcaaggaaaccaatgaattctaggtagtatattacaagttggtcaaaatattccatgtacaaatagggcttctgtgtccatagccttgtaagagatactgattgtatctgaaattattttttaaaaaaataaattatcctgctttagtgtgttaaaagtagacgatgttctaatataacactgaagtgcttcattgtatcccaacagtttaccttcaagtaatattatctttatttttaggctaagcacgtttgattattttgtctgtctcctatatagatctgttttgtctagtgctatgaatgtaacttaaaactataaacttgaagtttttattctatatgccccttaatagactgtggttcctgacgcacactgttaggtcattattttgttgtaccaaagttctagtggcttcagaaatcatagcatccaatgattttttggtgtctggctatgaatactatggttgagaattgtattcagtgattgtttctgcacacttttcaaataaaaaatgaatttttatcaattaaaaaaaaaaaaaaaaaaaaa

SEQ ID NO: 15 - DNA, 1765 bp, Homo Sapiens
  AF176921
ccaaatcttgatgttaacaattaaaaagaagaaatgacatgcaagtaggtcttagcagaaaaatgcaggctgggcatgagtcatgttgttaccctcccacatgctcctacaatccacagagatgcctgtctgcaggttcttgaagttattgttagtatttggtatctcaaatttttcgtcactgttcacatgccactttctctgtgcacagtggtatcctcatttgctttttaacctacactgaggagtctttgtcaggttgcactgattttccaattctgcagtaatgagtaagctcacggcatggggaagaagacagtcagtccaatgaagttctctaaattattttaacattgcctttgaaggccttgactcatccttagctatttcaatgaagaaattcctaccatgaatttaaaaccctaaaaattctgtttcaaattctttgggcattggggtactcagatatcccattgtggaagaattttaagaataaatagaagtttctgttgagaaccatgagcaacatgtttcttacaatgagaattgctatgcattttaaaattgcaaatatatatgaaaattgaagacaagaggaaattgtatttctaacttgattctgatcactcacagaggtggcatattattatagttgggacatcctttgcacccttcataaaaaaggccagctgactgctcagcatcacctgccaaggccactagatttgtgtttacaggggtatccctgtgatgcttgtcacatcactcttgaccacctctgttaataaattccgacagtgcagtggcgatcggagtgtgaacttatgttcccagcatatggaaagctatcttaggttttaaggtagtagaaattgcccaggagtttgacagcaactttgtttcccgggtctaaaatcgtatcccactgaggtgtatgcagtggagcataatacatgcaaatacatgcaaaactccttttgtttcacctaagattcactttctatcttactttcccttcctgcctagtgtgacttttgcccccaagagtgcctggacagcattctagtttctacaaaatggtcctctgtgtaggtgaatgtgtcccaaacctgctatcactttcttgtttcagtgtgactgtcttgttagaggtgaagtttatccagggtaacttgctcactaactgttcctttttatggcctggggttaaagggcgcatggctcacactggtgaaaataaggaaggcctggtcttatcttgtattaataatactggctgcattccaccagccagagatttctatctgcgaagacctatgaaacactgaagagaaatgtaggcagaaggaaatggccacatatcacaagttctattatatattcttttgtaaatacatattgtatattacttggatgttttcttatatcatttactgtctttttgagttaatgtcagtttttactctctcaacttactatgtaacattgtaaataacataatgtcctttattatttatatttaagcatctaacatatagagttgttttcatataagtttaagataaatgtcaaaaatatatgttcttttgtttttctttgctttaaaattatgtatcttttccttttcttttttttaagaataatttattgttcaggagaaagaatgtatatgtaactgaaactatctgaagaatgcacattgaaggccgtgaggtactgataaactaaagaatttattattcaaaataaaaaaaaaaaaaaaaaa

SEQ ID NO: 16 - DNA, 541 bp, Homo Sapiens
  AI025496
ttttttggggcagacagtgtttaatgtgctttagagacacaaactgcagctccatcccaccagcatctgccaacacaaggcagagagattagtgtgtggacgtggcacaaacaaagaaagggatgcacagggattggtttaggagggagaagccacaggatgagcctttcctctaggggacctgggagagggtcgagcaacaggagtggagggtcttgcctctcattcaacatcaagagtcctgcatacctcctgggatccctttctcagaacttaaggacttaagagagaaggtgtggtatgttgagccagacattaactttgtctaggagaacagcatgggtttttagcagcatggaagggtggcacttgcgatcagtttagctgcttaagccagtatcctgagctgagaaaggcctgaggagcagattctgggccagtacaggaaaacccctctcatgcctaagagtcctggagcaggtagtgtaaataattttactgactgattcttgtggctctaaagagaggacagtgctctagg

SEQ ID NO: 17 - DNA, 474 bp, Homo Sapiens
  misc_feature (442)..(442): n is a, c, g or t.
  AI191943
tttttttttttttttcatttctcatttgaagattctctatttagttagcaggttctcattaaggtatcgggaccatagttaagaggaaaacttcattttgacattggaacactgacagccctcaaaccccaacattctctctctctttctctctctctgcttgtctctttgccctacacctgagctagcccaccctggtaagaaccctcagcccagctctgcttcctggtcacaacaaaactgaaaatcaacctcagtgccttgcctttgccacctgggccaacctgtgcttgccctgttctcaccagaacattccattatgtgaataataagtgttgtcacaccctccatcagtcccaacatccaaaccggttttggatgggtgagtgtgcctgccgactgatcccactctctgcatggcaaccactgaacaagaacacanaaacgatgtttaaaacataaaggccgggcgcg

SEQ ID NO: 18 - DNA, 294 bp, Homo Sapiens
  AI216447
tttgacaataatgtaggtttattcctgatttttaaaagatcattgagttcaatactcaattctttcctccagcccttaaaggagctggggtgtcccccttgtttattggcctccaaagcactccaagtgtcttaggagcatgcatggcaggacagagacatatgcatggagcacttctctccctccacagtggagccccccacaggttgcaatgacctgtggccattggttggccgtggctgttctgccatttgctaatctgcctaaactcgctcttgtacttttcttttaaag

SEQ ID NO: 19 - DNA, 187 bp, Homo Sapiens
  AI271016
gcggccgcctactactactatacggctgctagaagacgacagaagggaaactcaaataggttaactgatttgtttagctgttaagtggccacatttgtctcaaactcaagtctacacatttctctctcttttccctaacaaaaactctctcaaatgcaaaaaaaaaaaaaaaaaaaagtcgtatcga

SEQ ID NO: 20 - DNA, 401 bp, Homo Sapiens
  AI274046
ttttttaggagaagctttgccacctttatttcaggatatttaagtcttttctctgtttcctcagacaaattaaaacatgtacagaaccagttttccctccacagtgcaagcaagttccaatctcttttcttttgtcaactttttgatgttacagagaaaatattgcaacaaaaatatgaaatgaaatgtaatttgctttattgcaaattaaatttgtctagctatgattagtgtaagtgtgcatgttttacgttggtgtcattgaagagcacatattttgtgttttactcttttcatttaatatggtatgataaacacaagtccagatattgatgtaatttacactattgtcatttttaatagtctagaatgattggttccaatcttttgctattataacc

SEQ ID NO: 21 - DNA, 534 bp, Homo Sapiens
  misc_feature (404)..(404): n is a, c, g or t.
  AI279096
ttagtgaataatctgttcgtattcttctttgttttgcaatatgggctttaaaaaacctatttctaattttatgtgttaaaattggtaacacatatagggcagaaatatgtgttaccattctgtagtttggctttggcttgtgttgaaaaggttttagaaagtcaaacagttttttgctttatgtatcatcaggaactgtgaagagctgaggttccacctcctcccaagctgacaagtgaccctcggagaagaaccgtgaaaacctcacaacagtgaagttagtttaaacaagttacaacgacaaacacattgtgccatccttatgatttcacctgttacttagttcacactgatgggtggctggtgtttaaatgctttccaagttcatttcatttattatacanatgcctgtgaaatacccaggcagcatcattgcttccttctctagcctccaaaccgaatatccttttgctcaagcatccaggtaaaaaaagggggaccttaggaattgtgaatttgaagccagaagccatg

SEQ ID NO: 22 - DNA, 193 bp, Homo Sapiens
  AI349750
tatacggttgctagaagacgacagaagggaaagaggaggtgatggtcacactctgtagatttgaacagctttcagaaggtgatgggataagaaaattaaccaagtctactctgactcgactgctataactttggagcaagctgcagcacccaagacaaaaaaaaaaaaaaaaaaaaaaaaaaagtcgtatcga

SEQ ID NO: 23 - DNA, 374 bp, Homo Sapiens
  AI374864
ttttttttttttttttttttaatttcttaatcaaatttattcattgcttacattaaaaaaaatatgataagaacttgagtaatgtatttgtacacctcacttaaagaataatacagataaagtcaatccaaaaaagtacaatcaggattatgaggagaacttaaataatatcataggaagaatcgctatgttgtttacagaagtgaaaactggatgagatgctaaaaaaataataataatggtaatgataatataaggaaataaaaataattaaccctaattgaatactacctatgtaccaggcattccattatgttaaaattatataattctatactcagggatgggttgctttttaaaaaatttttattttg

SEQ ID NO: 24 - DNA, 758 bp, Homo Sapiens
  misc_feature (248)..(248): n is a, c, g or t.
  misc_feature (325)..(325): n is a, c, g or t.
  misc_feature (370)..(370): n is a, c, g or t.
  misc_feature (376)..(376): n is a, c, g or t.
  misc_feature (389)..(389): n is a, c, g or t.
  misc_feature (393)..(393): n is a, c, g or t.
  misc_feature (398)..(398): n is a, c, g or t.
  misc_feature (405)..(405): n is a, c, g or t.
  misc_feature (408)..(408): n is a, c, g or t.
  misc_feature (413)..(413): n is a, c, g or t.
  misc_feature (430)..(430): n is a, c, g or t.
  misc_feature (446)..(446): n is a, c, g or t.
  misc_feature (453)..(453): n is a, c, g or t.
  misc_feature (457)..(457): n is a, c, g or t.
  misc_feature (483)..(483): n is a, c, g or t.
  misc_feature (492)..(494): n is a, c, g or t.
  misc_feature (497)..(497): n is a, c, g or t.
  misc_feature (504)..(504): n is a, c, g or t.
  misc_feature (521)..(521): n is a, c, g or t.
  misc_feature (529)..(529): n is a, c, g or t.
  misc_feature (531)..(531): n is a, c, g or t.
  misc_feature (535)..(535): n is a, c, g or t.
  misc_feature (541)..(541): n is a, c, g or t.
  misc_feature (543)..(544): n is a, c, g or t.
  misc_feature (547)..(547): n is a, c, g or t.
  misc_feature (551)..(551): n is a, c, g or t.
  misc_feature (553)..(553): n is a, c, g or t.
  misc_feature (559)..(559): n is a, c, g or t.
  misc_feature (562)..(562): n is a, c, g or t.
  misc_feature (572)..(572): n is a, c, g or t.
  misc_feature (574)..(574): n is a, c, g or t.
  misc_feature (578)..(578): n is a, c, g or t.
  misc_feature (582)..(582): n is a, c, g or t.
  misc_feature (589)..(589): n is a, c, g or t.
  misc_feature (593)..(593): n is a, c, g or t.
  misc_feature (595)..(595): n is a, c, g or t.
  misc_feature (600)..(601): n is a, c, g or t.
  misc_feature (606)..(606): n is a, c, g or t.
  misc_feature (615)..(616): n is a, c, g or t.
  misc_feature (623)..(623): n is a, c, g or t.
  misc_feature (626)..(626): n is a, c, g or t.
  misc_feature (629)..(629): n is a, c, g or t.
  misc_feature (634)..(634): n is a, c, g or t.
  misc_feature (640)..(640): n is a, c, g or t.
  misc_feature (642)..(642): n is a, c, g or t.
  misc_feature (645)..(645): n is a, c, g or t.
  misc_feature (647)..(647): n is a, c, g or t.
  misc_feature (651)..(652): n is a, c, g or t.
  misc_feature (658)..(658): n is a, c, g or t.
  misc_feature (674)..(674): n is a, c, g or t.
  misc_feature (679)..(679): n is a, c, g or t.
  misc_feature (690)..(690): n is a, c, g or t.
  misc_feature (694)..(694): n is a, c, g or t.
  misc_feature (701)..(701): n is a, c, g or t.
  misc_feature (703)..(703): n is a, c, g or t.
  misc_feature (713)..(713): n is a, c, g or t.
  misc_feature (724)..(724): n is a, c, g or t.
  misc_feature (728)..(728): n is a, c, g or t.
  misc_feature (732)..(732): n is a, c, g or t.
  misc_feature (744)..(744): n is a, c, g or t.
  misc_feature (748)..(748): n is a, c, g or t.
  misc_feature (752)..(754): n is a, c, g or t.
  misc_feature (756)..(758): n is a, c, g or t.
  AI557007
gaattcggacgagaacatgcccaatgctatcttgatccaacttaagctaagaatcgttgctcccaccccgttcatcaaaaacatcagcagagactttttgggcatgcaaggaaatgttttttatttcataattattttgagatttattttggtgatgtgtttctgactgactgccatattctttgttctcataatttctctactagtattttcactcccaacccccgtgccattcccacttgattttnatgtctgctggcagtgagaggctaaaatggccaacttaagccaaagctgtaaacaacagttgaagtaagtctttcantaaagactagactatgatgaaaaaaatgaaaaaaaaaaactcggngggggngcccggtacccanttcngcccntataagntgnggtcngtattaccaatttcacntgggccgtcggttttnacaaccngtcngtggccttggggaaaaccccttgggnagttacccnnntcntttaatnctgcctttggatgaacnatcccccntnttcnggccangnntgngggnanttaggnggntgaggccccngnaccngatncggcctntccntnacaanntttgnggacccttnnatttggnggnttnggaanacttgntntgngnggtnnagtatntctgggtaaaatgtcnggggntaaattttttnaganaagccangntttttttttnaacccgatttngccntggnattgggaaaatncccntttnnntnnn

SEQ ID NO: 25 - DNA, 433 bp, Homo Sapiens
  AI655567
actgctttctaaggttgcggattttctaacttgctttctctgttttttttagaacatttttgcgggtatgagaaattgatgaatattgttattcatgttctcaaagaaaaaatatgctgattggatcacctcttctttccttccttccttccaattgcaccaacttccctgatgggcatggctcccttcactgtcgggttggattctcattactgtcttttggagatgcctgggatgcactgcattgtacagacaactgccttcatctttggaatgagttttaagttgtcttgtaatagctcttttggcttcactgatagaaggacccagataagaacacagttttttcgcattgtatttattagtgttctaaaatatctttttcttgaagagtcttatgatcaagcaccctgtattttaggaaattcagctg

SEQ ID NO: 26 - DNA, 466 bp, Homo Sapiens
  AI792205
cacatatgcagctgtttgcactatccgtctccagaactttttcatcatctcatttttgaaacaaggatgatattctcaagggattgttgtgatgattaaatgaaatatgagatgaaagtgctagcacagagagggcactctgtaactttactccaaggtttgaagtcttcccgtggtgagctatctaagcctgctgcttgggctagctgagagttcttttataaatacccaaggtggagacaggagagcagtacgtttctgcacttggtggtgtcagggttgaagtctggttgcctgttgcttcgtgagggtggttattagtttcacctggacttccgcagtgcagcctgctgtgcgtttttccctacccccaaattacagctttgagtctttcatgtgtctctgttcaacagctactctgtgtctgtgggctctgaaataaaggctacattttcagttaaaaaaa

SEQ ID NO: 27 - DNA, 412 bp, Homo Sapiens
  AI802398
ttttgcagagacacctctgggtgtttattcaaaatatcaaacttagagaacttgaagaataaagaccccagcattcttttttcctcccccgaagcatactcacaggctactatgactataaatttaataaagcagagttaagagcctgatttgaattatttcaatatttttcctccaaaactatcacaagacagaaaaaataaacattttgaaacacaacgagaaaaaagaaagaaaagagttgagactgaataaaacactaagcattgtccttcgatgtaaaaaactatttctgttagtgtgtaggcccaggttggaaagagatgtacaaaaacacgaattcagaggatcggaagaattaaaacgcccccaagaataacatgaaagtatttgatgttgcttcaggggcaag

SEQ ID NO: 28 - DNA, 246 bp, Homo Sapiens
  AI821112
ctactactactaaattcgcggccgcgtcgacaatccagacttttttttaatgaaggacaccccgcagtggctcgcagtgggtcccggtgctggcaggagcgtgctggcgagccggctctgtctttatgcatccttcaggggtcctagggctgactccaccggacagcccgtcctgggccgtgttaagcaccttttgcagaaatcgtatttttttttttattaaagcatcaaatctgtgttcctgta

SEQ ID NO: 29 - DNA, 553 bp, Homo Sapiens
  AI916641
ttttttttttttttttaaagcgctgatggaattaccctgctagggaaccagcatgcatatgtcattcctttgtacagtatttttacaagtatttgatttgtttaccctaatttatccaactcgggaataaaaaggaatctcagatctatgagaaggacctccaatttctcattctcagcttcaaaacaaattagtcagtttaacattagtcaagacacaggttgctgtgaaataagaatgattctaggtcatgattaagatggttctccaaactatcaacaagactgtctaatcacctgttatgaacccaacactgttaaacagcaatggcatgtacaaaagaagtaggaaataaagttcctgtcgtccacacctaacaatctagaggcagccttcaattaatttgctgatagggtgtattgcataataagttttatatatttgttgtttgaagttcaaacacatttcgccataaaaggcatgctatcgtgtttcagttctcatgctggtagaaaactgtcttagcctctaatgtaattgagatatcaagtac

SEQ ID NO: 30 - DNA, 2014 bp, Homo Sapiens
  AK000189
aaaaatccatcatggtaaagaaactgtttttctgagtgccttagacattgacttcatttccttgcaatcagtgttaagcattcagaatgatgtttcggttctttgaggcctgctggggaaagggagagggccctataagcctctggtgttccctccttctactaacacacacacacacacgcgcgcacgcacgcacgcacacacacacacacacacacacacacacacacactttggcctgaccattcttagccaaaaactcttgttctcctcacattctctctgcaacaaaaatccagtctttcaggaagaacaaactgacacgggagctagcagcaccctaagctctgtgctatcgcctcaatactttagcaaatcacttgtggggaaactgaggcccagatgatacaacttgccctgggtcacatagttggtttggggtagggctgatacatggacctgggatttccaattccagctagcaccctttccactaaggactcaggcgccaaggtcaacagcaaatgccagcaattctttctccgagcctatcacactcttctcactggcagagtgtgccagcccttcattctcttcaatctctcactcatcttttggcaatagtgttttcctacagaaaagtggaaggcccagcagggaaactgtgtgcattctactgtcacccatctggagcagcttagcctctgaccctcaagaacgggacagagcagctgcccagagtcattcccagtggatggcacagcacagtgtgcactgctcccacagtggccagttttagtctcttcagcaccctcagccttcactgccctgagtattgtagtttacatacaggagtcccatccactgcaccactactcccaagcctagggatgaagatgctgtaattcaccttttcctggggagcctgcctctgtttccctggagtggtcacttgtagttcaaaatgagccccagatttgctgcacatcctggccagcaccaactgccaacgagctccgtgtaacttatagcttatgttgcacctgctctcaggttgtgtggaaagaggaaatattggtgttcataataggctctggttgttaccaaggtctcccactggtggccagagtgtatcagctattaatctctctagtgctgtcgaagagacttttctaggctcctcccaaggggctgagtctagtactgccagatgggctcacagttcatggatatgtgagagggatgaggctggcagatggacagggcttgtactttgcactttggagctctcagaaagagccctccaggcctggacaggaggatcactcctgtggcctaagaaaatgaccaaggctataaatatccaatctcaaatctcaacaaagcaatttccaggttttaccttatatgcacatgtgaggcattccattttatttgtaaatgttggtggcattggatattcctctgtttccttctaatttcagtatggttttaataatgttggggtttaatggtctaacagtaatataatacatgttaatctcagtcatgtaagaaatgtcacattttatttaattcaaatcctactctggaccctattcttgctttggtgggaaatgtggcctaagtaattattggaggaccctctgcttctttggaatctctgaagtattaggaggccaatctggtatggggaaaatgaaggaggccctctctccttcagttcatcacggctgctgctaacccattcctgtcccagctgatagggtatctgagaagatgggtgattcttctccctccaagccaagcttgacaagactagaagctgtgaggtatctgatctggcctctgtagatgaacaattgagccacaccctgaagttttctcacctccccaatgtattgccatgaggataaggacaggtccctattggtcatgacatcccttgctgcctcacccctgaacagagagagcctaaagtcctagctactttcttgaaaaaagaaaaaaaaaa

SEQ ID NO: 31 - DNA, 1661 bp, Homo Sapiens
  AK021556
aaaaaaaaaaaaaagaaatacaccatccaatcagaacaagtctgaaataaacatgttttaaaagcctgtaatgacagagaggtggcaaaaatgaagaggatgctcaaatgaaaaggaaaaagaagtttaggaagaactacctgaagccaagagacctcttactttgtccaggtgggaaactgaggcccagagagggaagaaagctggtcaaaggtcacacacccattggaagctgagtgagtgacactcaggaggtgaggattccatgggaagagcacctagaggtgattctcccacctgcagctcctgcatgggctctagaagctggtttaacacatgactcttctgagcctttgcctcatctgtgaaatggacacaatgacaactactacggggtggtggtgagcagaaggcaggttatcctctggcgtgtgagatactcagcccagtagagtgttagggactcataaaggcttgctattagaaattagggccccagtctcctaggacagggttttgttttgtttttgtttttgacacaaggccattgctctcctttaaaggtttgggttgtttgtggcagggatggggaaaggatctgcccttcccaggccctgccgtgcccagcacacctgccatgctgaatctcccctcaccctcgcagggaccctctgaggagggtattcccccattttgcaggggagggaattcaggctcagaagtgaacactccagaacttgcacctgcccgtgcctgccgagctgtgcctcttctgttgtgcatgcgttctccatcccaggtttccttagcctctgcatcttgaatcttcacggagtgccctcgggcttagcttctgacaggcctcatttcaggggttgtcctggcatcatgggatggcgatgccctcatttccccaagatgcagtggctcagacacattggtggatgtggccaaggtcactgtccacttggttcgatgctggctgtgcccctgctggccaagggaccttgaaccagctgcctcagttcaccaagctcccatttccttctccacaaatgggtgctggagtgatacccgcctcagggctgctgtggggttcatgtgagatcctgcctggcccagagggagcacatgggaagtggattactccatagtgttgtcggcgttatttgacaggagcgaacctcgggtcttccagcaggatctggtcatgttcccattgagcagaactagtctgaggctcagttctcccactctgtacctgggtggtcttggtcatcttaattggccctgcaggactacagtgtcttttttcataagatagtcataataaaggctcttttcttgggagatttttgtgaggaatagtaagatcaggcctgtaaaattttcatcgcagtgccctggcacatagacgacatccaataaatggaaactattatgttttgattgatgatacattcattccgatactttacaaagacgtactgaggcctgctatgtatcaggcacctttctaggcactttggatacatcagtgaacaaatgagatccaaatccctgaccttgaggaccttggccttgataaggggagacaggcagtcagtaggaaataagcatattaaatatatagtaggataggtggtaagtgccacagggtt

SEQ ID NO: 32 - DNA, 1938 bp, Homo Sapiens
  AK021616
attttgttcctcagtaagagaaataaagaaattcgcagccctttgttttaagaagggagtgttttacatgctttttttgcttttttttttttttctcctaccctagcgatgacctcttccaggtagcggtcccttgtgcgcggttggtagtacccagggcttagagcgagcgcgcacccggggctgcggtggaggctcctctgtgagctctacctgcctcccatcccgaggcctaggagaaggcgggtacctggccgccagctgacgccctggtggtcactgtggccctttagaaacacacagctccatttcataagcaaaacctcctcccccagccccggctcaagcaccattcacactgccatccaagccgcgggcggccgtggaaagggcactggaccacccgtctcgcgggcgccgtgaggtacagcgatggctcccagtgccgggcagttcaggtgacaggagctttccaaagacacctagggtccaaaaagcagggttcccatctcacaatttggatttgctcatagaggagcagataggacaggctgctcacatttctcctttgaaggcacttccacagtggactgtcgctggcgggcccctgggcggtgaccatcggtgccccgggagacagcgaggaattgaccctttggtcactgtgtaagcccccactaggctgctgctctttccaaagggaaggggctgggggaaccaggaaggaagcccacccccacacctgcatctgtctgggttcagccaggtaaagggactcactgtgatcgtggcccctccacggggcaggacgaccctgcctccgtctcgtgacacaatgagggagcagcccgatccctgagcggtctcttttttggtgcctcctacatttcttgaggaaaaaaaaaatgtgtccttagctaccctgttttgagcagcaatatgcagcctcttccttccaagattacctccggagaacaccgttcttggccaaggacactgaggagctaaatctgcctcactaaggaacgagcttgtttccaagaaatgaggataagatgggtaaaatcctcactaacaaagaatactataaaacctgtgagagccttagaatagcttctaataatcctaggacaggagaaagcgcctggctttgctgtgagtgtatcctcagaaaaagcaggaggtcgaccatctcttcactggagccagcttctcctctagaaacgatgcttttttccctaactaaagagcagcaaaaacaaaaaaagggggggcgaggggattttttttacttgtttgagaaattataataaaataattgagtatctcctgtgagtaatgcctttttgtttttaattattccacagcaggtggagttttcagtaatttgttcaagttttgcataagtggttccttaaatcaaaaattatttattaaataggatctttaagaaattttttgaaagttttacttttcctgctgaacaatattttcaatgtgtggtaattactgtactaacatccatgtccctaatattactggggtttcttttattactcagaaaacaaaagtggttttttaaaaatctcatggagagggtctgtggcagctttctggactgattcttcgtgtcacgctgagcagctgctttggcatccaaagctgtgggatcacagaaagtgttgcttcaggtgtggatgccagccactcctcatgctcgtcactcttaaaagattgagacacccaaccttaaaaatgctccaataatccattcagaaaccaaactcatatgcacaagatgtcagggaggcataaagtcaattcttgcttgtttttttcatttcttaatgtaaaaacagccaaccagaaatttctaaaactggctatgctaattcagatattttctttctcacgctatctgccaggtttgtctaattt

SEQ ID NO: 33 - DNA, 2553 bp, Homo Sapiens
  AK023178
tcgcgcgcgccgccgccccgcgctgctgaagctggcgtcgctgccgccctcgtgccacgcaccgccgcacgcgctggagcaggaggagacgccgctgtgacgccgccggcgggaagggtccgcgcgccatggctggccgctcgcgccctttcccaccgctgccgggaaaccgaggctcgccccaaacggatttgcgtgaaaccagcccaaggttccgggcccccccaaccgagccccgcgcccggggactgactcggggaccgactcagggacctcccgagcgccaggactcagggcccgacctgcagcggctgcaggcccagcgcccgcaagcggcctgggccgagcgccgtttccaggccctcgccaggtctttgaactgcaggtaaagtggcaggaacgtcttccgtctgctcagcgtttggggatttagactcctaaagccagtacctgccccgtttcccccccaggttccgtcctgcccgcgcccggtctcagggtggcggccccggacacggcccgtccccacagacgaggtctccggcctgagctgtcgcacctggcgcggaggtcgcccggggtgccctggctgggtgagaggtggcctggcgggcggagcttgccaagaatcacggccagtccttaagtggatggtggggcccagcagctgctctgtcccccttaacaaaccagggggcatggaggggcccagggcaccgcccccctaccaggctcaggccctccaaggagaacctgctgagacccctgagcctgtcctagaccccggacccctgacccttcccaccccttccagcgtcccagggcgaggccttggacagagctcctggtcctctgcagggagaccatccagcccaagctctgggaggcacagtccattgagtgggcggaggccgcgggtgctgagccggggagggtgctcggagtccatccatccctgagacggcaagtcccacagggtccaacccacctgaaacctgcctgcacggtggaagtggtggaggtggacactcctaggggcttttctaaagctagactcgcagctccttgctcaggaaaattaaactattcacgtttcagatcaagtgttgacagtcaccagtcaggaggagttcttaaagagttttatgttgactgaatattgcacattgagtccccattgagtccctggtgggaaaagtccacaatttcccattgatagctttttactgttgtgaaaaagggaagcgtcagccacacaaaagcctgcatgaccgctgcttcggagaagctctcgaccctaactgcagtcactgttacttggatcagatcaagcgcagtgactttttgggattcagtggttattctccacacttcgtagccatttcaaccaactctgagcacaaaatgcagccatcctctatgcagcaagccctgcccagtcagtgaccctactggacagatccaaggccagccctggttccctgctgcagccaccgtcctgacgttcatcggagcaggccggggcctggccttcccggcacaagtggctgttctgacaggcccccagtttgtcccatctgaactgctgggaggtttccgggtggccagaggagcaaagctgccttccaagtgcctgtctgtgcctgggagaacagagcaggagcgtcgtgcggtccaccgcgcagtgcatggcgattccaggcgctgaacaactcccctggacccttgggcctgcatctgactcccagctgcagagtcagaagctgagtccaggcaactgcttggccactcccgatcgctcctccctggacacccggttaccaaagtcagcaaagaagatgcggtaatcgccgcctgatctccacatggtgaacacaacactcccaccaacacctccttgactggtcggtcttcagcaccgggggtgggcaggcaggtgttctgtgttgacgagaattgcacaggctaaacacaaacacggaaccagagtgagaacacctcactcacggcagcccaggctgctccctaccaggtgacggagcgcgccggggctgtgggtgccaggggctgagtgctagggactcgtcatgagtggggatccccacgttcctgtcactgctgtcaaacagaaggtaaacagtcttatgaatgtatttccttaggaaaacttgtaaaaacttttattaggatatctatttaatactgaactttggcctactttgtgatagactataaacaaattgaggaaatcactatttctcacttctgtattttctcaaaaataattttgttacagagttcaatatactgtgtaccattgatcttctattgtgaaagcaaagaatttcatcaaaatattttaaattatgagtgaaaattgtgtatgttaattttgcagctataatattaatcaaattttgtgtaattctaatcacaaaatgacgtgccttaagtgcccctccagctgtgggttggcagtgtccggacagggagggcccatcaccgaaatcctgaatgattactagaccaattctattaaaaacatttcaaggc

SEQ ID NO: 34 - DNA, 1737 bp, Homo Sapiens
  AK023329
gttgaaagatgtgagacagtattcagaataatgaagataataataatgattattataataatgatgatgattccaaggaaaaaacctacagcgaatgttccatttctaccccgcacgcagacactctccctaacactgataacctgagcccccagcactggacggaagaatgctggcgtctccgtgtgtactggttcagggttctggccccagccttgtcaggaccccctggtgtccagagcccccacccctcccgcaacaagcagctgatgccccagtgattctctatacatttttcacctcggccaatatgtccaggaaaactgcttacttctcttttcttgcctggagcttcattgttcacccttacgttgcaatataggaattaatgctacaaaataaaagtaaagcttacctgaaaagtgcatagtttggggcaatggtatctacatctcccactgtgggaaaaccagcaaagcatcaaaactctcaattctcctgttaccgaatgcagatctgaattataagatgtttatgtttgaccattgtttcaacaatgggattttgttacgaattatccctttaactgaaaccctcagttttactgtttacattattaggaaaacagggatatcttttgaatctaaaaatttgatgtacagcatgtgatttttgaagtttacatgtaaagtcacagtataggtgaaataacgtttgtcatattttgagacgtatcctgcagccatgtttttacgtgagtgttttagtcaaagtacatggtagacagtctttcacaataaaaggaaaaggattttttttcctccaaatgtacatttatcaacctaatgattgatttttttaaaaagagatttcgccccagtctggtttatgaaagttcattgccctaaactgtgctgattgtttttaatcaagttataaatttccaacctagatcatgtatctaccaactctcctgcattttccaaaaggcattgagcttaaatattagtcttgcttagagtaggttatccacttacatgctgcgctaaagccatgcctttgaaactccttgtttaaaacatgatatgatttttgtgggcagtttcagaaaagaaaacaaacaaacaaaaatcgaccctttaattattacttgcaactcaacagatctccctgccgtactgccttttccaggaactttacttcagggctgtccagattgcagttgtgccccgtgtatgtggatctagttcacagagtctttggaagccagcagtcgtgccctccgtatactgtccactcattttatgtagatttggtatcctcagcagccagtgttaacaccactgtcacgtagtgtacagattcatcttttatgtatttaaagtaatccatactatgatttggtttttccctgcaccattaattctggcatcagatcagtttttgtgttgtgaagttctactgtggtttgacccaagaccacaaccatgagaccctgaagtaaagataaggtacacatacattatttgagtaactgtttccttgggggccaatctgtgtatgcttttagaagtttacagaatgcttttatttttgtctataacaaacagtctgtcatttatttctgttgataaaccatttggacagagtgaggacgtttgccctgttatctcctagtgctaacaatacactccagtcatgagccgggctttacaaataaagcacttttgatgactc

SEQ ID NO: 35 - DNA, 1903 bp, Homo Sapiens
  AK023536
agaaaaaagataatatactaattcttaattttagtaagtagacagttgtagtgtatggatgttttgttaaatctttgttgatacagaatatataatttcctttttctgtttgtgtgagaagtaaagattgaacaaaaatatgtgagtgctaaactgtctttaaaaagtagataactatatcaaaaagagtaaggaccagtgggcaccatgcagaacaagcaaatagaagctcagcctttgagtagcagctttggtagtatacaaaaatgaactgaaaataggaactcagcagtgttttaagatgacagattaaacaaacatcccaccagaaagaggtaatcacttagactaatttcctcatcccctaggataaaatcttaagtcagtgacttgaaaactattttgacccaatccattgagaaatgcatttttacattgcagcccagcacacacatatgtataactgaagcaagagttgtacttaacaatacttacttatccgtgtgttatgcatcttgatatttcttattctcttttaccccttcctctgtgtgtctgtgtgtattctttttcccccccacccacccgataccgttcaggaaacactacgttgatttcattacctgctaatgtgttgcaacccctttgagatgatcctactagttatgatgagatgcttctaataaaagttacaccagtagaaaatgccaatatttcataaggccaggatgatgacttagatagtactaatattactacactttaggaaagttcatttcattttatttttaggaaggacactaatagagttccataaaagaaaagtctttagtgcatgttatttattattcagggtgtagatactattttaacttccacattctaaattatagtgtgggtatcaatctatgaagtaggtgctgacaagttgtcaacattactgacttttatggtgaagttttaaatttgaatttttattcaaatataaatgaaaagaccattttctcaggtaaaaaaatctatcatgctttgatgcttttcactttaattgaaaaaagactcattataaaagtacaatgcaagaaatatttagaaaaatattcctgatctccagttgttactgtacctagatttttcttgggacctatgtgataaaacttatcatgattcttgaagaaatagaagttcgtacaactgttatcagaatttatataaaatgtttctcagaaaatgtggtttctccagctcgagcattctataactctaagccaaattgaaagagcagattgatgggataaaacacaaagtatggaaataaataataaactgctaccctgaaaaagcctacctctgcacattgtttaaaaattggaaaagatcctacttctgtgttctgatattcaatgcaagtcattagagtaaggtgagactcttcctgtggattcagattgaaatcagggacggtgtagggaggccatggtcaacttttgagctacccttgagggaagaaattaattgatcaaatattaactgcccaagtatattcacaggatggccatccagtaatgagaatgaacagtctccaactaaaggcaacaatatagatgaatctcggaaacatgatattgaccagacagaaaagattccacttacataaacttcaaaagaagataaaactgatctatgacattaatagtcagaatattcattatccttgagggaactaaactgggaagccacatgatagggcatctggaagctagtaatgtcctctttcttgatctgttacattggtgtgtttatttcattagatttattgagctatacatttaccaccgtgtacttgtctctgtatatgttttgcattgaaataaattttaccaataaaatgataaagcaaaat

SEQ ID NO: 36 - DNA, 2046 bp, Homo Sapiens
  AK023660
tctgtaattcatggctaatccgaagagtttgattgagttgatggcggcagggaccagatagacaccttggtgattgtctttggccataagaatagaccaaggataggttttccagagacaccttcatactgtaaacatggtttagacacggtcatagggaaggctgctggtccatcatttgttctgaacaaatggcatttcctgctcctgaccctggcagttggccccagattccttgtcgatgacttggaaacgtccattctgggtaaggtcagcactccctgagagatgttaacaaagtttacctatgagtcttactgtgtagacaatctgaagtcaattttagttacacaatcagcattcccatgtgtcctcagtgtcttatcaatgaactatgtgtatcaagccatactaaactggagtttagcaggacagaggcaaactaaatgtagaacataacatatcagctgaatatgtctatccaggactgtttttctagaacataaatcatggagctccttgacagtgtatccactgtttttggggtttaataaaaccaactagaatttagacttaaaagaaattattattccttttggttgtccacataaagtagtccagggctatcatatggctaaaatcaagttatttggttcatctctggtatgtatttataaagtcaacttatcagccattaagatggagatttgctttaaatttttgcagtgtgtgtggcagtcagaaaaacccatatctagttttcaacttcacctctggtgtttttatggcttaaccttatatcattgatccaacatctagcctgatgctggagctcttatttctagcctgatgctggagctcttatatctagcctgatgctggagctcttgaagctgactcttggaagtttggagggtgtagagtttcccatctagtatttaatttgtccctgtgccattagtcccagcttgaagtcatttgccagtgtcgatgttgacaggattgtgacaatattgcctttcataaaaccgagaaccaaagaattccattattctaacaaagcctgagtttcatagattgtgggcacatctagacagatatgtgcatgcttgatggtgcagagaaactgctgacttccaccaacctcatgctccccctggctggccatacagagggattcgttgtcatattgaaaaggctctgaaagatgagtttctaattgaagctcactatctcaggttggtgtttctactgtgcagtcccaagcctgtatccatatcataaaagtggaggcctggtactcctccaggttatctggccagtgtagactcctccacctgaatatgaacctccagggtaagaatttttcagacatgtctatactgaacagtaggatcctgcactttccaaatgtctgcctccttttgttcttcattgacccattctaattcctgttaggtgtgagaagaattgtcttcagttctctctccattctcattcatgatggaatcattgatccattgaccagttgagaaatgattgatgctgaagaggtggtattctgttggtaaggcttattaccaaacttccgataatgaagcaggctaccaaaaacttatccagcccaccctaggagtgtttggatttgatcatggatgtagcatacaccaaaatccaccgagacctttgcaaaattaggctacttgttttattttgccagattatcatgggagagtctttaactagttctgaatatttgtaagtctgagtacttcatagaattataaagaaggtacagctgaccccttctcaccatgttgtaaatatttactgagactgggtgcagtactgagggataataatcttctgatttatcaaatcctgactgtctagagcaaattgtacactctctttgtgaatggtcctgtaacgtgtatgaacacatttctgggtgccttagaagttgtatttttcatgtgtgctaatatgcagtatttatacattgtgagaagctgctttgaataaaaaggttgaaacttcgtctgc

SEQ ID NO: 37 - DNA, 1939 bp, Homo Sapiens
  AK024852
ccttgccttctcattgcagctgaccagacacaaaccctcgcatgtgcaatacagaagactcccccactggaaaaaaaaagaaaaaagaaagaaagaaagaaagaaaaaaaagatggagggaggaaggctttaattttgaataatttccaaggacacagagaaaaatgaagtatctgtgatttacactaaagctcacaggcaactttctctctccctctgtttcttcccccacagaagcagtcacgtacaaaacattaaaatataaacagagctgcagttgctgaagccagaacccttgtctgattttttttaaactccgtgtcatgctaaaaaaaaaaaaaaaagaaaaaaaaaaagaaaaaccaacaccgtatctgaaaagcttagcacaatataactattaaaaaaatcttttggttggcttggttagtagtgtgagaatgaagaaacgtaaagacttccacgtctcaggaatatttcagataaaaaataatcttttgcggctccctgcccgggctcccagcagcctcttcccctttgtgtctgggctctgtcccctctgcagggccccagcagacccccaccaggcctgatgtggacagctgttcccaagccctgccagttaatcgcttctgggtttgcacccttgagctgtgtgcaccaggacacccccacctactggaagtactcagggacgcagcctggttcactgacacagcccccagctgcctgaggagtcggtgaagctctggcctttccacctcttctgctgcaagaggccttgcagcctgcttccctggtgggaaaaggaaagcagaaactctaggccttcctgctggatctacactactgggagagccccgatagtgcaaatttaattggcagggattctattaaatatgtgactttatttggggttgctaatgaaatcaaaggcttgttgtatgacttacagtgtggacattaatttttaagaatgatgggttagaaagttagaacggaagagtttttctacctaaagaaatgagaatctagaatttgtgaaagggctgaatgttcctatcttgctgcttctgggacaaacttttccctgacatgtaaaacgcctgcaactgccatgaacaggaaagaaatggaaatggtactgattcactcatcaactccaggcaactttgtgtgtgtgtgtgtgtgtgtgtgtgtgtgtgtgtgtgtgtgtttattttgaaataactttattcgcagcctaacactttgcactgcattcagcatgacttagaatttacttttggtgttgtccagctgctgccaaaaattgggtagaatcagattggtattctttgttggtgcctggaatcgtagccagtggtacaaaggtgatgttgttccttgctgagacttcgtggaagaaggcaaaactttgatcatctgcccttgcacttgggcagtgttgaaggtgattggagtacaagtgccaatttgcaggaacaattgtaaacacctttgatacaaatgccatcatcccatttttactgattagaaaaactttgctattaataggtgcaaagtccatttcaggtataattggtaaggaactgagtgcactcatgggaagaaaccttgttttgttttttgttcgcttttcttcttatccccttttctcagttttatggctggagacatgatttattgcagccatccatcttgggggctcatccatcacacccgggttgctaggagattgtggcagcagctgtttgctctgaatcagacagaaaagttgtcaatcatcaaaggcaggtgaatagcattagaaacacgctattgtcagacggaataattaatcaaagagagaaaagataattaaaaagatatgacccttgcaagtacttgctctgggttgcctgtaaaaaaaaaaaaaatagaaaaaaaaaaaaaaaaa

SEQ ID NO: 38 - DNA, 2136 bp, Homo Sapiens
  AK024986
tttgcacattttttaaatgtcattaactgttagggaattttacttgaatactgaatacatataatgtttatattaaaaaggacatttgtgttaaaaaggaaattagagttgcagtaaactttcaatgctgcacacaaaaaaaagacatttgatttttcagtagaaattgtcctacatgtgctttattgatttgctattgaaagaatagggttttttttttttttttttttttttttttaaatgtgcagtgttgaatcatttcttcatagtgctcccccgagttgggactagggcctcaatttcacttcttaaaaaaaatcatcatatatttgatatgcccagactgcatacgattttaagcggagtacaactactattgtaaagctaatgtgaagatattattaaaaaggtttttttttccagaaatttggtgtctccaaattataccttcaccttgacatttgaatatccagccattttgtttcttaatggtataaaattccattttcaataacttattggtgctgaaattgttcactagctgtggtctgacctagttaatttacaaatacagtttgaataggacctactagagcagcatttatagagtttgatggcaaatagattaggcagaacttcatctaaaatattcttagtaaataatgttgacacgttttccataccttgtcagtttcattcaacaatttttaaatttttaacaaagctcttaggatttacacatttatatttaaacattgatatatagagtattgattgattgctcataagttaaattggtaaagttagagacaactattctaacacctcaccattgaaatttatatgccaccttgtctttcataaaagctgaaaattgttacctaaaatgaaaatcaacttcatgttttgaagatagttataaatattgttctttgttacaatttcgggcaccgcatattaaaacgtaactttattgttccaatatgtaacatggagggccaggtcataaataatgacattataatgggcttttgcactgttattatttttcctttggaatgtgaaggtctgaatgagggttttgattttgaatgtttcaatgtttttgagaagccttgcttacattttatggtgtagtcattggaaatggaaaaatggcattatatatattatatatataaatatatattatacatactctccttactttatttcagttaccatccccatagaatttgacaagaattgctatgactgaaaggttttcgagtcctaattaaaactttatttagggcagtattcataattagcctgaaatgcattctgtaggtaatctctgagtttctggaatattttcttagactttttggatgtgcagcagcttacatgtctgaagttacttgaaggcatcacttttaagaaagcttacagttgggccctgtaccatcccaagtcctttgtagctcctcttgaacatgtttgccatacttttaaaagggtagttgaataaatagcatcaccattctttgctgtggcacaggttataaacttaagtggagtttaccggcagcatcaaatgtttcagctttaaaaaataaaagtagggtacaagtttaatgtttagttctagaaattttgtgcaatatgttcataacgatggctgtggttgccacaaagtgcctcgtttacctttaaatactgttaatgtgtcatgcatgcagatggaaggggtggaactgtgcactaaagtgggggctttaactgtagtatttggcagagttgccttctacctgccagttcaaaagttcaacctgttttcatatagaatatatatactaaaaaatttcagtctgttaaacagccttactctgattcagcctcttcagatactcttgtgctgtgcagcagtggctctgtgtgtaaatgctatgcactgaggatacacaaaaataccaatatgatgtgtacaggataatgcctcatcccaatcagatgtccatttgttattgtgtttgttaacaaccctttatctcttagtgttataaactccacttaaaactgattaaagtctcattcttgtcaaaaaaaaaaaaaaaaaaaaaaaaaaataaaaaaaaaaaaaaaaaaaaaaaaaaa

SEQ ID NO: 39 - DNA, 2832 bp, Homo Sapiens
  AK025082
tttttgtctgcctttcttttctcctagctctgcaatactgctcggaagccccaccggccctttcagtgctaccttcttcctcctagtgcctccccactccccactcccagtcctggtaacacttaatggtcagggaggatttcatcactgacctgagtaataaggctatgactgctctgtgccagagaaacatgggtaggggagaagacattaggaagtttaccttcttggtaaaggacctaggcttcccaaggtcccagccctcagcttatgcatgactatcagcacctttactttcttctggctcaccacaaggaaaggtaatctattcctggactaaatcagtgccttgggacagctatagtgctggtgtagggatcagagcacaaggcaaggttttcctgggaggataagtataaccatgtttttcacagtgatcgggcttatagatactattgtctctgacttctagatcatcatccttcttctctggagtagcacaataggcatgtctctctttggacatatacaatgttcaagaataggggtggtgatgggggcttctctgttgatctgtgtgtttgtgtgtattgtcaaataactgttatctagcatttgctatatggtgtggagcactaagtgtgagatctatgtcacacacatacatatataattatatatgtaaaatttcaattctcacaatctgtgaagtactgaggtagatagtaatattgtctgtatcttttaggtgaagaaactgagtctttttccaaagtcacacagctagtaagtgatgggaactaggattcaacacaggaagactggctacagagtctgtgcttgtaagcactatgctatattgctgtgtgtgtgtgtgtgtgtatttcactgatctagttgctgaagcccttatcactgctccaagaagtaatttacttcattttaatttaaagcaaagatgaaaacaacttatcctactgtccaaaacattcttccccttgcataggagaggggtgcttcctgaaaggagtgagaccaagagagttgctctgagccaaaagctgccttgcagtttagctgaggcaggatttagaaatggcgtgaacagtgcctgcattagccgatggcatggagtgctgagtgccagcagaggagataaaatcagacatatgtttggatataaatgttcctctctctcttctaattttaagcccctgctgctttgttgcagtgaaatgatggagccttaattataggccctggccccctgaggtagaagcctgggttgagtaaggcccacttagccctctcccagactctacccattaccacggaaggaagccagagaccatggactctgaccctcttctcagacaacaataggaattgtcttgcagggactctctgctggttgttccacggcactcagcaagttgctggcctcaatacatgttaaatagccatgataaagctaatgtctctaggccttagaaactagcctatctacctttacctccattgacgataggatgcagctgaagggtgtcaaaaagtcctggagcacattgtagaagtggcagctacagcatggcacttaaagagttagagctggggtagatatagtggagaagaggagcaaaagaccctcccagtattctcattgttgagccgggtaagcaaaaaccactccattatggggaacctctgtggtccagtaggtgttttaagacctcctccacactgcagagtttccaaggctgggaggaggccaagccaccttttctaactataaaacaccaagtcttacctacttcactccttccccttagctgtcaccctctgtgggatcctgcagtttctgtctgccattgggcctaagaatcaggaaatggttatgtagagtcctgatagtctaaccccttagcacatgtggagcccctgtagtcaggccttagagggcagtatagccagttctaaagagagtgaacagctctaagggataagagaacacagacgtatcttaggaaggtctcattttaactgttttgctagttaagtatgttcttgatagccaatagcagcctgggtgagaaagcacattgactcaggagtcaaaagacctgggcttttagtcccacctcctccactagcagtgtgaccttggatatgtcttttaatttctctggggctcagtttctttgactgtaaaatgtgaagggattagactaaatgatttttcacggccttcagttctgtaatgaaaattctctaactccgtatcatcagcaagagtctttacatccaacgtgttgctataactaccccctaaagagctaccaacccgtgttccattcctaggtaacaaaccttggcctggccaaggatgagtcacagcattcacggctgcatttttggtactcacgggatgcctctctgaaaagctgtcccaagtgcctgctacagaggaggatataccatgatagcaaaggaaggttactgctgtaaaagtggaaactgcatggatcaaagggcaggcctactggggtaaggaactctccctgcagctctgaggatacttaaatctaggatcctagtcttagtctcccccaactcctttgaggttcctttcaaaagtccttctcccacagattgaagctgaatatagtcttccttgggacaaatgcatttgtccataggactctttcccgagattgttttaggcccatttctgtacctctcccctcagactgttagccacagacccttagtcattgcaaagttactgcataattccctgtctgctcaaatagctgtcaaaaaaaaaaaaaaaaa

SEQ ID NO: 40 - DNA, 2638 bp, Homo Sapiens
  AK026168
tttctgagcactttggtgctgaattgaaaatggtaagctaaagcagtgacagatccacgtagcctctttaacctctttattatcttgccaaaaaaaaagtttctcaggttaaacctttgtctttaacctccctttgttgtggagaaaatgtgtcactaatcagtggtccaagggatatctagctttggttactcagttcctgcagcataacagatatgacttatgccagggaaggtagaggctgattatggagacacccaggaacaggaataagaagggataggtctgctccacgtagaacctccccagatcggaagttaagtcttggagagtttccaaagtgctgaagtaaaaaggagacttggagggcctttgcttaatgagcaagaggcttgtgtcctcccaagaacatgagggagttcagaagggagctatagctcacagacagaaacctgcccgctcaccccatccctcgtgactgggagcatgtttgctcagaattttctaagaggactctcccttcaaaaatccaatttgctcccagaatgttgtttagcctctgagaatctcactctttcatttccatctgtgaatggacatagatgtgttgctcagggatcagaaacatcagagtccagggcccagtggcatggtgttgcattagtagttagaaaagtaattggtcagctctactgtaaaagaaataagtatgtagtacagttttgtaaatgtcaggtctgttctattgttttgtgatctgaagactgtcaaactggttgataatcaaagaaaaggttggttagaataagtaaaatttcagttagaaagatatagcttaccagttttccatgtgcttaaggaagtcaagaatatttcaggttgttgagaactgttgtaaaatggaattgaagctagtgtctctcaccttcttaggtgtatcagagagaggaagtggaaggccagtagtagcatcttcatacttacttttgccagcccagcctccatttcaaagactttgtcttccatcctatccaatgacatggtcagggatgggctctgaggaggcagtgaggccccaccttggtttgctccactgtggtgtgtagtctccaaacagcttaagggtttttaagttttctcacgattacctccactccactcatctactatcagcatcagaaaggttaacatccctgggaccattctacttataaaagagatgaactagtgtgctttctccccttttccaggtgtgccatccatatacaatctcctcttggccaagttcaacaaatgtttccagggaaccccgtgggttgaggcaaagtagccaagatgtattgagttaagtttttctagaggacaaaagtatttcttgtcccttttccctcatgctcatatgttttagctgaggcgtaaatggccaagttgagtaatatctgtggaactgagacagagagccagggacccatgtacccagggaccagtcccctggggaatcacacagtggctcagactagactgctctatcccaccggaactctgctgctgttcatttccatcaggaccacccaggaaagcaaataagttagccttctcatcattaggtcacctaatctcttgggttgcaggatgagagcatatatagatctcctgtttagagagtgtgttcataattgtagaaagggatagaaaatggaataaccaagaggctgtgtcattttttaagaggatggcaaggatgacctcaaatgagctcaacaaaactgggaatccaaggaatggtgcttgtagggaaagagaggtcagttgtggtccttaaacctcttggcaccttgtgcgggttataaaacaaggagctggagtaaaattgcccttacccccaatccaaatgctgtccaggatttaggagctacccaacctgtggttatatggtgttggtttccattttttgtttgtttgcttgtttccaaaatagccttgcttggtactgcatggaaagttcaagcttttcttcttgcccgctcagggctggcctcttccccgtgtcttcacagcgtccctaaggaagatttttgcagcactctctggagctgaggggagtgaaatttggtccagagaaggcggaaggaaatagttttcctgtttccttttctcgaggtggatgtcctcaggcttccttcacacctccttctcatgggtgcggctggcagtacagtcaggctgtggaggagggctgagaagaaaggggcactggtccagccccaggtttggtctgagacaggtacacagcagataccatcccaccttcctctctaaagaacaggccagccacacatataaccctttccctactttactaatgtatcccttatgtggtaccagcaatggaggacaggcagacttaccccctgccatctagagagaatgttgttattacccgtaaaacttgaccacccccatatcccactcctttttgtaaaaacaaatgcttaaacctgtgagcctgccgttcctttctatgtgttaatcagtttccttccatttgagctgtgtgggagggaagggcattgaaattgtaggttgtaatcttgtgccaaccaataaaaaccagtatttcacaaaaaaaaaaaaaaaa

SEQ ID NO: 41 - DNA, 2106 bp, Homo Sapiens
  AK026659
tgatgattgaagtatgtttattgtaagggcagaaatgtgttggcatttggataaaaaactgctaacattatagaacttattacctaacaaaatttcacaccacaaaaaatattttaatggcaaattcaaggtgttttattgcttacaaatcagcatctttgactctttgaacatcaatttgtgtttacattgaaatgacaaaaagacaaactaagaagaaatacagcatgcaagttggaattcagagttaaaaccatgatgttgccgctcagccagctatgtgactgttgaccctttcaagaacacacatggatttaaaagttggatgacatccattgttggggccttgggggatatggtaaagcatgaaaactaaacagccaggagcctgtgaaatctgctactgtattttccaggacttcattccactccttggctaaaaaaatcttggaagtttcacagattatgatgtggacctgtcacctgtaaattgtctcaatctactcagacaagacactaaactgtctttggatactatagatgtcagtgcttatagcagctggaatttggctagtgacaatgtttaaagatgtaatactagttagtatctattgaagcttaaactttgctggtcaggttgtagctattgtaaaagtatttattgaagaagctcacagtccttcagttgtacagactgaaaaactttcatgaaagatccaacatactaatgtaaattatatttattacaatgtatgatattaatgtgtcaaactggtgtattttacaaaatatataatgcatacataaataagagttgtatattacagtgcttttcaaatatcagtgtcttggaatatttaagtcttcacattttttggtctaaaatatgaaaatgtttcatgatacaagtgattaattttccctagtagtgcttttgcatgtttgcctttttatttaagtttttttctatatagacacaatttggtgtcagactatcataagatcgatagtgaatataaaatatcttagccaaatggggtctgtattgtctacattttatatattaaataaaagtttttgttgtcttttcaggaggtttagagtattgtcactaaatatgatcaaagcttccctttccaaatgcaaaagtcttgtcctacatttaaagttgatctgtcatgttttagcagtcaagtgggatgggcattatataaacaacgttacaatgtaaggaaaatctttaaggagatggggagagaaaaaggcagctggtataatcggttactgctgcttagttctacttaattttttgtgttgcttcttcttaaggtgagatagcataatcttaactgttttgagatggaattttaaagtaacacactaccagcgagttcaacactgctattgattttaatctgttttttttttgtttagttgataacttaaattccaagtttcatagtgataattgtatattatttggctgctgaattctgttagagttttttattctgttgtacattgtattatacacataatcacaaattaatatgaaggtgaatatatgttacatatcaaaatttgtgaatttgaattatagtatgttttagtgctattgcaaaaaatgtttatttttatattatctgtgattttaatatagatgattgaactagatttctttttgagtgatagtgccattgaatgagcagtatggaaacagtgttacttgatattttgagctttctcaggtttatctaaatcagtggtagcttaacaaaacccagactaattgtgtgtaattgtatttttaataaaaggaaagtacatttcctataatagcatagtactgtttgcatgtaagagtatgcaaaaccttgtgtgtgtgtgtgtgtgtgtgtgtgtgtgtgtgtcttagtgtgtgtaaggcatggcagccaactttgtatctgctatttttagtacgagcagagcttcataattgtggtcactagaactgtacttaccatggacagttaaaactgaaaaagactcaataaaactatgaaacatggaaaaaaaaaaaaaaaaaaaaaaaaaaaaaaaaaaaaaaaaaaaaaaaaaaaaaaa

SEQ ID NO: 42 - DNA, 3279 bp, Homo Sapiens
  AK055652
ataatatggtgcattcagtttactccacaagtggttaacattttaagtcctagatttttgatgtcttgcctttgtataagcatcgctttggggaataccaagatgattcattattcagtgattattttcttgaaagataactatgatgattggctgtaaaatcttcaccctaataaaggagtgagatctctgtgtaaacagctttctgaaggactgataatagaatagaacttgcagccaaaggctttttcccttttgagaagacggtatttgtgtaaggagtgctaaggtagacttcattgtacatagagtgccatattctgttgaaacgatcataacaaaatcaaaacctcatgcttcagcaaaaaggaaaaaagatttttaaattactttgtctattacttactgctcatagagaagtgactatataaaatggtccaattttctcatttctggtggtgcctgtgagtcttaaagccatatctgcttatcttactgttgatagaatactttttttctttttagcccatgataagtaatatgggcaggtagaagcaaactggagactgtcctgttaatgctgcatggggcacaatgtctttcaaattattggtggaagaatctcttttatccatggcgagaggtaagaatattaaagagtcaggatattgttgctcctggtatttaacaactgtcattagaaatgctgaaatttaattgtagagaagtcaagaaagaaagagtaaactgagaaaatcttactactacagagtcacttttacaatgagacctgcactttatgccagcactgtttgtgaggagcagtactgccttaaattagtttgactctgactgatgtcagtgtacgttacttcctttatgtgactgacagtcagctttccattgagatataacattcacagatgatccccaagtatccttgtcatcagaagctttggaccttttctgccactgacttgtggctgatctgtaacacaataaatacataattttatttcatgttgtctgtccacctctgaataagcagtggcatgaccaaaaagactggtagaaggagagaatttcttggccaaatccttcataccaggtaccacttcttgagtaactgagagttgactgtcttctatggtgactacatagaagatatttccaaaggttctgttatgcagtgaagacattcagattatttgtaagaatttcaccaacacccttgtgtattgaaatgcttaaccattaacagggaaaaaaaaggagaaaaccgaacaaaacagagacatttacttgaaatgggaggtttgctaatgtgaagagtgtttctgttttattacttataagagaaaagcaggaaaacttttgctttgataagaaagacaccagagtggtgattctatttgatgccacaggctaacacaatcgtgtaatcatgttgagttgtagaaatatatggccctaaaaaccattctctttcccttatatatataaatatgtgaacactgcctagtaacattttaatagatttaagatgcatttgtacattctcagcaaactagaagaaaatgttttttctctttttgagttaacttcatagcatagagaaccagcactgtgcaggtttcagcatttcagataagggcataattaattgtgtaacttaatgccctgttattcattgctgaggttcatataaagaatagaaaaattgaaagatgggtttgggcgacattttcttcccaaaagatcaagtaaggagtaagaacaagtaagggaagacagctaagagaacatactatgacatatcatagaattgggacacatttttgttgcactggatttcaggctatactgctaaaataatttctacctgttaaattttgtgagagggtttttgacatcagaatttttgtatttctggtcaaattggtcttggaaatccctatggtctctaatttcagctcttgctgtaaactgcaagccaaatgctctttctcagaaagagctatatttttctcttcttacaggcaacccaatatttatttcataaagtgttataaatattgagaagatacactggggagatagcatataaaaatgatgctccaaaatgagaattctatatggggctttccctaagaagaatccatcccagcacatattttgaaaaggtgctgaattaaaaagtacaagagtttgctcatataaatcaagttgcccaggaaacctgaggtgatgctatcatttgtctcataatttagaaacgtgatctcttgagagagagactacgcattgcctgggcactttcagattccttaggaagtgcccctttgatatttggaatgtggatatatttataaaacaaatggattgttattccaaatccacatggatttataaccaagccccagaagaataggcagctttgaaatagctagttcgtggaattgaacagaaccttgatggaatgcagttgcctgtgtgaggacagaaaacaaagaggctgcctcagaccacatgcctatctagagattaagtgaatttgtgagggacattttgtggatgccttaaagatgaccagtggtgggttctgatgggaatatatacactcatctggactaggccaatggaagcagtctctttcagttcacctccgtacagcacaagttgttcctgctcatgacctcattgaggaaaatgagaattgtggtgctggtgactttcatgtgtcttgggaggttgaggtgttcaacatcgttaaggcactcccaaaacgcaaacctccttttttaaatgccaattgtacatctacattaattcatctatgcaaacttgtgttttcatggtttgttttttacactatatttctcattaggttctttaaacatcaggtttaatattgatattatgaataatttttaaaccaaagtattctataagtttgtgtgctttgttttcctggatggtttgaccaaggtaaacatcagtcttgtccttctctcttaataaagtcatccatttgttaagtcagtggtctctgtctcatgtttttgttttgtttctttacagcattcaaggacagggaaacttacgagagtcttattataattattattatttacaaaatgaccctaataggtctgtttagtaacagtgaaattttttcttactccatttccatacactttctgtaaatatgtataacatgataatgatgcctggtgtattgaaatcctcaataaatactgccaagtgtggatcagttgg

SEQ ID NO: 43 - DNA, 2099 bp, Homo Sapiens
  AK055969
ttagtcgcactaggggtgggattcaaactactggtcaaagaccattttgtacagaaaagggaacatctccgatgggtgttaaggtaggagtttccatgcagccctttatgtctgagaaatagtctcctctgccattggggtccctgcggaatcttctacaggaattgcagctcttcacgtcatgctaggttaccagcatgggcttcccagagcacttcactctgtttctaactccactgacttttctgacttgtttcttgagggacttggaaaaggggaaggtattattcacacagatgtgtgtatgaagcctaaataacatccaactttttttccaaaaacatagtaagagtttaaccataaatagaagagtaatattcctttaaatttcttacaggcatgtaaaattttatgtgtttatagagagatgctaactgtcagcatatagtatttatattggggcaagaagggttaaatcaaatctttaatttaagtaagcatagttcctttaaagatcagtagtatttatactctgaaaagagtaccaagcttagttcagttatttattcatccattttttttctattgtttctcctctggggggaaatggtgttttgtttttgtttgagttttgtgttttagttttttggttttggttttgttttgtttttttgtcattcagattcactaaatttggggatggttttattaaagtatattaacttctttttaaccaaagctttctgaatatgaccagcctcaggtgctagcgcattaaagagcaactaaacctaattccagtgtcgatttgtgaaataataaaagctaattgaatttctctaagggtgagagagaacataatgatgaacttaaaaagaaattccctttcccagaagggattctgcatgtacctacaaacaatcatgctctaaccacagtaatagtcatgccatggtgacattgcttttacggtaaaccaagataggtaatatgatgcttcttcccaggtgtttctgaaagaaaagcagcggtggagcttaagagccaagtccactgattgacataataggatggaattgtagacagagacatgctccatgaaacaaggaaacaactgactactatttggatctaagttgggatctgatgttaaacaataaattcagtttaaaaaaatatggagctcagaaaaggatgtgaaaaactttgcattttcctttcttcattattacaaaaacacctatgtgatgacataaaatacttgggtgatatcagaacaattatccttaatagtttttataattaaagtttcctaaacttcagtctccaatagtcttttaaggattggaaccacatcactgtcagccccgctgctacaatgcctttgtacaatttttttacataaggcaaataaggcttttgtacaaagcctgaataccttctgttccaatggtgtccaaatggttattatattgtgaaaaacctggccttggtcacaatgcaaacaaaagtacagatgaaagtgctttttggacagtttgcaaattgtgttaaagctacggattttttttaaagtgttcagcatcttaacgtgtattaaagctatggatttttttttaaagtcttcagcatcctaattcaccctttctaacttaagaaaaacatgacttaagacactgcttctaagtttggttgttctttatagtgtggatacccagttatctgtgagcgtatgggggtgggctgagggtcaggtgaggaaggagtgtgtgtgtgtgtgtgtgtgtgtgtgatttgcatgtgtatgatgtgtgtgcgtcggaccgcttctaggctactaagtgtcaatggaaaagaaaatgtattcaaaatacttaaatcaaaactagaagatggggaaaaaaagatttattctatacaaagccttgtctggaccactttagagagacttctatttttttaacccttctataaatatttgatggcacttgaaatattcctgcaataaaatgtgatttgtgtaaagaaaaaaagattttgtaatgtgaaacaaagaaagaaagtaatgtaattttctaaaaaaaaaaatacaaacaaac

SEQ ID NO: 44 - DNA, 3615 bp, Homo Sapiens
  AK056642
agaggcccaggaggctgggtgaggcgctgagacggtttggcggtgagtcctgggccaggcgcagctgaaaggcccgcaacccgggaaacgtcaaaacaaacagaaggacttgggattccggagcagtcgcccctatcgctgctcctgcagttgcggacgccaccgaccccgccgccggaggactgggcactgaaaggcctctaggcctaggcgcggcccgcggagccagacgtgttgctgccgtgagtaaaacgagcgccctctccgcactcgtttacaaattaaaatggaggaaatttcgttggccaacctggatactaacaagctagaggccatcgctcaggagatttacgtagacctgatagaggattcttgtttgggattctgctttgaggtgcaccgggcagtcaagtgtggctacttctacctggagttcgcagagactggtagcgtgaaggattttggcattcagccagtggaagacaaaggagcgtgccgcctcccgctttgctcccttcccagagaacctgggaatgggcctgatcagcagctccagcgctcacctccggaattccagtagctgcaaaatgagagtctgaaagtggccaggacaataacatagactggtcctgtggcttcgaggagtaagctaagtagaaaaaagtaggaaaatcagacaaaagttttaattcccccttgaagatcctagcatttaaaaactcaaagtggataatttaggaatcctttttttaaagtgtattacctggagcaagctctgaagccctgggcaggaggagctgcacagcctgcgggccatgcagtgcctgttgatctctaaacacaccaggatgtgcgcaagatcctgtagtgcccccagtgcacaggtgagcagttgtgtgcccagcatataaaatttttggttcctcagcctttctgtctgcctggtgtcaagggcttcctggacagtttggacgttacagttcgtcaggccgtgatcagtggcctgcagtgggactgctcctttgatatctgaacccctgttatgggcttctctgagacaagtaaatgtcaggtgcaagatctggatactaacagtttcagtttgggaaatccaagaaaaagaattatcaagtttgatagggaagctctgtagccttgactccagcaagaagaaaaggtcaaaaccacgtgtttcccaaaagtccagactacaatgattcagctgacttgaggacaaggcctagcatttggctgagcagagccctcttccttgccctccaacctggtggcataggcttggcaaatggacaacttggttgtccagacaggttgaggattcggttatgatcccctggggaggtagcagggacctctgcaactatgcatgatttctcaaacttcaagattcatgtctggatgtattatgctgtggatataagtttagtagggcggtcatttcctactctgagttactggttacctagccagtccatgggtgtgacttggtccttaagtcaggtcactatctgcctcccaccctgggggcaggactgaagtatagaagagcatcatggctgtgcaggaggctgtggtttgaaaactgagcccagagggcactttcagctgccctcaataatgtgaatggattagtgctaggagccaaggagcaggactggattatctcatctgactgtgtgcagaatcctgttgaatgtccctgttttctttggttgggcagtcagagctctgctatggtgaacatccagactgtcaccactttctgtctgccgctcgaaagggatagtcctttccactcggtcccctttggatcttcttgacaacaggagcagtccttttattgttagaagtcagagaaagacctccagaatctcctgactttagggaatggtataggggaagatgggaagtaagagtcacatatcaaaactaccctccactttattccctgagcgagggtttatgaagtataaaggggtgggagccccgaggtgagcgggaacggtgctgctttatttgaaatgttttcttacctcattctgtgccccagtagggggtccagcctcatctgtctggcttggccctgtgttcctcctgtcccctgctccactgcctatctggtgccccaggtgctgcttgctactccagctgtcacattgaacagtttcaattcagctcttaatgctcctgcttccgaagcctgcccaatttctttttcttggcctctgtttttttttttctttctttttcccttgtttttgtagaagactcagaggagaatctttcttatggctccctctgttgagattggaattggaagagaacttaattttttgtatttaaatgcagtgtcatgcctataagcatttctcctatataggactgctttgctagtgtgccctcttgctgtgtcttacttcataaggagttgtatcttcccacctccatttcaatactgccggttaggacctaagtagaagagcagtaaaggctgattgacacacagggggatggagttggtccttgtccattctctcacccttgctgtgcatgtatcaatccttatcccagaaggtactatttagactgtatagactgatttagattacatactttagaggattaaggaaaccatagagtttgggccttggaactgttactgccttgtcctagagttgtcctgatcaggcttggggcctagttacagattagtcttaaagaattgcattaacttaaaaaaaaatcaaaccttggcaagagctaaaataatttggagatatctttgcccttgacttgtagacgacatctaagaggatgaagaaaggagagtctaagtgagactctggcctacttcctaacaatgtcttggaagtgggatgatggtaaaggagaaaggccacagtccaatccctctgccttcagatagggaactcaaatcctgaaattactgttttctttctggccttttctcctggttagaggaggaagcggaaagtagttttgagtaatactttgttcatattaccccccttttgttttttgtttctggcccctctaccaatagggcagtagcctcctgccctggatgggtataaggtgggcttggtccaacaggtgcccagagggtacatactcctttctggggagagaatgctccctaccatatagttgacagtggttaggaactctccctttccctacctaccttccttttaatagcagaattcctatttttcccttgattatgtgtattgatcaccctgcaatcctattatgtatctgagtgtgtgtatgtgtgtgttatgggggaaggggggggttctttaaaatttctgtggtttgtggctttttcttccatacattagttcccaccatcgcatgcccagggaccactgcctggcattatcgcatgctgggatcatcgggggagggtagtgaagctcaccactgtcctttgttttggagatttttatttttgcataagtagtccatcctatacagatagctgattaactgtattcccctttcccctatggctgctggtgtaaataaactgcatctccccattggtaaacagtaataaaattttaaaaaatg

SEQ ID NO: 45 - DNA, 2590 bp, Homo Sapiens
  AK057677
ttttatgcaatgtctataagcctgtttaaagctttccatgggctctgccccaaggccgttggctgcagcgttcaccatctgagtgccagttgctggactagttgaggtgaagtgcattgttttctctctgagcagctgtgcggggagctgagtgatgtgccctgggacaggcttcactggagctggtggaagtataaccagaagcacaaggaaatgagccaaaagggtgtcattgacacttttcatttgctcctgtgatactaacaacactttcacccaaatggcttaatgtaatattggaaatagatcttaaactgccaaatctcacactattgcataatccatatgctctttagatctagtcagtgtctctgggttttggtagcagatacagcgttccctttacaggaatacccaaggtgttctttcagcttccagacaggtcctttgatttcctttataaagggaaaattctggcaaatcgtgcctttactattagaaattgttcccagttgatgtcttttggggagctggtggcatgaaatgcaaatgacctatacattaaagtgatgtctcagtgaataccatacatgcagtagaacattcagaagagaggagcagtaatcctgaggggctgggggagtgacagtggcaggacggatgggcgggtttgacagattgtggtgggaagaagaatgatcatgtttaaagctaacatagccagtgttttgggctagccacacatcattccagagaccaaaaccttactcatgaactagacctttatcgatatcagtgaacccccatgtttaaaatattagaatgtttagagataaaatagagataatagagataaaagaagaggagggcttctatcaatgctgtaaacagtctgataagcgactgtggttattcccctaaagtttacttcagcactaacactagtgcttccgctggagtttgcagttttccagctttatacaggattttcctttgactggaagagtcaaggatatagagactcaacagtgacatttattgtacaacatcaaggggaataggatactcatcaaactgggattattcttatcaaaacatggtcttctttgaataagaaaaatacatagttggttattatggacttaaaactgtgttaaatggatattctgataaaatatttgctgctctgtagagtgtggaaaatctgagaatattagctttactcatcttgagctttgaggatgttctctgtacgccgatggtttcatattaactaaaaaagctgggtattgtaaaatctcatttataaaaactcagatgagaagaaaattttctttgatggtgagactgttgtcttagttcaggaaattatttaataatcctttgttacctgtgaatgaaggaactttgtaattctgatttatcgtaaaacatgagcctttccagagtcagcttagacactgttgtcgcaaatagccatgctttgccttataccaaggaggcccagagggagggcctagtcttcctctgttgctgtacatatattgaaatgcttttttttttttattttgcatttgttatctataatgagctttctgagccctgatattatgtgagacaaacaggagttattgatgttatacactcccttccattcaggattttctgcttggagggaaatatgttgaccttagagaattgtgaatattgttgcaattcttgaatatattaccatgtgaataatagagactgtgttgctctctagtataagctatatttatttttgattcatttgaattactagttataactggagaaattttgttacctctatcctggcttgcctgactggctgtataatagcagcagcctcttttagagcatcttaatgaaaacatggatgaaaggaattaatgatgatatctgcagactgcgtagaaaatggcttttgttcccagcgttaacattttcttctcaatcacatttcaatgtttgtggagagtggcagattcacaccagaaacactaggtgttcatatccatagcatggatgcagaataagcagttgggagagaagcttcttcctacctggtactcctcccattcacctcagcccagccccagacaggcgttagcattcagcgtgggccctcaggcagccctgaagcctggctgggtcatcagatgggggcagcctgtgacgggcaccagcggcctgattccagggaagagttcctggagggtgttggctgtttttgttagctcagtttttttctgggctccaccattcctaactccaggtagacaagatagatgtcacacacaacaattttaaagtattttgcttagtgcattttgtttatgattgcagtgtttgtttcttatttaataggctttttacttcattctattaaattttagtgtttagaagaggcgggtactgtcactgtgtaaaatatgtaatattttatatgttataccatgtcatatatacttgcaatatcagaccttgcattcaatatacaatgcaattgactctttgcagacctgcatttttcagtgaacaataaaaagattgtctggcactcctc

SEQ ID NO: 46 - DNA, 1511 bp, Homo Sapiens
  AK057720
ggcagaagtcacacccccagggagcagcctcagccaacagcaccttggctgtaaatgccccagctccctcgccctcaggtaagcattgctgaggcacacgttccatactcttttccacagttcctccgtgggactgagcaccacccagccacccacaggagcagctaacctgataaccaccagcctcaccctccctgccttacttccccgctcccctttaccacatgctgacctcccagatgcatttcttgctttccggtctctgtctcaggattggctcctggatgaacacaaactaacactatgttcacaaatatatttgggaaatgctggatgaataattatacacatcagacagattactagaaattctcaccaaagggatgcacatgttacctctgcatggtgagatctcaggtgctttttaccccacatagctatcctttggcatttttataattagcaagtgctcactcttccactgtcagtacattctcattcttcttgggcgctggacaagaattcaaccggtgtgtaagccagactcggcccgggcagtctcaaactcctgactccttatataatttctacaaaaattataaagctatttcccactccccaccccacattcatgtaacctgaagcatgagtaaaccaagaatgaggtaggcctctgtcttctaagcaacatcagaactctaagaacatgagggactcttagaaaactctctggagctaaccacagctgggtcactgctcatgtactgaagaccagccagagggttcccctgaaaaggagggaaactgagcaaacattctccagttctcttagtgtgcacatgtttcaggaggtgtgaaccccacatgtagcttgtgtaggcaagaagacaaatagtgctactgtctggtcaaggatttgtttgaagagccatgattatgcccatatggtaagccaccagtgctccccatccctgtaagacacttctttctcattattttctcctctgatggtgtgccaggatgctggccaagagaagccaagtggaaagaaggctgttcagtgacaaggaacctaagacttagtgccaaggactgaaaccaagtaaacttgtaattttccatgatggaaacatctacactttctcattagtggcctctacagcagttgccccaaagaagcgtctcattgtttttttactacatttatgtgaagcatacaggcaaactcagaaagactgtgataaggctcgccagagatgcctgcacaggtgctgggggaaaagcaggaccatcctgaagggagatggtgtctgtggacaaagaactctgcagtggttcttatttgcatgatttctgctggtggaggctgtaaatgtgagctcaaactcccacataagtgagttttcattgtaatccagaatgtttttaaatcaccctacttctattgaacttgcactatcatctgttaacctctactgtatttattaaataaacctgaataggtaaatcac

SEQ ID NO: 47 - DNA, 2488 bp, Homo Sapiens
  AK090694
ctggagtggagccctaggactgaaattttccaaattgctcctggcaattcttatgtgcagccaagattgagaagattgaggggactaaaatagaactcaccatttctgtggcttccaggacacttcccagagacttcataagtatttctgttcctagcctcagactctttaaggttgagaataggagacctcacaatcatactgctgacttaggctttcttacctgtctgtaagagccttatgagcggacacacacagtctatatatagatacacactttttacattatactagaagatgatgcctgtgatgtttatggtcacttactatgttgaaaaatgcatgactggcctatggtgactcattatttcttcccagatgcttgaaccatgatgccagtgagtggaaatgactctattgggtgggatgggcccagcaggtcagacttacttaggcactggcactgagaaaagcaatactgactgggtgtcgtgtacgtgtgactgcccatagcaataaccctctggtactgtgtctgtttatgtaaaaacttcttgtttggtagttttgactcgtatttgtagagctaggtactggttattattgtgcttcatcctatcccagatttcccagtacattcctttagaagacatgtccatctccaactgctgggggctggccttttctgtaggccaaggtgctgccccattagccccacctggttgtcatcactcacccatgtgttgtgtccatctctgacccatttcccctgccaccttgcctaaagcttctcctgtcagcctccccaccaccatgaagtgctaaaagtactatgtcctgaggtaagggcacctgcaacggagattgtgaagagaagactgtgggtttctgtggttacaagcacaactctgggtcaaaaacccattccaagtccccagaggggcaagtcccttccattcagtattaatatagctcatcagtgcctctgatgaaattgcccaggatgctggcagtgtggcctgggaggcttccagctcttggggtctggttacacatttattcacactgcggccatgtgttgaggacctactatgtgctgtgtttgaccacacgtcctgtagaatgccgtttggttctgagtatgcctggctggaatggaaaccaggaaattctagagtaacaggctctagtcctttccaaccaaaacaaacctcatgggaatgtttgagggaccagttaatgttgagacagagagagtatggtctagaatgatggttttcagattgtgttttgagaagccagaggtcatctttaggcctctgaagagtggtaaggggaggagaagctctcaactcccacacccacctcactccaagcagctcaagttccatctgatttatacattagcattctaagtaaaattttatttggaggcagtaaaaaggtccaggagaaataaaaacaatttgttatggagtgtattccagggcctgtttttagttgttgactctgggcataagacacttaattagatctaacctgatggttaatacagcattaacctgagcaccaatgctaaaacattggttttgtatgctgttgagtgaccaacatcctggtttgcctgggatgatcgtggtttagacctgttgtcccaggataattattcaagtgtcaccttaattctcaaaagtattccagtttgggtgagaaattacatggacactttatgcaagagcacagagttaagggaagggttggccagccttgcctaatgagctgatgaaccagaaggcaagccttgaaggagagtccatgtgggccatctcagagaactaagggatgaagccttccaagattaccagcattccaaaaccagaatatcatattgtgagactctgaaaataggtcactaccaaatgctttccagccttttgaccactgtcactttgaacaaatcaatggaccagcaaagtggcatatttttcttttattctttttattctttcctatgattactcctcatgttacctttcaattcctctttctgtctctctttttaaaaatttgactccccaccggccatgagactaaggctgacctttcataaacccacaagagtaactggtatatttgtatatgagtagttgcatgagaaagctcaatgtgcatactgtatttattaagccctgaacgcatttaataaaatattaacatggtgttttgaattatgatctttgtctgctttgctggaacaaaatataacagagctaacgtttgaaatccttcgcgtatttggacaacattacaccaaatgttgattttgtacagaactctggcttgctatttaaaaactaaaactctaagtatatagcagcccaagttgtgaatattgctttctgcttcactgaaaaagcagtttacctgaaaagagcatgtaacctatattttgttaatttaagcaaataaagacatgttgaaaaagctg

SEQ ID NO: 48 - DNA, 2242 bp, Homo Sapiens
  AK090870
gtacaaaacacacacacaaatgtgtcattgtaagtgaaagagccatcatggtacttataacaatagcacaatacagtatttctttggatttcaggggggtcttgattctgaaggcaggttgttttcataataaagatgtcatgatgtcttgaattgggctagtttagctaagcccagatcaaatgaagaaaaagaaactagtcaagatcattatctttaccacttgctctggaatgtgtttctcaaatatgtatttagatgaatgcatggctgtcgtaacacactcccacaattacctacataccaaagtaacttcccgtctccccatcaccccagtgcccttttctcccatatattttaaagtgataaggctcaatgtaaacttcctccttcccaaacgtttagggcagttcctgccaaagtgccccattctacaaagtgatttagtactttaaccttgctccagacactctgacatctctgtttagtctctggtgtaaaaaggttcgtctctcatatttcttgaggttggggaaagggaatggtcacagagtttaggtgagggtgggaaagtgatgccctgctcatttggggttttgtcttccagagttcttcctccattttcctgatgccaccagtattaaggccattgtgtgtgaacagattgcacacatctgtcctgctgttgccctgatgacagtgtactgccttgttcctggtggtctcatttgttttacaagctagggtacctggaacagaggtggtcaagtaactctgtgtgggacttcgatcctcctttaagggaaggacctacatggagatgtgattaatgaatatacctcccttacctttcttggctgaaagaatagcagctgttactttattctctttcaaaggataagggccaatatgcagaggtgagtgaggcctctcatttgatgattgaatctccttctgtgctttttgggaaaaaatgccttgatggttgtcttcagctatttagaattagaaagtatgaagaaaatgttttcatattggtttttactttaaacattttttaaaaacctatgaactttattttctagagtcgacagccctgtagccgtgggtattgggataactttccctatccctctccctatggtgtgagaagggacattaaacctcatcctttgtttgccactttggtttccagtgctctgccttgaccacttagcactctctccgaatagctgtaggtcgagaatagtgggcaggagcatcagagaagagttggcgtgagaacggaacagcaccacaaaatagaaggcgagagggaaaaaagcatctcggaggaagaaaatactgccgcctggtactccctggtacccagagatatccggcgtattgtgcttacactactcgccggttccacagggagagagccggaagaattgcaggctttggtggtgacaagttcaggcactcatgggaaagagagtgggcccctttctgagagaaatcattttgagcacagccaagccaagatattttgagatgtgattcagacctgagaatgaaactgcggggggatgggatacttcggttgggaacagattagcccatttttaacatagttgaaatgttgaagtggtgccatcctaacaaatgaatacttagccccgggtttcgagaaagtggccaaggataaaagaggctaagtgcatggcatcaaagccaaagctggcctccttatctgtgggagctgcagttggttttctcagaggcagaaagtacactgaacctagttacataagacccgagttcaagttcccactccattccacttggtgttaagtcctttaaactgttacttaactgctttataatctgcattataggttgttaaaaataagaacatatgaaatactaagggcttataatgaaaattataagtgatacgattcaaatacgaatgaaattataaattgaaggtcatggcttcaatttccacttaagctaattacctttgtattaagatttttgagcaaacccaaccagttatctggcaatcgtagacaccattttaatcagtactttaccttctaaatatgcaaatatttagagttcacacaaactctaaatatgttcatgtgaacagggccactacctgaatattaaaccaccattagaatctgatactcgtcattgaaatacagcataaccttttaatacatttgtggaaacaccattttaaattgtt

SEQ ID NO: 49 - DNA, 2066 bp, Homo Sapiens
  AK091057
gtactccttggttcatgccagtgttcctgcacccagcactgaagctgaacattgacagtgatttgcccctgccccagagtcctccctgcattcccctcgagggcccccgtctcctggccctggtgtccacttttctctcagctgctgggaacgtgttagtgtgcactgttctcctttccctcacctgctggcttcatgttagcatgcaccgttctgctcactttcttcccctcacctgccgggatcatcttagcatgcaccattctgctcactttcttcctctcacctgccaggatcatgtaagcgtgcaccgttctccacactttcttcctctcacctgccgggatcacgttagcatgcaccattctgcacacttccttcccctcatctgccagggtcatcttagcatgcaccattctgctcacttcaccttcttcttctcgcctgctgggatcatgttagtgtgcactgttctgcacactttcttcctctcccctgctgggatcatgttagtgtgcaccgttctgcacactttcttcctctcacctgctgggatcatcttagcatgcaccattctgctcactttcttcctgtcacctgctgggatcatgttggcgtgcaccattctgcacactttcttcctctcgcctgctgggatcatgttagcgtgcacagttctgcatacttgcttcccctcacctgccaggaacaggttagtgttccccattctgcacactttcttcctctcacctgccgggatcatgttagcgtacaccattctgcacactttcttcctctgtgtacgtgtgtgtggttttcctttcagaaatgggtcatactctgtggacatctttttccacttaaagtgatggcacagccattttcccagtcaagtaacatgaatgtacaagtttagcaaacttcctcctgagagatggagagatcaaggcttctgctccgtggcagccatccgtgcacatgcatcactgtgcgtgagttggtcccagtggcttgctgagacatgctctgcacaggggagatttcttataccagcagtgtgggaggcagtggggcaggtagagccacaagtggggatgagggagcagagtctagggcaggctcctggatggacaccagctacactgtctattggatgtgggacttccctcactgatgaaatgaataagagaatcttcctcatcctgctgttgttggcgttaaaacgggttaatgcatgaaagcaacaaagcccggcctgcagacagcacctggtaagtctcctcttcccagcatgttcaacaggaagccctcattccctctagaatgtaggagtcttgccagcagtggcctgtttgttctctgcctgttgccgacctgatgagaacataaaattggtgtcttctgtatagatttccttcttattgcccctactgtggctgaacataccttcccccgtgcttgaagtctgttcatatatgttctgctgtgataactgcccattcttgttctctatctaagaaggcatttagttttgaaaatattttgttggcttgtaagatatttgtacatattaagcacagcaaacctgtaacatattcactgtaaatcattattcctcatgcatcatttgccatttaactgtatttttttccttcttgatgtaacctgctatagtttacatttttaaatcagaaatgcctgcacattttaaaacgaagactcttatgctctagcctttgaggtcatgcttggaaagtcctttctcacacaaagattatttacactttcatctctttttctctgagtacgtttcagtgtttaattgaccaggaatgtatttcgaggtgtgatatgagacaaggatctgaaatgcttcgcccactgaatcatcatgcactgaccgaaatgccacctgtatgagtgctaaaatcattgtcgctggacctgtgtctgcactgtttaattttagtgttgtttctcacatcagcttctgttgttttcatggttgtggttctcatacttttaatatctgttggagcaaataaagcctcgtttctcatcttttc

SEQ ID NO: 50 - DNA, 2341 bp, Homo Sapiens
  AK091091
aaaaatccattcttttctccttctctccctccaacagtggccaggggaaggggaagtgagggcaggggcaaaaagatttgggaatgggagtaaagggcaagagggcggacacatgaagtttagtttctaacccatcatcaccctaactcaaccttttctgagccaaatggcttgaattgaagccagttgtcatggaaatagtaagaggttagggtttaagagctggggatgcgggggtgggagagagaaccctcaacatccaggatctatataatgagagctactttaaaccctcaggtccaccctcatgatgctgagttatttagccagagggtgcagcctgcttatgcccaaattccctcagccaagagagagaccaaagagcctctggaatggccctgctcccagcctctatcttcaggtcaattagagagagtatagagaccccagagtcccctgggtctggaaagcgttaggagaggtcaagaaaggagcagtaaggaggctgaaggttacagggcatttgaatccaaatcactgctctgggctagggaatagagccagcagaccaaggtgggaaggattctggaagggggacattttagtctcctaaccccaaagctcagggtggaagaggggagaacaaggaagcagagtgtataattattttttccttttatttttggaatctaacagtacctggcagcagggaggggaaagtacagtggggaaaagcatctgacaaggccagttagaacagaggatgggaaggatggagactcccgggcttggaaggctaggaagcaggcagagactggttgccatttcaagtcactagctaggcccattcattcctcccacaaccctgacccattctcctctggactcactgtgcctcagtttcttcccctcaatggaatgagaaatgacagcacccgccacagccaagagatgaattctgagcacttaccacgggcactttatggacataaaatacctctcgctgtgggacagataaccagggcaccagagtagtggtgaagagatgtgaggcttaagaggagtcacaggcttcagagtacaagttcccctctgcctcccagctggacagtgcctagaagccaaggagttgagaatctcctgatccacaccctatccttacttcaccaccaggcctcttggctccaggcaagagcttagaggatgtcaggagaggtgggggtaagaatcttcagcaaaactgtcactctaagtagagccagcagttacgggtctgataaaaacagtactgaactaaagtaaagcccaagctggtgagcaaaactggatggctcattcttcccaagagcatgactctcccccttggccagttggtggaaggggcaaaggtatgtgaccacccttgagaaggtgatgttggtgagctttaacatcttattcctattcttatagtgagaaagtgaaacaagatctttcagtagaggaatgggcagggctgttaggctcttcagcttgccttcacccatatagcagctatgctaaccccaagcctctctggccctgttcttcatccttccttctgccccaatcctgaaggacaagacacacccggccatcaacaccactcacatttccttggtggaaggaaaggaacagagaagtgaagaacagatacctccctccaaggtcaaatgcctcgtgatcttggcagagtagggattgggcaataagcatcaggtatcttccctctacagattctagagagctggggcattaaatatgggggacacttagaatacagctccttaaataccaccaaataaagacctttgtgtgtgtgtggtgggtggggggggggcaggggtctttctcttatgaacataaatctgtgagctgaagtctcattcccctgttcctccctacccccaaagaggcacagagtgaagggacttggggggcacagctcagcaacccagtgggagttagcaccccctcccaccttatgatgtgtgtggacctggccagtgcccctctgaacatatcattattagtgtaattatcatttattttgtgtatttgtcacattgtgtgcatgacagcctttgttaagggtgtctgaggagtatggagctgacaggggcattggaatgccaggaaagaacttcttcaactgagatcaaggcttcctggagggaaccactgcaaaaaggccatcaggcagttttcaagttatgtgacagagggcaaagacggccatagggtgctctgagttttgggatggtcacatgacacaatccagcacttgaacctgaaaaaaaaaataaaagcggtcaaagagttt

SEQ ID NO: 51 - DNA, 2714 bp, Homo Sapiens
  AK091251
gctgggttggagccctgcgagctgggacggccggcgtgtgtccttccgtcttcgctgccgacggtgggggttgggagcgatttttcgtctttaggttggattcggaacgcggacgtctggatgcttgtgtatctctgtccctcatattgctgtgatgccttacaggtcagttatcctctccgagcacagtttcctcctccgtaaaatgggaacaataataattcccttcttacaagacttgtgcagctcaaaaagaccatgtatgtgaagctctagtaaatttggggtgctatggaaattttaaaaatatgagttttgcacagattcggctacagtccaaaaagagttataattgctttttgcaccttctttcatttcgtagtttctctaattctcagtgcacgaaaattatttccctacgtccacaaactgattttcctcacctccattgccatcatttctcctgctttccagtctgaacagcacattaccgtttacagggcattttcacattcatggcccctttgtcctcattgttttaactaggtacgatgtggttttttttcagcgaagcaaatagtcgtaggctgagttgccgaaagaacacagctgcagtctaggcgagtgctgggtataaaaacctggctataaatgccatccctatgctcctgaatcctgcatcttatcaccagcccagacttccctgaactccagactcctttacctaactgcctatttggcatatccacttagatgtgtaagcatctcaaacttaacacgggaaaaaacaacttctccagagtcccccacccactttctatccatctcagcaaatggtaatttcagcctgccatgcctagaccaaaaaccttggagtcatcctcaattcttcttcctctctcactctacaatctatttgtcctatcagctcaacattcaaaatatattcagaatccaaacattcgtcacaacttcagtgcttccattcaggttcatactgacatcatctctaaatgataaggctttctgttggctctctgacctccactcctacctactgctttcccctggtaaacctggttccagcctcactgtcctcattgttagtgtttctgtgcagggatttcttcccagcatttctcagggaatttatgtggctttccaaatctcaaaagaaaaaaagttgcaaactgaagaaaatgggagaaagtatcctaatcctcctatgagaattaaaacttagcagccgacctagagatgttactgaagaaattcaccaatgtcaagttgaaaaccagcacaggaaatgctgagttcgaggttgaggtgaacattttcaggaaccaggtcaggagcacttgggagagacatggccacaatctcatcagtcagtcttgtttgtagttggtgccatgaaagcctatgttcctggccctgtgtgccgctggcagtgagtcattcttgcaaataaaatataaataggttgatactcattgtatactttatacaaattctatgagcagtgttcaaaaaagtaacgggttttggattcaaagtaaatccttaaattgacagtttccaacccatgattctgggtagtacagttaaccctgctaggagatctattatttgaatactcctcaataatgttctctgtgttttccagcatttgaatatttgctataaaccccacttcttgtaaacacttctaaatttaatagttctcattttttaaacaaaggcttcagatacttgtaataatgagtaaagaatatgaagaaggtagagaatattttaagaataagattttgagaacagctggtaattctgatttcctgtttctgcatcccaaagatcagtatctgtcaggaatttggaaacacttgttgttcctccagtccaaatacacacacacacacaccagcctgaaatacagtttcccagctatccacctggtttgctcctctctttcctcaggcgtccgcttcctcaggagggcctttcccaaccaccctgtataaaataattatccccatctccacactccctaccctctgtcccctcaaccctgctttatttttttatgaagaagagagatgacattatttggattttgatattaaacagctaggttatcttaggtaaatacataagcttttgtgggccacagtttcttcatttgaaaaatgaagttggactagttttgcagtgcttaactgcacagagcattagaatcacctggggagacttcataaactacacaaccaggggtgtacctgagatcaaatgaatctaggccttctcaactttaatgtgcagacaaatcaccgaggaatcttgttaaaaatgctgattcaaaaaaaaaaatgttgattcagtatcaggtgagacctgagactaacaggctcctagatgatgccaatgctccccgtccaccgaccgctgtttacctagcggcaagacgagatcattgccaagtgcctgcacggttctcatacaccataaacgaaggccattctttccagtttttaatttggtgactaatagtgtccactaagaaaacaataccttcccaatttctcggggggggaaggggctgaactaagaaaaagcggacctatgattactgctgttttcatttttttaactgttgtttttaaaatgcaacataagatgcatataaagcaagtgaaaataaaattcgggttccacgt

SEQ ID NO: 52 - DNA, 2258 bp, Homo Sapiens
  AK091337
gttacacatttgggccaaacagctttcagcaagggcatgtgtccacagctgatgggcagttaagaaccagcctgagctgaaggctagtaataccgtgctgtaggctctttaaaaggaaagcctggcataaacccagcatggaaaggaacattatcagttatctcaaattttgtctgccagggacaagaccctgttcattcttttgcccttttcagaactgtgagcttcaagtattcttgcttctctgtaaagggaagacatctcccttctctgatatccttcaacaaaagaaaaggctcttggcagggtaggggagtcagtagctcaacactagatcatccctagagatggggcaagtttctgtctgaacacgtcttgggtccgagtccttaggtgttcggatgcagtactttgtgaatacttaagctactgcatgcttggtgtagcttgcaatttctctgtatttaaaagcagctgtgtttattttcttcaaaataacctgtatattatttagagcaagcaatgtaaatattactgagaagttactgcagggatttttgtgacagagtttgtatgggtttttaaaaaaatcttagacacccctttttaagatggggagaacagggttgactgcaccgttgaagcccgcccagcattataaggaaatgtttttaatgactgctgcatctttgtaaaacgtttggtcatctaacagatggttttaaagtgtacaatatccaaaataacgatagccctgtatccatacattgtttcattgaaagaattctctattgcctcttcttggtagagccagagtccttaaggaaaatcaggaaaatgaagaaaatgatggtgccatcttgaccagacttctgcacagtaatttaacgctatcctagggagacttggttgaaggcacagttctgggatcagggtctaaatgtgcagtttctgagaaccttcaagaccactcactgggcagggctctgtggagcactggagctgtttggattccccagccctttggtcatatcctggaattccgtggaggctgcagaacttagatgcagctgttttttacagcacctatttttgtcagattggtaaggaaacactgagtcacagaatacttaagaattggagactccagtaatgtaggatggcctgagaggacgtccaagtcccaaggggtggacacggcatgttcctcgggcacagcctcagtgggggccttccccaggcgcagctcggccacctgaggaaagggtgtttcggaggcgcagccacacacacagcgctggcagcctcacggtcacgcccatcactccctgccccccactgcccttgagaagttagtggtgtcacatccttagttttatagacggctaggaatagattgtgaagaacactcagttcactactgtgttacatttatatcacaagcttcaattaaaatggattttaaaggattttaggatttacctttagtattaacaacgtatctactgacatactgttaggattcaaaaccagttaagtataagaattacttcatgtggttttcctagggtacaatttataaaaggtagaaagcatccaagtggctcctcaacaattacaattcttaatgatttttctcacagctgtgcccttctgtcagggtcagtgtcaaaattcgttatcaaaggcaaaacctactgtgccaagctggggcgctatatgtgaacggagtggaaatgcttcagtcacctctgccgcagcttgtgattccagcagttctcacaaaccttctgtcacatgatgaaaagaagcagcttgtataattccaactggtgtttcatttctgttctaatgctaagtggtaacgcttaacaaacagactaaaagctgtgtgcagaagaaagggctgaatgagtaccgcctccctaggttccagcacagcgctcgggtctaagaagtagagccccggggtagggtgggccatccactgtcaggccagtgtctcaagaaagcctgaccagctgagctgctgctttttttttgggggggggggggggaggggcgtcttgaggctttttttttttttacaaagttagtttgtgatcaacgattcactacaattgaagtgttactttgtcagaatatttattcctttgtgtgacatgctagattccctggatgtagctgatcatttttattttgtaaatattacctaactttacataaactatatcataataaactatttttgcatcacc

SEQ ID NO: 53 - DNA, 2084 bp, Homo Sapiens
  AK091747
gcagataactcttaaattttcctgtgaaggagagcaaagaaatagagggatataataggagggatatgtgtgggattaagagaaggatatgaggttttgtttattttaggttttcattgataggaaataatagagcaataagaatgctggtggcaaatgacctattagaaaggaggtacttgatagtagggtcagcaatgtggcagaataggaaactcctgactctccctccacccatgaatgcaccaaataaatatctattcatggatcagttctctctcagagaaagtcagagactagttgaaagattcctacccatggggcaactgaggaaacatcctcatcgaatgggtaggaaaaactgaagcacgctagggccagaccccaccctgggcattgtgccataaaattgggaagggaagccccagcatccaacttctccccatggagaggagggttttaaccccacatatagcatcctaacttaagattcttcatggtctggctcttaattcaccaactctgggagcagaggggattagacatacgcaagtctttctagaccacaggaaaaaagccgcagttagatatgggcatttaagcacttcagagctttcatcccccaggagcaatacatagaagggacttaagaaatgaagctccctgtttgcccccagaaggagtttatgacacactattccagcagcttcttgtttgtttggcttctaactaacttacattgggggagtttaggggcagtcaaatattaacctgccaccagcctgggaagagtttgtccacacattgagtccctcagctttcacagcttccaccgagggtctacatcctaaaactctcagctctgggagaagaagggattggcctatgcagatctctagacctctgcaggaaaaaagcagcagatttatacgggtgcagaagcacatcgctggactttattccccaggagaagtgcagagaaggggcttaaaatgtagccccctgtttttccccagaagggatttatgacatactcttctggtgactacttgccagcctggcttccaactaacttgcattgaggaattaaaggggtagacaaatattaacctgacaccaccctgataggcgtatgtccacacaacgagtgtcccaacttttacagctgtctcccaaaggattatatcctaaacatcttagctctgggagccaaggggactaggcatagatgagtttttctagatcacagaacaatgggggtggctttaaataggtatacaaataccttcagaggttatacctcctctgagcagtgagcagtgcagaaaggaagtaggaacatgtaggtcccatttgttctccagaaggggcttatagcacacacttccagcagctacttggcagcctggcttctaatgaacttacattcgggagctgatgggaaaacaaacagtagccctctagctaatctcagtgataaatccaaggctactcattcttcctggaaggagtttcgtcatgtctcaagtgccacaacttctataacttccacccaagggacaagctttgggagtcagtggagctttgcattcatgagtagccttagaccacagcaaacaaaaaggtggacgtacagtaggaccacttctacgagcttctcctcaggatcagagggtgcaacctgaatttgagtacaggtttttgccacagatcttctccttagcttagagcagacagagagtgggacataaatgctcaggctcagctgtgaagatagaaggaaatggaaaacccattcagcacctcaacatctccagctacatctagagattctggctcctactctacggtattgtgggggtattgatggaatgtggtacatcctaagctctaggggaccatcaaaaaagagacagcagtctgaataaacacagagattagagagcaccttaaaatttttggctggatggattggtgagatccttctcctacatgaggccagtctgacaagtctgggagaggttatattcttatgtaatgcatagaagctaacacaaaaatcaaagaacagagaatctattccc

SEQ ID NO: 54 - DNA, 2438 bp, Homo Sapiens
  AK091904
atgtttgtttcacattcagtcctaaagccttgagctatgtgtacttccctcacacaggaacaccagctgtcctgtctgtgctctgcctgcgcccaaaactcaatattttctctcagcacagaagtcaaaaatgagatatgccccttataaaaccccttcgattcctgagaaaacataataaagccatatgttgcttccttgttggggctcctccacaatgctcccaacacctgtgacccctaggaagacagggagcaaggtggatctggccaggagtcacaggatatacacccattctggagctttcctctgttgttctagaagatgttatttgattagttggggctgggagcaggggatatatgattttgtggaaaaggtatcagataatcaaatcaggtctgcctctgctatagccagtgtgctgctgcattaaaagggaacaaaaggaaggtgcaacgtaagagcagacacaacctgagatgcccttgagatttaggagaacaggagggcgccctttctgttgtgacctgactcttaaaagaaatcttctaaaagaattctttaatttggtaatgagttgaagtccagggtaatggaagctctagggcagagaacaaaagaattgcaaaatgtattcagcaccaaacaatgctaaaccaagaaacatccaatcacaaaactaggaagtttggcaagaagtggttagagaaatctctgggcttttccatgggcagggtcgacagactctcttttcagtgatttctggctctgagaaacctctttactcactagaaaagagctttatttaaatggccaattttgttcctcagaaaaagaaattaaaaaaaaagaaaaataggatactgaagacagaaccatgtgacttggtgacaaacaaaaggaggggtgcactagaatttcaataggctccctaattccatagaaaaagcaaagcaacccaatgcctcctgagcctgcagtgcatgaagagagtgcttgagctgacccagccaccaggccttctggggctagacataacttcccactggaacagcagcagcctctttcccctctttgtgttttcatgaagaaaacggctgttctcttaggtagccaggaaatagattacatggggcaaactttcaaaagcaatctctaccctggtgctcaggctacatacagaggcagaaaaggggcacggaagagcccttgctcttgagagagagtattttcatattcccaagggctttccgtgtagagttgctatttctgatatcacttaaacctttacaagaaaaaaggctgtggtgactcagtgttcctataaattcagaatgtggaaactactaatccaaagcatcatttctagcactgagtatcaagacgatcagcctgaccaaaatattgcaaagagttttctaagtctctgaagattttttttctccttgaacactgagtctatagcagtcagcaatgtaccttagccgatccctgggaatggttatggaacagtagggcttgtttccatcctttttagagtgaagagatagaaaattagggctacctagtgtgggttctttttcagaactatgtattttctcctcactgcatgatgggtaaaaatgccctgggttgaaacaagaaacattatctttccacaccactgactaaaacacctgccagtggtttctttaggctccaccttttgctccgtaaactgtagactttcagactgaaatctaatcttaagtgacctcaattaaggtattttcacaaaaggctacttatagtgtagcattattgccttaaatcagaaagccctgggaagaggataaaagatatagaaatgagaaggctctgaagttataggcatttcttgctgtttaatagttacattatcacaaaaacaagccctattcatgattgaggactatggaaatagtgacttcttgaggaggcaccaaactttcctagaactgggtactctcagatagtggctgctatttcctattctatttcagtgacgtaggttggggctgaatgtaaaatagacatcatattactaaatagaatcctataaaatgcaatcacaggtgcccgggagtactagttttaaacatttccttaacaaggagaacaatccagcaaaaagctttctttctctatacagtgtatatctctaaactttttttcctcagttttagagaacatctgttttatctggtggttctttgtttgaatgcaaactcataactttcaagtctccggtgcaagagcataatctacagatcatgggcaaaatctagccacagtcctgagagtccaggcttctgggatgcccagctgggtataaaagtccctactaaccctgtttcaaattcagaggtttctttggtttagaatgcctcaatgagattttgatacatccaagagag

SEQ ID NO: 55 - DNA, 1982 bp, Homo Sapiens
  AK092218
aaacagctttcattaacggcatgtaggcacaggtccctttcccaaaagtggattgttagtagtagttcattcaacctttgttaaggggtagctttccagaatgtgacattgtcctcagaaagatagacataggcttaaacataatggacatcctaaataggaattttcagattgtttttgaagtgaaaagtgttttaatgtctttaaatggaattgcataactaatggtatttaagtattttacatgttgctaataactttgaatatgatcgttgcaattttatggaacctgggtctatgggactgctttttaagcagtttaaaaaaggttttcaaagtttaaaagccaatcttagcatgtataatccttatgggattcttaagttttatcctatcttgtttttgctcaagaacgctttatcagtgacgtttgttagaattttgttttttgttttttttttttaaattgtttttgggctagaaatgagtttctctagttttatttgttctccctgagttggagttatgcaatgaatggcatttttgtggtaaaatactaatcctaaaatctgttaactcactgttcatttaagtagggaatatctgtatacattaatgactaggtaaaacaggaaatacattttgaatatacagcctaaaggcaggcagttacagggtttttgatttctccgattttatagggtgcaagttcccagtggcaggatgccctgctgtgtgactgactacactgtgtcctgagcagtggtaatttcaatcacctctcatcagtttggccagccctacaaccaccattcctagccctgtgttgcttgacaggatacctgtgcttgaatggacataaggaaaagtccttactttctccccaatttacctctcaatcttagttcttccagaacacacttccctttcacaatgcaaataaactgaaagtgagatttgatacatggaattttgagaccaaccaactaaccttacacataatttgagggattcctggattcttctagtgatactgaaaagcacacttgactaaagcatagtgttttttgtttgttatggaaatacggtatacgttcatttaaaaataaatggacatacaaattgcatctccttaggagatacattttatatacatttcggtgcgtttttttccagtatggatttctatttgtttctctcttcctcttgttttttctgtgtcactcttgtatgtcctcatatctttcatacctcttgtgtagtctctagaagcagaacacctaagtcctgggtctggataatgaaaccctcagtctctggggcctctgaaaataaggaagcattggagctattgccatgttgagtaatgggcttcctagaactattgtcatctatcctgccagtgttttatgttgtagctgtttttctttgacaggtgagttccagctatgttgttagtcatgatcctgccattattttctgtgttctgtaggatgtctccaggctacttaaacatattttatgagtttgcaataaaattgttgaatcttgtatgatcaagtcactcctctgctcagaaatccacagtgacttcttagtaagcccctacattatatgcatacttgtttttttcttaactttactcccacttctacctaacagagacctcaacttaagtctcttcagttcttcaaggcctggccttgttcctgattcctcaaaaaatcttgactctaaggcctattttattgtctgtctctgaatccctataaagcttcaagtctgtatgacattcttaacgccaaattatatattgtcttgtactgttcctagctggtacatgtatattagtcttgtctccctcatgagaatgtaagctccttaagggcagggaccatgtcttaatttttgtatccaccacagtgcctagcacagtgcttggcacatgggtgctgaataaatacctttgtttattgatcagc

SEQ ID NO: 56 - DNA, 2117 bp, Homo Sapiens
  AK092751
gcgactgcctgtgtgcctccattggcatctctgcctgtgggccccaggccagaagtaatggcccatgtagcccaggcccgggggccagtcctcagcattttgcggaggggcggcctgggaggggaggaggggatccctggatagggggtctcccctggtctgccccagctgtgccgacagcacctccaccttgggcctccatcctctaccagcagagaagagagtggcccattcggtgtccacccgtcaggccacccagcagccaggcacgctcataagcccgcgttacggatggtgcggccgggtgcacaggcccgagggaagcacaggcctcggcctcccagctcccaacccctgcaccacccacagccgggagtaccccatggacagctgtggccgaggagaagccagggatgagggggatgggcctcacctccccaccagcctgggaagggggtaggcccctggcaagtaggtgagaagctttttcattcacaagttgtccgggctccccattcctctttgtcaggccagcgggtgtgggcagtcgggggaggctggggtcctgacacaacaggagtacatctgctggcctagggcctggagaccttctcctacaggtcgggaggcagccctgggcagcgggcattgcggggactaaagagaaacaagagcaggttgtgtgcagggcaccccagccactccagaaacccaatgggagggtgggggctaggaccccaagaagctgaattggggtgcagtgccgccaggcctcccctgtaggagtcactttgggcttcctgtcccaacttgtggtgggagctggggcaaggttccaggggtaccccgaatgaatggggctgttcccaagctggccagggagcctggaagcagatgagatggggccgcagagcctggtttgcggaggggagaggcagacgtgccctgcagccctctcttcttcagaggccccctgcgggtgctgaggggagagtggcttaggcgttgcaccccaggagactgaactgggtcagttcccccttgtttgctgccagagaaatgggggtaccattgtcagggtgagctaaggaggccctgctgacattggcccaaccaggcccctcctttgcggctgctgtggggactttcgagagcagagcacacccctaagtgcatggagaggtaagcacagctggtgagcacacggggacagcgacggagctcatggagacccaggtgaccttaaaacaccccagggccggctccggccccagagagatgtggtccgagtagaggggggtcagcagtgacctggtgggtgggtgtatttgaggggtgcctgtgttgaaagctctgcagtagattctaaggagcagccagggctgagactcccggtgctgagcccaaggcccctttccttcctgcaggagttcatcttggctcttgcagcccccatgaccctgtggcgctggggggcggctagcatgatgctccccatttttcaggagggaagctgaggctcagagacatcatgaggatgccagctcaaggcccagccaggccttggtcctcagctgctgtcatccagtagggtaagtgggacccccaggaggtgttgggggacactcctcccctcccccacactcacagtctgttcaccgcccaaggcagcaggctggactcggtgcagggaccatggcttggcgtggccaggttggagtggcccctgggactgaaagcagggggcgtgggggctctgaggcggggctgagtgcggggacgtcctgtggcgggtaccctgctgggtcctgggtgggggccaccaccaggcagctgtgggaacattccagaccacctaggagtagggccccttcaccgtttgaagctgactgtaaaaaacatctgacctgcgtgcaaagctcaagcccagaggcctccagggtgtccagcctccggggtgcctcctacgcagcctccacgtccccatccactgcagcccctgaccatcgggcacaccgtggggccttcgctggccgccgggcctcaggttctgctgcaccaagtgatttttaaagccccatctgcctttctccacttataaagaacttgggacattt

SEQ ID NO: 57 - DNA, 827 bp, Homo Sapiens
  AK093356
ccctgaatgcttatgccggtggttggtagaggaaatggaattccccagactgtacctcttgacttgctactggtacctggaagagatgtaacacctgaccatgggacatcaagtgactgtgtgaatcaaactgcccatcatgaattgttgttatttgactcatcaaactgtacaactggatgaacacaggagcagtgcactacatatgggactggaaccatgaatgagcaggtgactcagactcctatagtacctgcctctactccttcagcacttctccctcaacccacataaactgtcatcataatgagttccctctgaccagttaatggaagagaaaaaagtatggatgttatggatatcctaacatatttctggccattggacccctagaaacctgtggcaagtcctggaagtttttcaaggttcatcttgcaccttctagcatgcatatgtcgtaccaaagcatgtagaatgctgcctacttctgctcttcagtttcatttaatataatttcattactctgataaatcagtgtgatgttctatggaataacaaaagaccatcaaggtcccttcataccatatagagaacaggagagttgatgtagcctgagacaagacagtaaggacttactgttatccctcctatttaaacgtagtctgtttctgattctccttagaatgggggtggggggacatttccagatcaatatcagatcagtatcatgtcaacatgggtattaatttcttccgaagaagataccacacctagaacagcaaccataattggcatccctacctaattaaagtttgcagtccactgtc

SEQ ID NO: 58 - DNA, 1566 bp, Homo Sapiens
  AK094521
ttcaagggactctcagatcatcaaacccacccagaatctgctcaattttcaagatttgcttataaatatttataatataaacactcaattgctatctgttttttaggttctcctctctctcccagaacagtggtaacaggaactcttgggggcttctccctgttcttgcagatgtggcaggatgtgttcctggggggctcccatgccagtccacaccctctgtggtgtaagcagggattggtaattaatgagatgctaaaccctccagaagtgagcgctcatgtcccagaaacacatcttccacctcagcagccagtgggaaaactagactttgtgtctgcatatttgttcttaaacacactcttccgcagtctaactctgctgaccactttccagtttgctcatatcagaatttcttcggttctaagatgcatattttctttttgtattctgacttgttagaaattagaatatgtcttgcagtcaataaaatctatgacaacatttttttttcttaatggttcctaaaactcctgtagttgatggtgtcttgcttaggtttaatgaaagagattttaatatatggcgtggttatgtggagttgtatctctatcagtattaatgggctcgggatgatttatattcaactgaacccccaaattcaacattttgtgttgaatatttattttatcagttattctttatcctgtactcattttggatacttactaaagtattgtatgtatttgttataataaaatggcttgccgtgtttgaacacactgtgtatctgacaatgttctaagacctaatttgatcttcatgacaactgcataaaatagttactattattctcaattcacaaatgagaaagtgagacacagagatgctaaggaattgcccaaagtcacacagctactgagtggcagagccagggtctgggcccagccagtgtggctccaggtgccgcccactcttgacgtgatacttaccgtcaatgctccttaccagttagggatgagctgattctcatatttttccaagatacattttaattttagctttatttgctgtatcatcatcatcagtatcatcatcatcatcagttttcttgttttaaaatagggtttggagtctcttcaaggctttctgttttggaaaagtaaaacttaaaaatctatagccatgtgaattatacttatggagaaaaagagtcttgttttattaacatcagacatctttgttcctactaattattttggagtaatgttcagtatcgggctaatgatcgatggatatcactcatccaattatgatgcatggattagaccacggccttaaactttgtacatagtgttgaataaattcatcttatttgcagtcttattgtcatctagctttgatacacttgccctttcatatgtctcttgtcactattctgtgtaagattataatcccaaataccactatatgtatttttcttcatattctattattgaacagtattaatgcttaatgttaatatataagtaatatatacattttaaaaattaaaaaaaaaaaaat

SEQ ID NO: 59 - DNA, 2363 bp, Homo Sapiens
  AK094744
cctattgcaaaataagttttacctagaagcacagtatttaaaacagaaagctaaaatactctggttaagtgggaagctccctgtcttcctcgctgctagtattatttctgaaaaacctcaaaggaactccttgctctctgaatagcaggttttaaaaaccactacttgcacatttgcaccttgacatcaaacatgtgaacaaagtaatagagtgagaaaactgaatttctatttaggaatttctattttattctctctataaaaagccaagaagtggttggtgtttggaataacatgaaaaatattccaagtatctttggaaatacttacactagaactataaggtttatgataattctatcttagattcattatctagagctggtctaaaaaaggatgatatgtaagaactaccaagagagacttggagtagatacaagaatgaaggaatgaatcaatgttcaataaatatccataggcccaggctttgctatgccctcttattacacaggataaaacagtgtagttgttagtttctacctttgaagattatgatccttaaaaaggaaacagctctgtgaacagagaccatgttattcataggtgttcctcacttgtttccaccacataataggtatttaatgaatgaaaaaattcacgtctctctttgatcctagactgcaagttacttaaaagaaatggaccgtattttacttatctctcatggcctgcaaattgagtttgcttactgaattaatgaatgaatgaccaattgtacacatatgtctgtaaaacgtttacatatccacattcccattagactgagattcttgagggcagaaaccatgtcttcagctctcagcatggtgcctgactcatggtaggttgtcaaaagcatttgcagaactgaataaaacttacgtttaagtagtactggagcagtctcacataaccgggcacagtgtcttctaaatagacactaaaattatttcataattaaagacagatctcactaagcattttctgagttagtgccagttgaataatatgacaataagctataggagttcagaggagagtgagttctgtggactgaaatagtcaaagtggattttcagagcagatgagacgcgatgaaggctggggctactttggtgttttaagaacattaattaggcagcaggaaaatctgaggacagggagactagtaaggaaggctggaaagagccctgggtttggagttcagagatctgtgttcagagtcctttgcttcttagtgactatgtgaccttgagaagataacttgagctccctttttcctcttctgtgaggtagaggtaagattgatgtgcatattgatattgtacttaaaagtgtttgtaaaatgctaagtaaaacctaatgctatgctttgaatgtagtgggttccaaatatttgtttaatgacaaagaataaatgatattgactaatgaaaataatggagccactggaatgtcacctcctgcatctgccagtaaacctgttaacacaggggtggcgggggggggaagtaaatatgtgaagccaccaaatctcatgatcaggagaaaaactttggaactcccatgagactccaaagttatgtcacaggtgaataagtcatgaacttttcatgctgatatcatttctaaggttgctgccttgtcagaagaagcaaaccacaagataaaccatgcagaaaatctttttttaaaaaagtttcctgaaggatggatggttcatttgttctgcttgtcactttacttactaatgagtcatttttttccttaaccagtaatttgttttaaatttggtcataagatggtatgttgactagtccaatgttacaaaataattggaaaaaagatgacagaccaccaactgaataagggaaatctggttcttgaacttccaatgtatgaattggtgatggtaagcttagtctttatgatgtaagattggatttattggaacttctttatgtccagaagttgcagcacctttctttgtctctggaatgcccaagatctctactgcatcctgtagacatggagggtttccccccttattctgggtctgattatttttaaagaaacaccctttccttacccatcatggagacactactaaccttgtatatacttttattagagtgctgataacaccatattacagcagcatacttacatatctgttttcttaactgtgagctccttgagagcagggactgtgtgtttttgcttttatttcaccagtactcagaactatccacagtatagaaaagcactcaataaatggaataaatgaaaatgaatagataaataaatgatttcacttgtataag

SEQ ID NO: 60 - DNA, 2314 bp, Homo Sapiens
  AK095147
ccaaaagcctttctaaacaaacagtagctggaaaatgctgaaaatgaataaatggaatccctgtccttaaagacatcccagcctggcagaaagatggataagtaaacaacagtggggtgcaggaactgatactgaccattgatgggcacaaagtattatgggaacacagacagcaggcactaacctgctttaggaatgcctgggatgatttactaagagaactgccgtgaaggatggcaacttggatcggcccagaagccttccctggtactcacccagggcctgatgtagatgtcactcggtggtcccagcagcttgtcacagctgacagcacactgcttattattggtttacttgttcacctttctccacaaaatggtaagctccttaaaagtagaaactttgtcattgtatctacagtgcctgctgatgcataagaactatctgacaagtaaatataaggagtctaggatgatgaaaatacttcttctctaagacgggctgatgtttaaagacagtattttatgtctgtaccatgatatgtttaaagaatgtgtattcgtgtttgaaatgccaataccaaatattagatgcaagcacagggtcgggaaccatgggagacaaacaagacacaatcactgctctccagaaacttacagtgtaaactggaggcttcacggtccccaccaggatctaaacaggcatatctttcatgtgtttttattttggagttccacaaaacactttttttgaatacagagctccatttcgttaaaaaaattgacaactctgatcaagtaaataagaaagctgcttataggtaatagagtttccccttcctttttaagattagaaggaaatttagatgaaaggaattgagaatttacatttttagatgatgtgttcatatttctttggatttcatcttagttttccctcaccagttgccttttagcacctttctaataggcaatctgtagcaatgtacagatgtttacaataatgaaagtgctcattctttcctatatactgcaatatcacgtatttgctactatccagaaaaaggttctacatatatcctttctaaagttactgtgaagtatcttcaagaactatacttcatgacggttattctaaggtgtttaattcaaaaccactacctaatttctctatagcatgtggaatttaacatcccattttcaaaatagaatggtttaaaattaattgacttaaggagctgcagacccacatacagtgaatcttctatgaggtttacaggaaaaatgagccaaaagacatataagtacagtattctttattataaacaatcagataacagtataagtgtgcatttgatggataaccgaagccaagttattataatagaaagcatgacttcactcaaatagacagtttctttgttgttgttaatctgttttacattaatttgaatttaacatatgctaggatcacctaaacttgtcatacagttctgctattaaaatcgtaacagggaaagacaaaatgtgaaatgcatgttatattttgctttatttgttgaatatatatgtgtgtgtgtgtgtatatatatatatatatatacacactaaatatttgggacacaaagttaagcaggtgcttacagtctatcaagtgatatttatgaaatgtttttgttgctgttttgttgctgttatgggaacatccatatccttagaagacaataaaaaagaggattctaaatgctagatggttggctaacttctcctgatttatattgagtgtaaaacaaaacaaaacaaaacataaggtatatgtgttaagtagtgacatctttatagttccaaagcactcgcagctattaaaatatcatctagctaaaacaaacttttcacaattttttaacagaaaaataataaaccaacaacaaaaactgatcaatgttctgggtcttgtgagcagaccgaaatgttactacagtgttctctattgtgtgatccttgtccgtggcaaccttaaacgtgtgctgcagtgctgatgtatttataggcttagcatgtctgctttattagttatcctggaaagaatgctattcagttttttttttaatgtctacatcaaggaatgaatgctaaatgagcccatttagcagcctgaaatcaaatactgcatttattttttgaaactcttggtagcaaaagaaaaagctgattaaaatatgattgtgttacaatgactaaagggttaacttctcattaattctaaattcttcaaaatgtacaagcatcataataaaggcttttgatgagacatg

SEQ ID NO: 61 - DNA, 3126 bp, Homo Sapiens
  AK095570
ccttcttggttctgtctctaagtgtatggtatgtggaaaggtatttcttttgtgtattgctgtggatttgttaaaccctctaatggtttttcagtggattcatttggatttcctaggtggaaaatcttactgcatgcaaataacaattttatattatcctttttattatttatatgtctgttttcatttcatggcttgttgtctagctagaaagtccagtgtacttgttggttgtagtagtgacaatggggaatcctttttctattattggttgttaatacaacaccactgttctggtgttttagtcaggattacacatgagtttgtcatagtcatgccaagttactgatatgcaagttagagcactcacagggaaagaacaggaccctgaaacttggaatgagaacacctgctcagattcggatgaaactggcaaatcactttaaagctcccttggcagcggaagtaccctgccctcctgtgtctgaggacaccgcacttcctttgcctgaagatcctgtgataacttcatctgggaggatgccttggaaagggttgctcgctcttcagacctggtacagtcacccctgtgataacttcatctgggagggtgccttggaaagggttgcttgctcttcagacctggtacagtcacccctgtgataacttcatctgggaggatgcctgggaaaggggtcactcttcagacctggtacagtcaccacccctgtgatgacttcatctgggaggatgcctgggaaagggttgctcgctcttcagacctggtacagtcaccacccctgtgataacttcatctgggagggtgccttggaaagggttgctcttcagacctggtacagtcaccacccctgtgataacttcatctgggagggtgccttggaaagggttgcttgctcttcagacctggtacagtcacccctgtgataacttcatctgggaggatgcctgggaaaggggtcactcttcagacgtggtacagtcacccctgtgataacttcatctgggagggtgccttggaaagggttgctcttcagacctggtacagtcacccctgtgataacttcatctgggaggatgcctgggaaaggggtcactcttcagacgtggtacagtcacccctgtgataacttcatctgggaggatgccttggaaagggttgctcttcagacctggtacagtcacccctgtgataacttcatctgggaggatgcctgggaaaggggtcactcttcagacctggtacattcacccctgtgataacttcatctgggagggtgccttggaaagggatcgctcttcagacctggtacagtcacccctgtgataacttcatctgggaggatgccttggaaagggctcactgttcagacctggtacagtcacccctgtgataacttcatctgggaggatgccttggaaagggttgctcgctcttcacacctggtacagtcaccacccctgtgataacttcatctgggaggatgcctgggaaagggttgctcttcagacctggtacagtcacccctgtgataacttcatctgggaggatgcctgggaaaggggtcactcttcagacgtggtacagtcacccctgtgataacttcatctgggagggtgccttggaaagggttgctcttcagacctggtacagtcacccctgtgataacttcatctgggaggatgccttggaaagggttgctcttcagacctggtacagtcacccctgtgataacttcatctgggaggatgccttggaaacggctcactcttcagacctggtacagtcacccctgttgtcgctggatccataactagggtcaaatcttagcatgttacagtgggacataaaactcagataactaactcagaaggaaatcacttacacaccaaaagaatggtaagattttgctaataaatattggaagaaacctgggaaacatgtcgagttgattctaagagtgttagatccaacagggtaggctatcacactccatttgtttaattcattgatatagatgcacttaccggagagtctggatttcatggtttagcttgagcagcaggaggtgactcaacatttgcctacatttgatgaggtggagatgtcagagcttccctgctatgatttgggggagagaatccaaagatgtagggagacaggaatgtcacagtggatttatcatgtttgacttacacgtctaccaccaagcacccattcctaaccatgagaaggcccagaagacacttctttactaagacattgagaaatagaatagtgaggggagcatctgcctctctaaaagctctgtgcttgctttcctacataggcaggtgtgaccctaaggatgttgtcattgagatgagcttcctggtatcagtggggtgatgggatcctgaagtgcctccggataattgggagcacttaattgtcagagataaggtgggcacatttaccacgaagggcggcagagatgtaatcagaatgcctttggccactgggattcttggcaatggctaatgaatgatggtatctctaggaacaaaattgttgggctgcctactcaagtataacagaaaaaaattctgggtctggtagccagaaacctgatttgaatcaccacagcagagagtcacggcctctcccctagctcttaggactgagtcagttcacagccccagggcccctttatgaactggggtgtgagggtgtggggggatttcccccaaagaatgaactctgcagccctgctgcaagtacctactgtaagtctccctctaggccctactcagaagacctgtgctatttacagagtgactgtgcactggggaaagcaaactacccaggccttctgagatgactgaagcattggctctgaattgatgttcatgcacggggacccaaagtgacagcgtggccactagtcaaaatgggagattaatggtggttaggtgacagataccttactaaaagttttttttgttgttttgttttgttttcctaatctggatgcgtactcaattagggaaaaaaaaaaagaaaaacagtttttttgtccattgagttattttttctcctttaatatgttaataaagtagaatacattg

SEQ ID NO: 62 - DNA, 2984 bp, Homo Sapiens
  AK095707
taaaaaattaaaaaaaaaggtctgctcagaaataggggaaacacgggatcaagatcattagagatttataggctgggatgcacaccatgtcttcagagctagccggctgtgtcttctgcccgtttctttcactggtgaataacctttcgtttgaaccagcattgattgttctctccatgttccactgtggctccccatggacactgctaggtggaatctctgagaaaacaggcacttcgcagtcggcgcatctttctctgccagcttagggattgccgtcaaggtggaggaagggtattttggccatgttcggagtcgttgtttttactcactcttcttgggatagctttcccaccctgccctctgctcctctgtcccaaccctcttccagcctggtttttttactgcttgaattatgtatccaaaataaaaaggaaaagaaaggtgcagttggggcgggttgttgggggcgaggagaatagcccttctggttcttcagaccacataatggccagagcatgagcctcacagatccctgagcagacctgcatactagcactttccacaaccagctggccctggctgtgagagtcagatctgtccccaaggctccaggtcagaacttggacccaggtgccttctgaggcaccgccaaggacacatcccagcgccttaggcacctgtaggctagaatgacaccttccaggccagccccagaggccctcagggctccccctccaagccgggagggcaggcaggcacaggccccgctcactacctcagcacccagtgcagccccaggctcccggacgtgctcggcccggtggcctcttgtgtgacaggccctctgccatgtctgtccgcagagccgggtggggagcctccgtgtgggtcctcctctgtccctttgcagctcgcattcgccagagcggagcgcagcccttgtttccttctttcctcttcagctctgacttaaaaacacactatgttccaaatcgttgtgggatcggaaactagaactgcttgtttccaggagagaccaccttttcatattttttttaaaaggaatttgtgcttcaaaagaaactccaaaaaataaatttattgttagtctagcatatgctcattgaaattgacttatgttttattttaaaaaatcatgtaggatctggtacatggggcgggcaaaagggtatcatcagcttaagaagtaaagaagtgagccttccatttgtgtgggtgataacatctttttcctagatcgtacctcaaaattcaggctctccatgaaaacaaagataatctgaataaaaattgtgtgttgggaaatgtatcaagtgaccttcagttaagaaaagcacaggctgtttattagcacaacttgcttcattaaataattcgtggctttttctgccactggggttcttttcgttttgaattcagcttgtgtttggttcctcggtcttgtaccccttcagttcgccggcgacgtaatggtgataccctttgttttttgtatcacaccttttgtgaattgtgacaaccatcccgtaatcattgtggcctcagcagaagttttgaacaatctttgcagccactgttggggtgtgtaccagcagcctggaagtgaccagcagagctgacaaaagcaccccctgctctgcccacctccgcagagtcctgtcctcatcagaaacggtatcgcggatgctcctcaggtaggcgtaggcagacttcattgtgtgttagcagtgacagtgatgtctgtacctatctgtgagtgagacccattcatgacacactagaaatgtgtacattcttttgttttccatcacgggtataggtcttctgccatgaaagagaactatcaaggaaattcctgaaaacaagatttgtaaattcgatttgaccctcccaaattcagggctgctctttgcagtggtccctggcccagcaggtggccggcgtggctcctgttggctcatgccagtgttgtgctggaccctcgagtatgtgactgtcacccttgtccaagactggtttttaacagtcttgatttgtcattttgatgctttgaatactataaggaaaatgccacgaataccatataaataccacaccaatctgttgaacatatctgtgttttctgacatgggacctgcagaatagtatttcttttaaatcctgcaactttattatctagtagaattccaagtaggtctgcttagacacatattcagtgaagattgtattgtgtgtgatattatcctatctttaataaagtcctactactgaaaaacagggatttgcaatgaaaatcatagctaaataggcaggtttagaaagttcaaaatattggaagtgctagaaggctgcaacttgtaaaattgtactccccaagttcagtaggatagtagagaagtcgtgctaagttgatttcattgaaatgtcacgtctcacatcctgtggtccaaaggtactagtttgttttgtggaataattttctgttcacttgctgataagaaatttagcagtcagaagtaatttttaattaataacctttctttttaaaagttgctttatggtttacaagtaatactgatgcaaaaaggatttgttaacctaaattaagtagcacgcactttgtttacatgcttcagtatattgtggggttggtcccttctcacgaacccaggacctgtgcttggggaacattttgccatcatgctgttctcttgtaccaaggatcagtgaaagtgttttatcttttttatgtagcttgtattgactgggttttataactgtaagaaaacagaaacagagtgttgtattttgatctgaaatttgtgtatgctaaagtaattttgttttatgtattggaagttcacttaaaaacttgaaatattttctagaagggtaccacacaaaaggaatcatctttaagctgtttaattaacctaataaaataatttgatggggaaggc

SEQ ID NO: 63 - DNA, 2950 bp, Homo Sapiens
  AK095855
ttataattttaagtcttacattcctagtaacatttgggcttttcttaggttatgtttcgtgaagatttggggggagggctcttttaaaacttcggcctcagttgtttaacagtctctttaatatattaatctgcactaacatctctgtgatatatgcacatattttagaggtaatcatgtcttctagattacttgtgtgcatttgattgggcttcttgtttagggtcccttttaaaattaattcattagattgaaaaatgtattctatatttctgatagactggacagaaggatctgtgtccccaagtgagacaggctctgaataacctttgttttctccactttttattgatgatttaaaacactctagtcttcccctcaaatcatgcatgcaaataggaggacagtggtggtgactcaactggatacaggtgctcaatagtcaggcttgatagtgatgtcaggacgcattacaagctgtaagccgatactgactggccattggcaccatccttgactaaccttcctctttttctctagtgtgcctatggtgaaatggcaatagcattcactgtcgtattttgcagtgctcaggaagtgggacgttaactttgaaggtgcttgtttgtattagctctgctaggtttacctctacaacgtagatttcagcagctatgctgactgacactacattctagttcttaagattttttttccagatccccccttccccagctagacatacgtagcatactttcatcttattcagtctttctgtaacctgctgctgcttttagtcctcctcacctcagatcggaatcaatggagtgggcccagaggatacattttaattccagtaatggtaggtagatttgtcctgctttctaaaacatctcctcatttcatatttccactccatattgattccataagggaaaattaatgggtgtttcctcctttagggaggtaatgcaaagagtgtggacatcttctaatcttgaggaacagtagttgatttcccttgaaggagcttacatattgactgttttcacaataacctgtttgccccagttcaatcctcattttaatacttaatttggtactggctcaaatagcattttcttacagataacaaatcaagagtgaaatttgaggttatactccagtaaagtttttaacacttgtgaatatggtcagctagactaaacttgactcttttttttaatggcttttttatctgtgaacattcagataagtggattttcaagtactggttggggatgggaatcgtgcttttctttaaacttcagtttacgagatgctttgagagcgttaggcaaaagcagaaataaatatcaggagcaacggggaaagctttgtaaaagatcatggtggccactgttgcagctttgaagaatgagtgctggcttgaacagttctttgcctgcatcattggtagctgcactgaaaggaaaaaactttcaccttaagaatttgaaaaggaagaaacctgggctctggtcttcatggcatttagactgagatgcttaaacagaacagaagtaatacgcatttcctgccataggatagggaaaatgtaacaagctggttgctcttgaggttagaaaattgtctgtttctctgtggatgaagctggatttacttgaaaatggagagttggcttattgtttgaatattgggacatcaagctatctatagccaagtttcagtcgcaaccagttttccctttgtctggggtaaattcgatacaaaatgattctttttgaatcctgaatccataaattacactttttttttttcaaattcacaaaattcacagtggtgctgactgtgtaataaccactattgggaaacatcccgtaaacctgcctgttgccatgccaatggagtgactgaactggtgacatctgtttgagcatgctttgtgtggctggtaggatgccaccgttgtgcatacactttgtacatcaggggtgaagggagggttttctagattattgggggagggtaaaattgggatttttttgttgttccttttttgatggggtgtgggggtatagtactcagcttatgccctaaaataacatgtataaaaacccctgaagtattgtgtgggtgtgtacgtgtgagtgtgtgtttgtatacgtctggcaattaaagctttgtcttctggaacttagtgaattcttttctctttttcctccagaagtatttgttacaagatttgtaaataagagctctacttagtttgtttaccatgaacatgttgcagcaaaccttatgcatctaattcctacaaggttaaagaaaggcttttagacttgccaggttaagcaacagccaagttctcagtaattgtttgccttgatttatcttttagacttcattttgccagctctaaaactcccagtcttccttgattttagtccttaatcttttatgttctgagcaggaagggtaaaagacaggaacctgcttcactgtattaactagtccatgggctgagaccggggcatctcttttcttcatactgcaatgttgctagatacatgatcagacaccagagggttgggcattcttgcaataccttaacagtgctgaaatctgcagcatggtactaaggaagttaaagtttgaatgtaaccactttatttaaaaggtttttttctttaatttaaatgaaatggggttgaagtgaacatgattttgttgaccatgttcgtgaattacagatgcaacatgcattggtagaatcgtgtgatggtcttttgtgatacttaatttttacatatcccagtctctgtatgtatctgcatagacaaagaaaaaacaaactcctgctttgcttttattgaagggtttccaggactgcgtgtctgctcctgagctctgttttaagtatgtgtatcctttgcttgtattttgtatt

SEQ ID NO: 64 - DNA, 3113 bp, Homo Sapiens
  AK096179
agacctgtactccgtactccgtacttcgtagtcgtagcggcgcggtcttcggcagtctagtcatccaccgccatcctgggccccacgtgttgcctgaccattcctgagcccaggtaggggtcctgggggattgggttcagtggcgggcggcgtgggaggctgggccgcagtgagtgggggcaccagtgattcttggagaccaagccttcactacacgtgctacttcctctcaagaggcggttgagcgcgttcggaacattttacccggaggagactcggggattacttgatgagtaacctcgtgcttctctttcagccgagaagtggggcttctgcatgacctgggtggaccccagtaggtgggatgggacgtgtggtcaggagggacctcaccggaaggcatggggtggcgtgtagacctgccgcaagagaggctgtagagtgggccaggcgttgcaaggagctagagctggataatggttcagaggcacaagctgaagctaactgcgtttggaggtaactgcatttgttcccttctaggtgggagccgtggctgaggtgacggtctcaaagtggaagagcttactgtcacagcaactcctttgcaagatgccccggtaaatcacgttgcagagaccccaactctgccttcctggaactaggcctgcgttttctctgaaccattatttcatggggaaaatgaaatctacttcatgtgcctggtctacttactccttcagaagtgatttctgagccgtaagatacatgagaaaaaaatgaaggggaaaaggcagtatttatattaactacatgatgataaggatgtttctggtcacagtgaaaagccatgctagaattgtagtgtcatagaataatgtggaagtttagttcgtgttgtctgatctatttaataatttaataaggttatctcttccaagacaccttcccttcttcctcagccagaaaggatctttccctgagagtcattagtagctctgggctcctggaaccaagctcaggtgcctaattgaactctggtctcttcccacagcccccagcagggactggtgcttagtgagagtggactgccagattccttgagtgtgggggatttgggtgaatgagggtagcaagcctccagcgtgcttgggtctgcggtgaccctatgcattccttcagtgcttgctagaacagttttgaaacggtttgaggccttgccctgctccatccagagcaaggttatagaaatttcagacaatgacttcctccctcctggatctagtgtcctgggccttgtatagatccgtgccatctaatgtggtagccacttggcacacatgattaaattaaatttggagttctatttcattttcacactagccacatttcagatgatcagtagccacaggtggccagtggctaccatattggaccgcacagattagagggcatttctgtcgctgtggaagttgttttggacaatgctggtgtgaaaggtgaagggaatcctgagtgtttgctgtgctccaggctcagtacaaattttattttattatacacttaaagcaaaagtcttataaaagttgaggatgaagccaagagtggtggtaagggtaggagttgaaacagtgaagaggaataacagggaagagtcctgccctgagagactcatggaataggatatttacaaggcaaagcaaagagaaccaaagtctcagttctgcagaggagctgagtgccccaggagctagtggagggtgaggtcaatgtgtgctcatcttaaaggaaaaactcatggaagaggaaggtgctaatgttgaacatctattttgcgccagacctcttaattgttttaaatctttgaggtatcatcatgaggtcgtttttaagttcagtacagatgaggggcccaaggtcagaattatgtgtccagggttgcccagccacaaaccagcagatcagggtttgatgccaggcctctctaaccctgcatcctgagtggaatatagaagccggtgggaagtttggatgggaaggagatggatgccttcaagttcttgtcttggtgttaggtgtgttaaaggactggctgggatgagaagagtgttgctggcttgagcatagcacgagcagcacagctcctgtgttcctctgggtggtggggtcacctctcttaaaggtagaggctttcagctgattctgtcttttcaggccaggaatagttgctgaacaccccaggcctgctgaggtccctccttgagtctcatgttcaagcagtcttgtgagtaaagcactggctaccccttttcacttactatcttttcaagcatgttctaccaccttggaaggtaagaggttagtaccttcttccagagcagagggcaggcattcttgctgtgcgttgtgaaagggtagagtcctgcgctcctttcttgtagtagtccaatggctcatgcaggtgcctctgactcccctatgggaactggggcttgggagggtggtggaagatgctgatgctctggctattgctattgttttgaataatcagtggtcccttgtccctaatcgaggaattttgtattttctaccagtgtccatgaaactgggaggcgaccgtgttagctgccagttcctgacagccacctctcaccagtggcttcactctgtgtccctgacccagcacatggcacaagagtgcctgccatccgtcagtgtttctacagcagcaatcccaagatgctggagctagaggggacctgacctgagagaagataccttcagtggctgccaggctgttccttggaacctgtgcagggatgaggcctgcctgtgttaatacacctagtgaggagtggagctgaatttgaatgcaagccttggcaccttaattgagcaagtttgaaacctcgcttgttgcccttctggaaggagtcaggaatttccagttctgggcctgggctgtgggtctggcagacagacctctggccctaggtttgggtgccaggttctctgcttccagaatgagaagccttgctgtgcaccaggacctgggcccttctggtatctcctgaatgaaaaacaagggatatttaataaatatggatttaaatatg

SEQ ID NO: 65 - DNA, 1572 bp, Homo Sapiens
  AK097377
tgaggggcacctggtcctcggttggggctgcaggtgtgcctgacatttgcaaaagatattccagtctttcgatgttcagaattgaaaatgtggagatagaaaagctcaaacagactcctaaaaggagggtttctttcctgaagactccaagaaaatgagtgtgcagatgagttagcttgacaacctcaactctggggagcaggcaggcggtctgaggaagataagggcccacgccccactcacctggcacctgttcggtggtcccggggcatcatggtctgcagctctgggcccccagccccactgtgaagtcagtcctgcatgctggccgaggcccggccacctcccgatgcctccagagtcagtggggaggagtcagcccttcccagacttccccgccacctccagcaggagcagctcagtttgtggctctgggagctccgcttttgcaaacccaaaaaggctgtgcatttggaagccaaacgctcagcatgcggctgccgagtctggttttgtggacaaagcaaactgtggaatggcttctcggtgtctgtataaagggacaaacggttgcattcaccctttgtactataacaccgcttctgcattcgccatatccgttttttaacctttttgtctccggggaacttctcattcgattattatgtcttctgatgatttgccatgttattttaaaggtgattttattttcttatggacaggaaaaaagaaaatgaggaggagttggttttactcttagagataagacttcagcaggggctcagaaaccccaaactctagttaaattgcttctcggaggaaaatcttaatctagacagattcagattcccaggctctcctggaagccctgcacttcagggcacaggggccctgggacgtggttggcagccaggctgcgagagagctaaaaaggaacaagaacatcagctcggatgtttgtctctcagccctgacacctgccactctccttcccggggcacttggccctatcagagggacatgaaatgctgtccgaatggtggcagaaatgcagcgacattgcatgcagcagagtctttgcttcgaaagatggggcgccatgtttcagagaacatttatcttagtcccacgttcaggtgagaagacctcaaaggtaccctctgtccagaataaacattggaacaatctctcaattggcttttgtcactacacataatgtaatctcccttctttcagctcccccaacagtgagcatgcttcccaaaaaattacaacatcaaaaccaggaatgtccccgcatctactattaccaggcttgcaattggttcaattttcccataaaaacatgtttgtccaaaagaagggaaactgtgaatttattccatgcatgtaataaactctgcaagaagtttaacccacataggtttgcggcactgcaaaattgttcatgggtctatgtagcaaatgattctctgccttgacaatcatgtatacatatcaagatttctatcataatgataatgagattgatgacttcctgttttcctccaataaagacaattaatcaccttc

SEQ ID NO: 66 - DNA, 2183 bp, Homo Sapiens
  AK097979
gtacatttatgaattattttacccgattggaaaatggctactatatgtggaaagtagaggggaagagaaatgaacttgtgaattatctactctattctaccaaagaaagatacatatatcatttcagggttttccaaagttgggatgcaaaggatcatgtttcattttaatttatgtatttatttttgagattgtcttctatgtattgcaagtgatactggttttaccatgcactgtaccactacgagggttcctttcaaaacacattcatataaattaaaaaatcagtttaaataaaaacatcaagtcaatagtagtacatagatatgataaaagtttgcaaaagtggcacaggaatagtcattgggtggtgatgttccctgatttttttagtccctgaagcacccagcgccaagggtactgttcttcctgcttaacacaggagcaaacagatgctcacaccctgcccaagaacacagaggctcagggactgaaccagaagaaatgatccattaaccatgtaaatgaacagagagcctggatgtcagagtgaggaggccagctcgggtcgctgtggagaaagagatgggctctccctggaatccctgcagctgcccttagaggctgtgagccatcgtggctagggcatctttagagaactgaaagtcaggccgattcctggagagtgaagaatagcacacgtgccttcaaaacagtgtcagtatcctgtcccttacggacgtcatattgttggtgggttttcctgggtgggagatcacccagtatctggttggcattactgatgggttcccagagctgtcttttggttcaaagtcctgccctcggtcccagctgcccccagcacaggtgtcaccttggagtcaggggcgggtttgtcatagcccatgggtcctggccctgccctttatcatgtttgacatgattttcagtctacttttccttcaggatgtaatttagaaaatatgatttcagaattgtgaaatttaaaaaccctagaaaacctctttgctttgcttgtaaatagcagttgatgcagccctgtggacaggcgggaacagccatgtgacgtgggcactgagatgatttgggagattgaatgctcctcagtggggctagaggccacaggagtgataggttactgtaaagaaagcaaaaaagatgcaaaagcctacatgacaaaccaggcacgacacaaaggagaggcttgagaagaggaagtgaaggagggagaggattccacaagaccgaagtgcccaaggagacatggagggaagagagggctcttcacagagctgagtttagagaccaccctccatggttctggaaggaaaccagccagctttcatatgtggtgacaggctgttcattaatttgtagtgtacagcattaaataaatgaagtatgtagagaacattaggaaacaatataaaaaggtaggggaattcgtggataaagggaataacctgggtaccatatttcatcacattattccatgggaataagtcatcagtgcaaaggactgtaaggagtgcacagcaggaaatgaaaagacagaagcagtggggccgagaggaggaaatggagttgctgaaatgcagggtgagcagcaggggcggagagtgccctgtgggtaaggcacatctcagaagggacaggtccaggccctctcctccctggcctggagcttctggcaaggcttttcttctctgagcctcactttcctcttttgaaggtggcaatagtaactgaacctgcatcacagaatggccttgagggttagatggaacatatatagacataatttgttgaagacagagtagcaaagacacaaagtaaaaaggacagaaaaaagaaatgcaacttgtgcaaaatagaactttcaaagatttacaagaagggtaaatgaagctatcgtagcttcacttgggaaaagggagagaacagatgaccagcaccaaggatagaagagggatttcttactttaaaaaaaatggtccaaagaataaacaaactgaaaacagccaaaagaggaaggaagaatttgttagaatagggcaagactaaaggacagagtaagggtgctggccgccacctgactcaagttcaagtcgagctgccactgttgaaatttcaaggagaaatggtgagaagctaaaagatgc

SEQ ID NO: 67 - DNA, 2560 bp, Homo Sapiens
  AK123264
ctgtccttaaacactcactcctgaccttacaaccctggctgttacctggttaacaagccccaggtgttggctacaggtgtcatcactgagagcccttgtgtgcagatctgccccagctctcccacctgtgactgaggctagcaagtcccccgtgggctgtagagcctagcgctggtgtcagaatcgcttgttgcaggttcatcttcagtgtctttcccacagccacatgctggggaaagacggcaaaggcgctagaggagcaggagaacaaagcaagctgccccagaccacccggctttcgcagaacccagatgatgctcctgtctccccctaagtataacgtgttatttagtcagtatgatcccattcagtgcagaagtatcgcctaggaatttcctgccccacccaccctgttttgttcttaatgaagttcaagaacaaaatgagatgatagtcaagttatggagcaggctgcagtggatacaagggcagaaacacagtctttggagttagacctgggatctgcattgattggttgtgtgactgcagacaagttatttagcctcattaaggatgaatttcttcgcaaaaattggaataatacctgccccatacgactgttgtgagaattaaacactgcaacttttgatgttcaaattctatttcttctccttctagcaacacatactgttagtgccaggaaccataaaaattataaggctgtatctagaggcctgaaaggaagctaaaatatacagtttctactctgtctcttttctcttggttatggtatcagaggaaatacacatattttcttagcttcaaaccaccaaaaaagatgatgcagtaaggagatgggaaatctaatttggaatacagtgtgcaaatcttattttcaagcagactttgaaaataaaactcaattcttacgttagaggattatctgcttaatacaattatagggtaccagtttttgaagtcacatcggggttaaataagattgcaggttcatggggtcatatttgaatgttctgatacttacatatggggtgggaaggaggaatgcatgcttttctcaagttaagacacataaaagagttgtcctggcccaggtgagactcgcctttgtgtagcagctggagcttcattgcacaggcagatagggtgcttgtgtcctgatgaagtaagagaatatatctggaaacactttgtgtactgtgaaatactatacaaatgcagggcagtacaaatgtaaatattaatgtattttagtaataattttagcttttatttcatcatatataataatttgtagtgactggtgtgaagttaaatagaattaacctagaattaatgagttttgtattgctctcatctatttgaagcatcagctgtgcctttcatgttgccttgtgcagccctgtgtaacctcctctgtgcctttcccatggagcactgtgtcatatcacaagtagaactacaggaagatatttctcctcagggcagaggctgggtcttccgattgaatctcccttctttcttcattgagatcctcttcttctggaagctggtttcacatggtggcttagatttttccatctttgtatctagcaccatttgaaatcagtgttttaggagtaagaattgcagcacagccaagggtggactgcagaggaactgctgctcatggaactggctcctctcctcttgccacttgagtctgttcgagaagtccagggaagaaacttgaagagcaaaatacactcttgagtttgttgggttttgggagaggtgacagtagagaagggggttgtgtttaaaataaacacagtggcttgagcaggggcagaggttgtgatgctatttctgttgactcctagcagccatcaccagcatgaatgtgttcgtagggcctttgagtgtggcgattgtcatattctgttggataacaatgtattgggtgtcgattgtcatggggcaggggagagggcagtacacctggaggaccattttgtccacatcgacaccatcagtctgctcttagaggatgccctggagtattcggcgttgattgcggggcacccgaaatcagacttgccacctggactgtcgaggtgcagaccctgggagcaccactggcccatctcttacacaggctgaccgatttctcctggtgttcagagtctgtttttgtctagcaccatttgaaatcggttatgatgtagggggaaaagcagcagcctcgaagcctcatgccaactctgggcagcagcagcctgtggtttcctggaagatggatgggcagagaatagggaaggaagatcatgcttttccctactaacttctgtaactgcatgtatgatacattattgcagaggtaagagatagtttaatggatttttaaaaacaaattactataatttatctgatgttctctagttgcattttgctgaaatgtagtgctgttctaaattctgtaaattgattgctgttgaattatctttctgttgagaagagtctattcatgcatcctgaccttaataaatactatgttcagttt

SEQ ID NO: 68 - DNA, 1677 bp, Homo Sapiens
  AK123552
agtttctctgttatgttccattgctttatttggctctcccttcatcaataccagattttcctaattatcgtagctttacattgttctggtatccagtggagcaaatcatcctacttgaagagtcagactccatgccaaattcctatgtgtcatttttcaggcccaaccataggcagttacaaaggccgtacacctcatgaaggaaagctaccctccccatgccagacttggggcacagccaatgcattgcagtctctgaagaaagttgcagtcaaggacccagacccccggcccagccatgctcttaggcatatctgcattcctagtccaagcacctctgtttagaggtctctttattggtggcctcctctaaacaattctgagaccattttactgggatcaggaaccttgatgccacttgtcttcactttcagtatttagtacttttccactcctagcacttttccctctttcccctcccagcccttaggcccataaaatggctggagccttttatttaggtttctcatagtagcgagatgatccccatatctttgctgattgttttgacacttgtttgactctgttccatgggtaagaatgtaacactgcaggagccagcagtttttcctgctgagcctcttgctaatgctactgctgatctaaggcttgactgataccttatcattttggcatgttttaactgaccaccacgacacctggcagctcagttctttctgcatcagcttagttcttaacaccaccttcttctcctacttcataagtgtcttggctgttcctggttctttgcatttacatataaattttaggatcagctgtcaaatttgacccactcccttctaaaaaattattgggattttgattgagagtgtattgaatctatagattattggggagaatcaacattcttacatgaattttctaattcatgaacatggtatagcattccatttctttagggtcttaatttttcccaataatattttatggttttctgtgtcggtcttgatcatctttattagatttatttctagacatctgacatttcttccatgtaattgttagtagtgtcatttttaaaaatttactttctgtttacagagacttagcattgatttttatatattgactttgtagccagcattctaataacatatagatattttaggtctttacatataccattcgcaaatgatgacagttgtatttcttcctttcaaatctttatactttttttccctcttattacattagtatgacatctactaccatgataaaaagaagtggtaatagctggcatctttgtctggaaggcctgctgtgaccttaactgtaggttcctttctccagtgactcatcttgagattacccttctctcatacctccaacatttttgagacttggatattccaagcctgtgctaaccattcacttctttggctacactcagcagaagagaaatagaaagctgccaacctcttagactcaaacgaaatcattttcccatttgttaccctcagaaattggctctttccatccacaggttccacatccatggattcaaccaactgtgtattgtcagtattcaaaaaaataataaagtaaaaataaacaaacaaataaataaataaaagttatcttgatcctgatcttcag

SEQ ID NO: 69 - DNA, 3260 bp, Homo Sapiens
  AK123807
gaagggaatggagccttgtagtctatgatttttttttttaaatttccatcgaagggattggggatgtcagagagccagagctttcccctttccaggagctaagttggcttcggaagtcttctgggatttgtgaaaatattactgttgtaaaattacaaagtggtagccataacaactccctcagattggagacttgaaatgtcaaaactcccctcttcctttcccctagtttggtggatgctcatttattaattcattcaataaactattagatgccaggtaccaaactactgccatgggagtgcacatattaacaaaatgctctacctgctgccaaatggcttactattctgtggaagaaacaaagtatataatcctccccaataacagttatgtattgtttgttcacttaatgtggaaggcaagactgatgcagacacacaaggaaggctcaaaaatataaatctagcagcaatgtcatcttttttgattttaaataccatatgtgcttactgctaatcaggaaatgaacaacctcagtaaaattcatcagtgctggtaaatagtttgctgtagtggaaagctcataacctttggattcaaatgatcctagtttctgtaccatttattagcgttgtgacctaggacaagtacctcacttctctgagcctgtttcctcctctgtaaaataatgtctacttcacaaggctgtttcaaaggttaaaaaagatagcatatgtaaactgtcttagctcagcgcttgacatttcctaagtgtgccataaatattaatctctttccttactcccagctccaatacagcgtaacagtgctttaaaatgtatgtccttcatttctccttcatttctcagtcacctttgtctcttccctagggcatatccccaaattcttaaacaaaaaaaaatgatttttttccccttcatcaaacttttcactggctcccttagcacccagtagaaggtcccaactccttacagagtctgggttttcatgtccctgtttgcttacacagcttaatcttttgccactttccccctcacattgattaaggtagccaagtttaactatttacacaactattcacacaagttattctctgggcctgcagcagaaacatgattaacaattttaatgcccagagtaaacaacagaaatttttcttaaattaaaggaatagtgtgaaaatgctgtaagtacagaaaatgcaacctccattccagtagaacaatttcctttgccttgtccttggctctccaaaactgttcatttattgtggtgtcttttagattttagtgccctgggacaaagatctaatttccccaccctacttttgactctatcctggactacctttcctcacctctatctctctcaaccagactaactctttattccttagacttgatgatgcatccctctttagagatccaaagacaccccaagcatccccctctctcagcaataatcacattgtatagcagtgtttttcaaagtgtggtcctcacaccgcctgtgttagaatcacctttagtgtttgttaaaagaattgattttgggttcccactcctgacctaaccagaatatctgagaacataggcaggaatttacatttttgacaagctcctcatgattctgatgcaccaaaaattttaatgaataatcatcttccctactagactgaacaccttgagaggaaggactgtgtcttttattgttgttatattgttaatacctggcacagtgcttggaacattagcttggctaatgtttattgaatgaatgtatgaatgaaaaaatgcattatgaaagtttcctcttgtactctcatgttcgtagtgatgtttgttacttcctgggcagaaaagcttggttactactccatttgagctgtattaattctattttgcagagatatcaaggctcctacataataaatgatcattgtcctcctcaaaaactctttggcagttatcttggggaaatgtctttggagcatatggcaccattgttttcagtaacatttcagtcttgtcaaactttgttgtttgaaggtggatttacatttcggttatagccaaaaatcactcaaagctaagcctacttaaaaaagtggggaattaaactgggtttggagtaagcaatgaagtttgactctgaagtcccaaattctgagtcaaacagtgaaaaatgacttctaagatacaacatggtgacaaagtacttagtgggggtgcgatgggccccagatatttacttcagttaacttggcttttatagaatcctggcaatgccatggaccttaagagaagtaattggctacctctagctaaacccagctggacaaagagaataggacttgtatttaacattttcaaagaaggtgactgcataagcttttgttgttgttgctctactcaacctgttctccacaactgtttctaccagaagattattttatgtctgcaatttatgcttgtttccactttttatattgtcttattgaagaaagcacaaaaataatcaaaaataaagtaaaacctgttttgagagtatgaaagaaattttaatgccacattgaggttctggctacttgtaagtaagagtaactgcatctggatgtgtttttattatacaattctatgtgtatctttagatgcagtgaaattcagattgcagcaaaatcacttatctgttcttttcggctaaaacactctaggtgaattttctaaacttccatggtttacatatttatatatgactaccaagatggagcaatccacggatggacttttgaataaactcaaatatttgatactgtttcctccaaggaatggagagtgtcaggcaggtaggtaagaaccactcctacacttatttctagctcctgaagccaactgcagccttggagccaatggctgtatttggctgtgtgttacaggttggccaaactgattgccatcaggtcagacaaaactgccttttatggtgtagtctgccagcttcagacatatgctgtattgttgttattggctagactatttattagactattgttggactattttttatcaaatgctttaccccacgcctgtttgtattgggagctctggaccaatagtgtctctcctagtgacagaaatatgagcatctgtggattacacagcctcatccctctctacaatattccagcccatccaaaatgctatattatgaattaaataaatatatatgtattcatg

SEQ ID NO: 70 - DNA, 3788 bp, Homo Sapiens
  AK123840
gtcacggggtgggagagacactctctcctcactcgctctcactggctcttcttcattcattcattcattctgtttattcagccatccaacaaatgtttacaaagcccacgctggagagtggatcgctgacatttgagctggggagagtgaagatcgattgatcccggctcgggggacggataagcgcaggcaggctccggagagttccgcacgctgcggaaaggcttctcgccctaccactcggagtcccagcttgcgtccctgccgccctcctaccaggactccctgcagaacggcccggcctgccccgcacctgagctgccctcgcccccctctgctggctacagccctgcaggacagaagcccgaggctgtcgtgcatgccatgaaggtcctggaggtacacgagaatctggaccggcagctccaggacagctgtgaggaggacctgagtgagaaggagaaggccatcgttcgcgagatgtgcaacgtggtctggagaaagctgggagatgcagccagctccaagccctccatacggcagcacctgtctgggaaccagttcaaggggcctttgtagggccactcttctgtggacgtggactggccctgctgggggtccccagggggagtttcaggccccagacacgggcaggacctccagcccagcccctgtcttcttcctctgtggtgaactgtacataggacgctgcccgccctggcccagctgccatgggtccgatgcactggcccaagccgccatctcccgcctcatacaccagcaacctgggaagacgagacgctgcgactgttcctgcagcagagcggcccggacgcctcattccccctctgggccctgggctccatgagcaagaggctgcaggctgcttctgagatccagcctgggaactgtccaggctcctctgtcctgcctgggatggaggggccactcatcaaaccctctactccccggctgccacccacactggacagagaccaccactacctgggtcttgacgcaggtggcaccacttcttgcccaaatgccgtggcctgggcccaggccccccaagcactgggtccccggcatgtggacaaggccactcaccacatctgtggctggctggaggctgccctgggcccttcctgtgaccctcagccttggaggtcagggtgccctcacacctggggatctgtgctcagccacccgatgcccgctgctccttgcttttggaggtcatccccctcccccccagtctctgcaatgtccccctgccaccctgtccaggctatgcccttcttgggctcctcctgccccatgcctgaggcacgtcccttttcgtggtttacatgacaggccagtaacaggaagggcctggggagagtttctgggctgagccacatgtgattttcctgatgggcagcactgggccacagctggggctctggttggctgtgacctcccccagggcctggctgcatcttgggtccctgtggacagagctgtgtaggctgcagatgagagttctgttctttttgggaaggagcgtgtctggccaggttctgcctttagtttgtggtgtgacctttagcagttcactcagcctgtctgggctcttggtggaaacaggtctctgaggttccttttcggccatgcttatggctccaggtcatccagcgccacagggcaggggtcctcactgagggggcgtgagccaacagccgacggctgagggcgggccgggtggagctgagttctgctgccttgcagtcgctgcgggtggagagttgcctccccactctgagcccgtgtcctcagtagtaaaatgggcagcataaggccctcctcacaggattctggcatcaagtgagatcttcagtgtaaatgaccatgtataaactgtaaagtgcaatagaaaactgtgtgtgtgaggaaagtaaggcctagagggggtgatgtgtggcacatgacaggggagatcccacagctgcagcacggggacaggccgcttccccacatccgctcatgccactgtaagcagccctagctcttgggtccaggacctcaccaggtcctcgtcagactcctgtgctcttccaggggctgctcagccccacctgaagagcccagagaggctgtcttcctacccagcaggtctcatgcaggcccagggctggggatgcaggcaagaggagggagatggccgccctgtccctctccctagctggcggctctattctgagcagttcttgctgcccgtttgctctcaggggaaaggctcacgccccccatcttagccccaggggggtaagtgggtgctggtgatgggatggtgtggcgctcctgccgtgggtgttgccaggaggctctttgggaaggagtgtcgcccggtcaggtggtgcgctcccggtcactaggggtgtacacgtgaagttgggtgaacacctgctgctcatggtacccagtgattcttgcccgagtgggcagctgagcagaggcccctctgggtcttgcagtccaaagaaccgcagagtagcccaagggctgtgggtccattttgagtggcagccaagtctgggagcccgtgtgcatcatgtttgggtcaggttggcgtggccaccactgaaataagcaataagtacgggctcctggtacctgcggatctcctgcaaacaggcccagagaacagccttgaagccacctttcccctcaaggggactgaccctgtctttaatgctgcagtggcatccagggatcagtggaacattgctttgagaaccctcctgctgttacggaggcagcacaaagctggtgacccctgagccaacacggcactgggatggctttctaggacagaaccctgtcggcgactgtcacatctcaaactaatagctgattttaaaagccagcagcagcgacgccatgtacctgagtacaggtggcagttgcagagccgtgggctgtagaaggtcagatggggcttcccacaggggaaatctgggcgtgctgtagctcggggtgactcccagctccgtcactagcagggcgacccccttccttctggagccttagctctgaaagcccccagtgggggtgcccttttagatgccccctttccatttcaaaggctctgactcttgatcttgaagccggacgcggcactggcactcggcttcagtttccactgtgacagatggaggtctcctttcgccccagcccaggtggccaagcccatcctggcctcagaacatgctgagcacattttgtagggtggcacctttttatccaagttactagctacacatcagtgtttaaagagaaaaaagtgacctttcattttttttttcttgaaacttgaggaaacaagatacatactactgatttttttttttttcttaaaactaaacgcatgactgcagagcggtagaggtgtatatttttcatactgtggggcaaagtatttgtgctgctttttggagatggactggaacgtctggtttctgtccccgggcccggcagctacgtctattttctgtagaaggtgccacagtgagacctggagccaccccttcctgccctggcgccgtttagagctgggagcccgtggactcccggcctgtttctaccttctattcaaccactctgacgtggggagacaagaagaaatagaactttttgatagtgtggtaaaaacattgatttgaactattttagtaaaaggagtaacaaacaagattgtgatagtgtctactttgagctagataaataaaggcctctttgtgagcctc

SEQ ID NO: 71 - DNA, 2816 bp, Homo Sapiens
  AK123875
cacagagcaggggccagcaggtgcttgctgtgaataggaacgtttagcagaacccgggagaggagacagtgttaccacacttgctctccactttgcctgcgggtgcctttaagaagcacagatttctaaaccttgccaagccgatccgctgaacacctctacattcccggctgccttgttggctccctgggacacggcagctgtcctgtgtccgtaaacagataatagctcctccgactctaggtgtctctccatggccctttgtggccaggcctgggctgcgtacccatgggcaccccctcccattcaatctcacagacaggacaccaggctgggcagtcctcaccaacacccctccagccggctagccagcctcctttcaactctgcattgccctgagtttgtgtggggttgttgagttcccagcaggtcctccggatgtgcatgtaggtagtcaggggaatggagtgggaggataggagcccagacacttgaaatggtgttccatgcctttctagaccccaggccctttcctgcatgattttatcagcacatgctcaatccttcacagtttacaaagcacttctagatccatccaacccaccaaggatgaggatcactggcactctgttttcccaggcagggaagtggcttccaggaggcttagtgactgaccaaggtctcgaggtctcgtgctggtgaagtgcagagccaggatccacctgagtcccccggctggctccagatcccacactccttcctcggcacttcctcggttctgcacggtgcctcagcactccccaaaacatcccattttgcaggtgtggaaacccacgtcccgcagaggctgggtgtttgctccactcagttctggggacttagcttgaggctctctgatctgttctcctgctgagcaccccaggaagggctccaggtctcccagccacttagtgagagtggcaagtcctgtctcacttgatctttgggagcataagacgagatcacagaaaatgtcatcaatgtgaaagtgttttgtaaacgaaggcgctgctcaaacgtagtgttatcttcagcctggctactggcttcctacaaagtgtgaagggatgaaggtaaaagctctttcttgaataatgttatccatcaagacagatgaaaccacactggtcagctcctcctgccctccccccaacgccccacctccccttcattcccacatgtttaaagacattcgtaggctgagaaatgattcctgctgctcctctgacacccggaatgtgccttgtgattggcagagtgtccctccagaatagcttaattttttccccatttcttgactaatgtcctctactccttggccctgtaattgagaattgggcttgcaatggccagcacacgagcatcttccctgaaagctcagaaatgatggctctcccggcagggagctggcattccccatggctgagagcgctgtcctcctcgcacggagggatcattcaccaccgtgtgtattaacctgaaatccacctcaccttgatggatatttttgccaatctcccatttggtttgatgaatgtgagagaaattttcccctatggcatatgaatttctccctcacaaaataagtctaaatttttttctgttcctggagatgaaggagctctgcagaataggccacgtcttcatttacctttatctctagtagccaaaagtcttgatttttatataactggaaaaaccacgcagcataatgcttatacacacacacgcgcatgcatgcacacacacgcacgcacacacgatgcacacgcatgcacacacgcacacatgcacacacacgcatgtgcgcgcacacaccacacatgcacacacgtacacaatgcacacatgcacacacgcacacacatgcacacacgcacacgcacgcacacacacgtgcgcacgcacacacacacactgagcaccgttgagctttggtagaaaatggaaaaattacgatgtttttctcatttctggtgattggcttccgagtgttatttagagagcggagtggagagggctctttgcagccctgcggtagtgtcttgtgctcaccaagaggctcacgggaaacatgtcctccaacatgaaggtgtttgctaagattccaaccaggacccagtcttgggccacagaacactgactgctcccccaagcccctcgcagaccgcagggatattttcccttcagaacctgttgcatcagaatggggaaagcgagggctgagaatcccagaggaggccgtgaactgttctggaaaagcgagggctttgcagtcagaccttcatatgcactttgttctatctgttgcgctctgcctaaatgaccacgggccagtgactttacctctctgatccctgctccttgcctagatagtggggatcacgtcgtagtgtatgtaaagaaccgggtgcgggacttggcacctgggaagtgtcttaatacatgtctgtcgagaaaaggaagggtctcgacgtgcggaaacaagacggatgccaggaaatacgtctgcccacctccacgcccctgacagcggaggctcctggaggtctggtgagaggccccacgtgctccagccccctccgctctgtgctgagctctgcctttaagagactgcagctcctgcctctaaaaagcctttcaaaattctttattaaattttcatggcgcataaagtcaaggttctgttacttggcctcagttgtcttggcaacttcataaaacgcaataataaaacgaagctgagtgttgctaaacacaggctcattgtataaacg

SEQ ID NO: 72 - DNA, 2915 bp, Homo Sapiens
  AK123915
tattcaaccaataccaggtgcactctgtctcccctcggccatccttcccttgcttcagacctaatgacaagtgtggcacatatgtccactttcaggcctcacatctgccaccttagcaagacatcacctcatccccttgtcactaggaagagggcttcttccccacatgtcgtcatagtgctcacctctgggctgaaggggaaagcatccctccgcttaaggccacatctacctgtcattttccatcccattcctctcccacgtttactgggtctttcctcctgtagtattccccctttcgctgtctcagtccctccctttcccccaggctcttcttcctcagcaatgtgcagtctccctttcttactgaaaagaaagacttaacccagaagggccaacaagtcctggctgcctatccttcctccccagtttttactccctcactctgggtcagttttcttttctttttttctttatgtgtgtatatattatatatatatatacatatatacatatatatatacatatatacatatatatatacatatatacatatatatatacatatatacatacatatatatatatatatatatatatatatatatatatataaaaaatactttaagttctagggtgcatgtcagttttctatgcttcaccggactatttccaagctgccacaatctcccagtgaccaaatatgatgatctatttgcagccttcattttgcttaatctctcccttgaaattgctctcttggtaggtggatcctgtttttccttcaaagaattccttttcctgttgcatactggttcccagtttttccataggcctcttttttttcttatttttttatattgaaaaattccacacatccagaaaaagttgaaaggctagcacaatgaatactcagatacatactctccacttggattgaatagttgttaacattttgccagatttactattctctccaccccatgcatgtgtacatagaatgacatttcgacccctgagtattaccacatagatttcctgagcacaaagacaccgttctacatgattacattaagatgatcatgcctaaaaatataaacagtaacttctttatagcctctaatacagagcccttaatcagtattcaacaattgtctccagaatgtttgtctttaaaaacaacgacaacaaccaggtcccatcaaggttcatacattcttttggtttcaactctagtcactttcagtctacaacaaccccgacatattttcccatgatactttttgaagcatccaggccagctgtcttagcaaatgtcctctattctggaagtgtctgattgcttccttaggcctatgtctacactccactcgtggctcatatccctgcagagttgtaatctcctctgggccagggactcctgaatatctccaggccgagtgttctccccgggcctggagaaaaccttcatgcccaatcccttgctgcatgtctccacccctccttgcacatcctgcctctatgagtggacgaggcaaatctactcaaccccacatcccacccctcacctgataactaacatttactgggcactaacaatgtatcaggcacatactacacacttaacatgcattgctttcacataccagctccatggtaacattgcgctggctttacagctaaagaaactgagctagaaaggggttaagtatcctgtacaagatcacagctggccagcaatagaggtgggatcccactgcagacagtctcccccacagatgccatgctcccactgtaccaccatgtactgcttcctgagatctctgcttccttcagtcgacccagctgacacctgtttccttcctaactccaactaattaattccagttaatggaattgactggaattagtgacattaatatttactgagcattccccatgtgtcatcagagctgtgctaaatgctttacaagaataattacctgccataaagcaaccctatgacataggtgctactatgcccattttgtagatgagacaggttcaggggagttagtatcaccttcaagtcatacagtggctaagaatctgtggtctcgctgaatgctgggcgcctgctctgctaagtctatttctacaaaacattgcactgccttcctgttgcctgccaagctcagggcccatttatcatgcatcttcccatccttgtctcccccaactgtcccttacctgagtcacaatttcgccaaagccaaagggattgtcctaagccaatgttgatttatcactcttcctgctcaaaagcccccaagatcacctatcaatcacctccttgagtgcaagctttgactctgtcacctgacattcaagtccccctctgcccccatgccagtcttatcccctcccctacatatgccctatcctgcagccaaattggactctgttcttcctgacaagacctggtattggcatctctatgcctcagtttgccttccctccactttaaaaagcctcttcagtctcgatacaaaaaacatcccacacatgttctaaaaccatgctttccttgatttctcctcatgtcaagacatttcttacttctctagtctcctagcattttgtgcctcacaaccctcaggacaggccagctagtgtatggctgtgggtttttatctcacctcccctgcctgaccctgagcccttgtggggagtatactcaccctactcctacagtgccttgcattccgtagctgctcagtacattaacccattcaatgtctttaagatttttacaagttagttttcctgtaattactaatcatttatctttaattctgagtaaaattcacaacaacaaataaaaggaaatagtagtaattttttaagctgtttagtcaataaagatttaatgcgtc

SEQ ID NO: 73 - DNA, 1914 bp, Homo Sapiens
  AK123920
aaacagttaagtgtgaagaattactctcttgcattattttcatccttcccttttgtttgtttgggatgcgggggcccgagagctacaggtaggtgctgggctatggccgccgccaggacccctcccggccagcagcctcggctcacgtcccctcctcctcccagcatcagtcccgcagcgtggcggtgggaggctgcacctcgaggccacggcccttctccaaaagcacacactcctgctttccgacggcaccctcccctgaccacagctcgggaggtggcacgtgtgagaactctccatccacaggatgtggctctcgcgggacctccaggctcaggctgtctccgctgggtgtgggacctttcctgtggggttttcgatggaggttggctggggagggaggcatcctcagtgggtagaggaccccggggtcctggtgctgctgtcgtcaagatgcggcgacatggtggcagaggaaaggcaccgttacccagcagcacgccagccccgggtgactgtttcctgtactaactaggttatttgcagcgccgagtgaagaggcagcttcaccacccaacccacctgtgggttctccggggtctgcagtctgaggaggctgcaggatgaccagacgccggtcagggagttcctcctgtccagagaagcaggaggtgaactgggcccacctcaggtccgatttcgccacgagcaagaatgtaagatgaattggacagaaaacaaaaatagatgtacaagttgatacccaaagaaagcagaagattctacagtttatagggaggggcacaaaacgtgcagggagtaatgtgccggggggtgggggcaggggccgatgaacgaggccttgatgctgtgtggagacctctgggaaaggctgggagaccttccctccttccacagtggtttctccctgaaggcgattctgcgtgtggttggtcctgctgggaccaaggtggccccttgttctgctcttggccgagtcccctctggcttcatgggggtgttaatgaggctctgcaaggcctccttaaacacagtgtggaaatacaggtggtgctgcaggggcagcgagaacggggacctctgctgctgggtctggcctaggggtgaagaggacgggaggagggtggcgtggtagctggctgcgcggggcctggtgacgggaggggccagaccgcatgcagcattcaggaccagcgtggccctgggtgttccgcctgttctgaccgtgtggtcgagtgaacagagcatgcaggggagatgcagcaggttctccccgacgcggaagagcaaggggtccccggttcctggaggagcagcgggattgccccaggctctgggatcgcccacgggggcagcgggccagcacccccagccgcatctctgcacagccgtgctgcacaccttctccgtcacgtgttggaggtgggtctcagcaccagcacatccacattgatagcttaaaatgggacttttctcccgcctgtcttactgttgacccgcccccatgcagcggtggggaccccactgcagggactccaagagccccatcctgtcctcggctccagcctccatcagcaccagccgtgtccttgcagccctgactggagcaactcccaaactctgctgcccggcaggtcttctgaccctgcccgcggtgatggcaccctctggaaggctggcccaggacggcacctccatgctggcagcccctgagtgtagtgtgtgttctacacaaaagagccaggaagtcatctgtgatcattgtttaagggactgtgattaacgtttatgaaatgttctgtgctatgcgaagaaaccactgaatgttagggaaaatattaaatactgaataattatacaactgttccaaataaagtcttaagaagaaacttg

SEQ ID NO: 74 - DNA, 2920 bp, Homo Sapiens
  AK124143
atatgggcaataattttaaagtagtttggatttttttaagttttgaggggtgggaggggtctaaggcagaatatatcctttttaaaaatgtatatatacttttcattaactatattgtattatttcatgctgtacccagtccattgcttggacttacgggtacctaatgaaacgtggaggtccggatgtatgaaaatctcctcttttcccctttccttattgcctctgtaggcaataattatagagtagtatagatggtttttcttttttatccatctgcctatctccaggaggatggggtgtgcacttttagaaatgtatataaatgttcttgctcctttttcctgttacttcattgtgtgccaaggcctttccatggatacttaggtacgtaatgaaaattgaggttcattctatgaaaaaatctccccttctccccttcccttattgcctgtcttggcaatggccagtagagtagttatttaagggattttgtttttttgtttttttgtttttttttttggtaggggaggtggggaatttctgggtttgtcttttttttaatgtatataaaagtttgctagttgttgttattgttgttctttcactctcaacacagttttttgtttggagttgtaggaatcaaatgtaatgagggacccagacccgagagtgtggtaaatattctttgccttcctcagagcctgtatacacaagcaagtagtatgtgagcactacagggcttgggttttggttttttgcttttgagggttttaatgaggagtgggattgttgagaggaaaaggcaagatatataatttttttaatgtatataaatgttttgctcctttttgatgttaacttcattttgaatctggtcctttgtatgaccacttaggtacttaatagtaataaagttgagattgactctatgaaaaatatcccatactccccatccctcattgcctagggggcaatggtagaatagatgtttggtttcttttgggggtgtctgagtgtatatgtgtgtgtatatacacacaagaacacacatatttatatactatacacacacattttaatgtatataaatatttgctacattctgtgtgttatataatgtggtacccagtcctctgctgggacatggatgtacataatgaaacatggaggtccagacgtatgataactctcctgtttcccttccctcattgcctacaggggcaatagtttcatatcttgggttttttattgtttaatttttttttatgggaaggggttctttgggtgggtaatagtcagggggaaaggacagtgtctatactttttaaagatgtatataaatgtttcatgttattggttttgtacctagtcctttgcatggatatataggtacctaatgaaaatcgaggatcagtgtgtgacaaatctcccatcctcccctttccttattgcctgtgtcggcaataggaagtagaatagttgtgtgttgtttacttacttgtctgttttagagagatttctatttttggtaggggaatattcttaatatgttttcatatctttatttcattttgtagtcttttgcatggctatgtagggacctaatgaaagtcgagtttcataatatgacagctcacttcttttcctacatatttcctcacttagcagtagctagtgtagttattttgtggttattttatttcattctctaggatctattccattaaggatgcaagtgtgtagatgcatatatatcatttgcttctttcttccgccattattttcctttaacacttagtcccttgcaaggggtctgactatacctaacaaaaataaagacctactaaatccctgccatctggctggaaggtgtagcagtgtattaatgtaactaatagcaacaggtgtgcagcagataagacaggagaagacactcagctatggttgagttgtgaaagctaattagatccagcatttcttatgttgattcagattgaatgaggtagtgaaaagggacctgtgcttttgtaaattctagaaaggcaagaggacaatattgaataaagctgtgtttaaacttcattgctcatatatcttttagtaactggtaaaccggcgaagctgataagccaataagagtgctgtctagaacgcatttgcaaaccgttaagagtagcttctttttgaggcctggacttctgattcatctatagaagtctattatgattccatcaattgcatagcttgtgtacctggtagaaattgtgtcttggaatgaccctttcgagttattgacatggctctgatgaatagaacatgagccccaaaactaaatccaaaaggaattttctatctttcatcccccacatgtggcaagacaagttggccctttcttacccagaggtcttttgtgtgactgcatctttctcctccgttctccattgtgtgctttccattttgtctttagtgcctatactgttaggtgttttcttcactggcattcacaaatttaagccattgctgcctcattagccttgtattttgtgtgcatatcatatatccagacctgtatgttcgctttaagcattcttatatcacactgtctcctcatctaccatatggtaaatgttaaaactccacatttgtctgcatcagggaaaatgcatgggcacacatcctccctccctccctctctgctctcctcccttccttcaggcctcttagcattgtttgttttcccatttctgatactactactccatgctgaagatttgccatattactattttggaaacattgagtgatagaactcctagaaaatttgcaaagaaatgttacatactgtatatcaaactctcagattctagtgttgaaaaagtagcctatactttgctattacttatacctgctgccatag

SEQ ID NO: 75 - DNA, 2584 bp, Homo Sapiens
  AK124146
gtttttaatctttctgtctccttatactgtaatctcagtgtttcttctgctttaattttggtatatgaattattcagctgtgttcaaagtgtggttaaagcgacttatatgccctttaatttttagttattgtacttttcacctctagaagttcttctgtgacacttcttatagtttccagttcctggttagaatttgcaaacttgttgactatttctttgaaaagagtagctagaattgttttagtctgtgtatagtgagttgaatatctgaaacctctgtgagtctgtttcttttgtctgctagccctactcatggcgtcatgttttcctggatgtttagttggttgtctttgaatatgtccaactccagttatttctgggaatacccaaaggcacacctgttcactatcacccagtgaattgccatgtgtttgtctcctgtcatggtaacatttgcattcagggagaggcctctgctctctgcagaacagtgtgaaatcacctcatttttgccttcaatgaaggttgtctcttgctggtcaccaccacttcctcaaatgactaatgccactcttgctcacagtgctaaggcgctaaggagttttcagagggctagagtgattctgcatcctctggggttctcaggaaacgaggccacagggccatctgtgcatgagtgacagtggggtggggtggatgagcagtggcagtggtgggcacctatgctgctggcgccacagctttttatatcttggtgaaaacaacgccttgcgttttcacttgtagattctccggctacattccacaagaacaaattctggtcacagaggccagagtagactatcagtgtaatggcccttcccctttgatgatagcagcttttttcgggggagcaggggtggccaaacttcctagccttattttatcttcctttctagttctccccagaggctgctgggttcacctctccctctgccagacagacaggctcagacatgcaagaacggaagggggtgtgggggttggtgggaggattaagttggggaaagccagtcttgtctttgtagattaccagaactgacacacgtacacacacgtacactcactcactcactcactcatctattcatctatttttggcctaagtgcctttggacacttcttcggaaaagcacatgaactctttggagtctcctgttccacttggtaaatttcctatagccacgcactgaaagtccctgctgccctccttcctctgagcttgtggggcccacagatcccctgctccacttcctgcttcatttcagctgatggtgagtccagggcaggcttgtaggaagggcgggctaggcgtggggaactgcagcacccaccccaccccccgccccagtgcttgttgccccagcctctgtctccctcgctgtgcccttcccttaagccccactcttggcctccccaaagacagagtttgttctgtttttattgataggatgacactccctcgttctaataccatctgaatgcctgagcaattacatcttacaacctcatgaaaaacacagcagcttgtcacgatgaatgatgttaccgtgaataatgcagttttgagttcaaactccttcttattccaagaatgagtaaatatccctattccctcccctccccattgcatttgggtttgacatgacatgaatcattgtggttttactcctgggtagaattgtttttctgtattgcattgccaattgatggaaggacaaaaaaaaaaggaaacttaccaatgagcagtttcagatgaacttaaattctcagaaatcttgaagaatgaatgaactataactttctgaagttgcaaaaatgttcaagtcggaagtgacccatgggaagcaacctggtccttaattaggactggaaagaaaacggaggcccagcgagggaacagtggcttccccaaggtcacactgcaagtgagtggtggcactagtcacccaggagtcctcctgactccatggtatcctgaccccagaccagcagccttatttgtggttaaagaacgtggaaaaacagcttatgtttgaattttaaaatcatgccagtactaaagatctgcattccatgaatattgagctttgctgtgtgcgggttgctacgaattttgtaactattttctctaagagctctcagtattttacatatacaattccattctttattgtccagggaaaaagttgcatttactgagcagtaagagggtgatttgaagtccctggggtcccccacccttgtctttctatgtgagattgtattgcagggctcacatttattctctcagcagctcattgcacagacagtgtatttattgagcacctactgtgtgccaggagctatgtggtaagctaagcagacaaaaactcctgctctcacaagaagaaagaataaacaagcagacaattgcacctataatgtcagcctggtgtgatggctcgctcctggaatcctagcactttgggaggtgacgatgggaggattgctttaactcgggagttcaagataagcctgggcaaccaagaccctgtctctac

SEQ ID NO: 76 - DNA, 2427 bp, Homo Sapiens
  AK125150
atattaatttcacaattagctgtattttctgtagcatagattatgtcactgttgcactttcacagcagacatgctttcagaaggttctcatattttatgtttgattgctgataagccatctctattgatacagattttggttaagtaaggaaaaccaggtgtgtgtctgtatcatttattgtaaatgccagctgccacttgccaaccatcatgttcagttcaattcaaagaaaacaaactctcattacttagtgtaaactaaaatacttaacaaattatatcctaaaaacaaggtctctttgttaaatgttgcatgccctaggttttaaattactacatccaaatacagttttcgtcttaaatttgttaagctaaatatatgttggttctttttattttggaatcctttaagcatcttaaacattttttttttgaagagaagttacaaataacatttctatcaggtagtacttgtatgaaaccacctttcttattctataattttgatttttcaattttatatacttaatatactcactgtcttactatcagaaagttattttgaccaagatttttattatcttcatagattcagaaagagatgctaattctgtaccaatgtcttcctggttactattctcttccctctaatatatactggccatttgtaaaaccattgtgttgttgggatcacttagttatactatacgcagatagagcatctcaactctgtcatagtgtttgctgaacagttttcagtgtcatgcacctttggctgctaattgttcctgacgtgcactcttccgagttggtaaaggcacagtgtgttcatgccagacttctaagagaaacaccagcctcttaaatcagaagcctacacacaacccccttaacaatccaaagaagcttgatggtgtgcaaagaagcatcctgccagccttgtcattgttctgttctatgctaatcctgctgtgttgtctaaaagatggagggaagaggacatcagtgtctgatagtgaaatcatcagcaggaaagtgaagctctttccttggttacagataagacttggtttacactattggccagtatctgctaaacatatgaagacttaactattcagtgttgcctaggcattcgcctgcacaacattttgaggttagaacatagaatattttcagaaatactgttgtagtttgtgagtgttgttcattagttacacattagctatagagtggatgcatgaagccccatgacaccagtaaacttctcttaccagtaggtaaaccaaacaccattctgtcattagcagccctcttaaatgttgcctctccgtatcctgttgcatttttgtgtgcattgtgtttctactgatctctcttaggtttttacggaatcaaaggaaactaatttttccttaatagcaagaaagatgaagaggtaaagggcattgaagcagaaatgtatagtttggggtacgattagaaaactcgtaaggaaaacagaagtcctaatttcaaactgactgctcttcgttaagtgctcttaaggagagtctagtaacagtaacactttctggccatttctagtttagattctcttcgttactgaaacttttgagaaatattacctgtggattaattttgcacaatgttctattctcataatgacttacaaattaaactaggtttttattgaactacctcacactaattttctatgctttcccaagtaagctgttgccctgttagatctttactgagtgaattataaatgtgtgttaaatactttctagccaatgttgacacaataccagtaagtatgtaaagtatataccttacatcagtaagagacacgtgtaaaatctttgactgtatgtcttgcaaaattgtgctcgttgacattattactgtttttgtaagtagaaacctgctcgtgatatcggtccatttacattttacaaaaggagtaaatcttagtaaaaattttacgaagaaataaattacttttgtaggcccaatatttggtatatttttgagaagctgttaatcttttagctgaataatgaagttagactgaattacgtgtctccctggactgtgacatctattttctcattacagtttatcctggtcagcagggtgtcacacctggaaacctgagtatgatagctgacatttgcttttctccctctgcgatgtcattcctcctccattcctctccttccctgtgttccgttccctctcctttcctctagacaaaacaaaatggggcactttttagggaatgctgagaacattattgtggtttttcatcattcatgccctagtcattaaacatgcaccactggaatgtaaacaatgttatctagtatgtcaattggttataatattttaaataaaaaagaaaaaagtggtatgaaaattatg

SEQ ID NO: 77 - DNA, 3596 bp, Homo Sapiens
  AK125664
atacatggtgatgtcccagaggatttactcaatttcccagaaatgcttccactgctatggagtggaaggtttcaaaagaccacacttttaatctgaaattcttactaagtcacagtgcattcacaactatgagaagttggatgggcttctctaaatcagacaaaaagtactttccagaaattgcctgttcagaacaataaactcttgggttgttacaagcttaatcttgaacagagccctcacatcccatatggtgaaaacaggaggttggaatgggattgggaagagttgggcatttccttatgaaggtttggagagaaaaggggggatgggaggtgactaccatttgaaagggctttcagccaatttggaggaaatctcttctggaactccagggtcaaattggtttcaggctagaattgattgacatgaatccctgaaggagagaggactagctttggaaagatagggtagggaagtgtgaggaaactatttgattttacacgcctagattgtttcatttgttcattgacattctgactactggatcttttcatttgctttgcaaggaagactttagaggactctggcctgggccttgagaagaattctattaaaagattctcagcctcctgtgtggccaggatctgcccaggataaagaggctattcctccttgctggagataatcttgagacaaccttgcatttccagtttccctccttgggcagcctaactatgagggagggaaacatggcttgcaataaattagcattgtgtcttcattcaggaattgaggcttccagcctcatatacctccttttgggctttgtgatattcttgcccaagaagtaccatttctacagaaatacaactgactaatcttctagcagggttctttttgaaaaaccccatgcaccttaacccacagcaggtccttggtgatttttgcccagacaaccagaaggctatttgcttactgcccacttacaatgaccagatcataggaaattgaaaacagtgtcagactatttagtcctaatctgtcccagattaagagaatccatgattttcagggggagggagccctgcaatgccttgacccctgcccagatacttcttacataaaccaaagaaaaatgacaagagtgtacatctaaccagacagaagtagaaacaaagtatagaaaaacctcctctttggaatcagctcccttaatgtggtcccccttctcttggacctgcccaacctttcacaacgtcttgaaggtaggacttctatatccagcaaaggaagggatagtagtaaatttacatggcttggaattttctttctggagccacagagggatgaatcctttggagctctaaaagcaaccagtatcactgagctgtgagatacctatatctccattttctaataggaagcacttggacttaaaattgctaagatattttttgcagttgctatttctgtgcatcttgaatctatctgacacaatcaaatgacagtattgttaactctcacaccattaagaaaatttcttattttgtaggcattcactgtgagaggtaaaattgctgctttggcaggtatgattccagtttgccaaacggcttttcttccttccacaacctctttttcccctagcccagggtgaaacaagtgggtcatctccaaccttgatttttatttggattcagcattttgggtttggaaggttacaagaaggaaccataaatggccatattcctagatttttatttatctgacaaaatacacaacttaaaagccaggaaaactaaggttcattacagggagatgaactttttctaattggaggacaaattgtggaaggtggggtctgatctttgcttcaccacttgaagagactgtcatccttcacctgaggttccatttctagcttttatgtgacctctcttgaacaaagtcatttgggaacccccagaaatgacccctttacattgtaggaccataagcaaaacactggttgtgtatagtcactgatccccaaggacttgcagttttttatttctgctggtgtgtcttgggatcagcttataactcctactcttacttagtcagtgaccagtccagtctggtctggaccaggcctgacaaacttctgctcacttgcatcattttcattctgagccagtaggactttgggtagactttaaagcccaagaattggtactcgctttggctagtgacatttgatttttgtctccatcttgatttctgacatcattggccaagtcacattaactttttttgatcactgagaaaaacagtcgaacaaggcattacagagggtggttaaggtagagggtggggggcaggaatgcttatgtaggatagaaagaatgtgggggtagctgtttggttatggtgatccagtcctttggaaccttacaaggctcctgtgggcatgtcaatgttaccattacagcctctacgacccacccacctttgaaaagtcagtacaagtagaccacagtttaaagtagttagtataattctactaaggtttaatcattatacttgttcacttcctggtgcatatttcctaaatatgcttggggtgtggggtggggggttgagttttcactgttccattgcgtgtcatcttatatttttctccatcctgtgactttggcatcttactcgactttctattttcttttcccttggcttattgcagtagtctgctggtgcaggtagagagctcagtgcacctattcccctgttactgctaattatcttgaatattgtcagaggttattttgatgttctaagaatataaagtcattttttacaaaatcatcttttccaagttaaaagcaaaataaaaaaatcccctgtgctagggtgcccatttcagcttttgacattgcccctgtacttttatagatgctctttttgtccgtgttggtagtaactaatgactagtgaattttcatgtaaatgaagcaaaataaatatttcagattttattaatctctcataacccagccaaatctgatgacttcattttaattgcttcccagaaagcacttcccctcctaccttctattctattctattctattctattctattctattctattctgttctattctgttctgttctattctgttctattctgtttttagaataacacactaggtaaagaaactttaactgcaaggagtcagtgacttttagtgctccctgataaatgatgttattgacaaaagtaaaaaattatttcattgtttttttcctgtattactatctcctctcctgtgcttttgacagtgtgtttagtggatggataatatgtatttctctttcccactcccagattccaaattccctgcctttttggcccacctcaccacaaaagctccatagtttattaatgtaagtttgaatggatgcttctttggggaaacttcaggagttaatggaagagtttcagaaaggaatgagaatgcctcaggagttgttctgtgatggaaattggtctgttgttctgttaatgctgatggaaagaaacttacaacgcttaataaaaatctattcttttag

SEQ ID NO: 78 - DNA, 2182 bp, Homo Sapiens
  AK125708
atgtgttctgctttcccagggtccatggcaggagggctgcagcggcctcatttattcatttgtgccaggcaccctgttaatcatggagataccacgctgacctgccttcaaggagaccatattctagtaggagagctgagcagcgagatggccatgtgtagatggtgctatatgaaagatcaccctgatgtagaagccaggtggggcatcttggcttcctgctccttttctttcatatgacaccgaaaagtctctggatattgcagttgggccagacctgcagaaaaagagaacattcagttaaacagaagaacatattctggagaaaatggggaagagagtgaagacacagctggttcaagggaaaaatgccaactgagcacagagagaaaaatgcctgctgagagctccacaaataaagaaacaacttacataaagtggtgagaagcacaggagaggacagggccggggctgagaggctgaagttccaggaccggttctgcatttgctgctgtgtgacatggggccagtgacttcccatctctgggcttcagttttctcaattatcatctattctcctgctttctctataacattcatttattgattccttgattcaagaatatttcttaagcacccagtttgtgccaggtacagctgtcagtgctagtgattcagcaatgaacaaagtggacaaaaagcacatccttatgtgagccctcatgcatgcagcaaacacaatcagtgaaatatggtgcagattcatttgtaataaggagaaaacagaaagcacagaaggggtcaggcagtctaatctggaagggtgacctctgagtcaagacataaggaggtgagggagtgagccaggaggacatctgggcaaagcctgctccaggcagaggggacagccagtgtgagagctgccctgaatgcaaagcctacccactgccccttcttttggtgtctccactggcctgctggctgcagcagccttctatcagacctcccagcctccatctcctcccctggggtcttctagccccacatggccagccagggtgactctaaaatataagtcagaccccaacacgtccctgctcaaaacccaccaggtgctcccaccacattcaatgcagtgcaagtcctcaccatggtcctctagcatctctccaagcccatctgcctcctctctccctcacttgctcctttccagctacactggcctctgctgtacctgggacatgccaagcaagacccagccttggggtctttgctcacggcctctgcctggatgttcttcccccagttatccacaggtctggcttcctgactttattcagaggccaccctctcaagaagacacccttgactgtttcgtctaagcaagaccctgtcacatccaaccactcgcctcgctttattttcccttacagcatttatcatgacctcccatcattttatatatttataatagtagatatgatcaatggatcagatgtttattatgtgatggacactgttctaaacatcctagaattaattcatcttctcccaaactccttgagattggtattgccattgaccacattttatatatcaataacccaagatagagagaggttaagaaatttgctcaaggtctcccatctggtgagtgtcagatcaggattcaaaccctggagcttccattatgagccacaacactctagaccagggctgcccagtagaactttgcaatgatgaaaatgttctgtgtctgcactgcccgaagtgactgccactggatatgtgtaagtgttgagcatttgaaatatgtgtgaccaaggaactgaattttgaattttattgcatttccatgactttagatttaaatagccaggctagtggctaccaaattgtacatagagccctcgcacctcttatttgctcctttgttaatttctgtctgccacataaggatgaaactggcctatgcattagtttcctcattttacagtaagggaaacacccctggtacaaagtaaatactcaatgctcattaatcaccatcatcatcaccattattataacattatcattattagtctccatgagatcgatgactttatgtttgttcactcctgaatcccattacattctttagcacatagcaggtgttcaataaatatattatgaatgaatg

SEQ ID NO: 79 - DNA, 3036 bp, Homo Sapiens
  AK126342
ttgatgtttgtcctgctgagctaatggggaaagttatagcataaaaattgtgtaaccgcatagatatgtcatttttaaaaactggtttaacagaaatcaagcaaagtcacaaatatgttcacaagttggaattatttattgagtcaaaatgtcgaatcgaacattttgaatgaagtaagtgttataaatgaaaaattgcctgatgtttagcagtttgtattctctaaagctttttttcaaaagttcaggctttctacttactgggaagttggtggtcctcttagtccctgataaatcaaggcaatcacattcatgtgagctggatgaatttataagttataaagaccttatccttcataccttgaggatgattgcactggttttgaagtcagttgcttaatgatgaggtgagaaatgtatcctgttgctaaatctgtcttagacccttggtgaaacttgaagatttcagtttataaagataaaatcaagcatcttttgtgcagttttctttttttaatgcaagaatggtggggaggtttgtttgtaagcatgaaactttgagaatctttattaagaaaatgacataatttttaaaaaccttgtagccaagaacatatgtggccacattaccagtaataaatgtttttctctttatattggccaaaagggaataaaaatgtcatcataggaatttgtacatatgctactgatttgcctagaaaatagcaagtttgatattgctcactttgcaaatatagggccatgtggcacttttatctataggacagattaataaaaatgaagtggggaggggtttatttttgatatattactcttatgagttttcaagctttgataatgtttaactgaaaagtggcttagaaagggctagatccaatgtgttcattattaaataattgctatcagatacaattttaagttcattctttttcaaactcaagtaccatattggcaaccataatattgtcataggtgctctcttcatttagatattcttggggggggtggcatttgtataatatatgtgtacatatatatatatatatatatatacatacagtatataatctaaagctctgagagctcttaagtcaggaatgctgagtattatagtatattgaggtcagatgaaattttacatttttgtgtgttctgttgcattccttctggtagtttctatgactgcattactccagcactcatgattgattttatcttctaattttcttccaagtattttattttttattagttttctttggcttgatacttttaaatatgttactagtcacttgaaagcctctcccccaaaagtatttggtttgtatgctttgtctgtggcagctataacagtggtaagaacattttgaagatagctttttaaaggaaccactgattttttcaaaaatcatcctgggggaggaattttggcatttcatttgagcagggattttgtcagaaaatgtgttttgatggtaggtcagcagcagtgctagtctctgaaagcacaataccagtcaggcagcctatcccatcagatgtcatctggctgaagtttatctctgtctctcaggataaatccctgtaggacaaatccctactatcatttttaccttttggggtgacatgtggaatcatacaaaggcttaggaagaaatacgtttgtttaaaccaggatgctttacttacttgaagtgacttcaatctagatttcttttaatatttaacaaatttttaattctatgatcagccacagtcagctattaccataaattggtctctgtttattttgaagatcacggctgcttcattttgcaggattaagtagggctaatgtatcttaaagttaagatcttgaattaaagtgagttttagaaatagtgttacataccttttcagttgttttcaagaggctttatttttgttgcctttgtagccctgaaagctgttggtatattttttccctcatggacccaatagaaaagttgtatatttatttggattatatttacattctgtcctttgtaaatgtttggtgtaacttgcacttttttaaatgacccagtttgggtattagcaacttaagaaattccctcatcaagtaattctcaactttttagtctttctcctctcttcaaatcatgtgactttttaaatggaagtttttcattgattaaaatattttagcacctaaaagctagccttaaaaacagctgtaaaagaaaaacatcaggaaattagatatgactagcccagttaattaaaagacgggctcaaaccttgttttattctttttcatcttggatgaagattgaagggaaaataactcaagtgcgtaatatttattttcaatttttaatgagactttatcctcatcacaacattaatactgtacatagtatgccaaaatatccattaatttgcctagaatagtacaagactttttaaagcaattgtcctcacagagaccacatgtaatatactgaaatatgttcatttttaatggctttgttaacatcaaagaaatgctgcctaaatttgatttcagatgaggaaggagaaagtaaagtgtgcatagtaaggctgtaggtgaagagttgtgagataaatagttcactcagttgtacaaagcacaactagaactttttgttgggaggcttacatacatcttgaatattcttaatgtaataatgttgactattaagttggctacacagtcactgtatgtactaggaactggtttccttgacattctagaatcaatggctaggagaggcattaatctttgaggggctgaacatatcatgaagctgagtcagtatggaaaattttcaaataaacagggtgctgaagttccatctgtctcatctgcttatgataagttcttattgattagtgaatgtagcttaagcctttgtatgtgtcctcagggggcagaccgactttaagagggaccagataacgtttgaatggagggattatatttcaggtgttttagcttgaaatttatttttt

SEQ ID NO: 80 - DNA, 2096 bp, Homo Sapiens
  AK126405
aaaaatgatgcaacatggcagagaaaatgcacttggcttccagctccctcaacagccattaacagcctcctaccgtggctcccacctcctatgtctccagagatcaaggcaatggggagggaaagctggcaggaggcagtcccttgtgggcctgaggccctttggctcctaagtgtccacattctgttctcttccaagtcccttcattgttaagctgattctccaacaagatgcaatgaacagatgcaatgtctaccccgcgctgggcgagttcccgaggccatgggctgtttggaatcacacttcattaagagacaaactgttccttcccttattgtgccttaatgcttatgacaaggcagctctgaattgatcccaagctggagcctctgaatgctttaaagagtttgaatatagacggtttgagagcaaaaagggagctttaaatattgctcagtggcccccatctcccctcttcccacatttactgaggcacgagatgggatgggacctgtcccgggtcacagcagcagtcgtcagcgccttggccctcctggcttgtaggatgctgcttttcctgggcttctggcagtccaggccaggatgggggagccaggaattcatgttgtcattggaaaagctgataaacaggagcacaattcaaaccggctgttttcctccttagagtctggcctccctctttctggctgctctgtgggtcttcctgttctgacttaggttcctgtcaagtacttaaatgcagccttaacatcccatacagtcttgtccccacagcttcatgtgaacatctccatgggtcatgcatatatcgtccctgcagtgtgcaaagtgtgctcacctgcactgctgcacaggcaaccaacatacttagtgcccagagccttctctctgggcccaggactcagtgatggggccttacttagccctgcctcctgggtggggtgggggagctgagggatcgtgaggacaagaggtagagggaaaagaaaagaagatggtgtttgaggataggggagggacaggagaggggacagaaaggtcccagagcatgatgatgaaggaaagggatctggcattcatgaagcacctacgatggttcaggcacaaacactgaaacctcaaattggccctggcagaaggggaccatcatagcaaggtggggggggggtgcagaaagtgagtttctgtttcaagaacagacttcactagttcagagttgcacagctagtgaggtatggagctgggctttgaatcaggtcagctgcctgaatgcccaacttcttcagcccttggaaggagagggtggggagaagaagaaggaaaagacaaggaagaaagaaagaagagagaaggggagaggaatggaagtccaaagagtgggaggaatttgatttcagaaccatctccagctgacccttgagccagcaaggacagggagaagggaagagcaagaacacgaagggcctcaagcaccgggatgcctttgccagccttagataattcccagagcgcacagagccctgcaggttcctgggtccttctccagagaagaggcacagagattctggcagcaaggttcagaaggggtgaggaaactgggcactgacaaagggaggggattggctcaaattcgaccccagagtcagctctggtggggttgggagcctggatgggtgggagaagatagaatccaatcgtgaaaaccataagggaccttcaaactcatcttgcccagatgtctcccatttcacagatgagggaactgaggttttgagagcttcccctgaggactctgcaaaacgaggtggtgtctggtttggatgaaagtggtcggtgattcctcaactcctgccctgcctccctctctcgttcctccctaacatgttatgctcttgttggggctgggatgccctaggcccaaggttaccaaatcctgggtttggaaaattgctgctgggggtggtatctaggaccagagaggaatctactatttctactgtgaaataattcagcagggggtcttcttacttcttccctttgaggacaaagtttctctcgaataaagagactgaagc

SEQ ID NO: 81 - DNA, 2595 bp, Homo Sapiens
  AK126880
agtacaggtttggaggttctgagaggctaacagacttactgaagcaaatagggactaaatgacaggagtgggacttgaacccagggctccctaccaaaatgcttttgctcactgtgttgcttttttgtggttgctgtaacaaattactacaaactaggtcgcttaaagcaatagaaatttattctttaactcttttggaggccagaagtccaaaatcaaggtgttggctgagccacattccctctggaggctctttgggggagaaatctgttccttgcctcttccagtttctgttgtgtatggggcattccttgacttgtggctgcctcactccagtctctgcctctgtggtcattatagccttcttttctgttctgtgtcttctcttctgtgtgtctcaaatctctctctctgcctttttcttctaaggactgactttaagagaatctacttgtcactggatttagggtacacctggataatccaagatgatctcacctgaaaatttttaattacatctgcaaagaccttttcttcaaataaagtaatattcacagggtctggggattgggatatggatgtgtcttttcaggagccaccatttaacccactaaattcattatatgctgtttaatgctgtatcttccttttggattgaagagatatgcttctgtttgaagatgggcaagtgggctagggaatttttggctagtaggtagaaaggaactttaaaaatatttctggttggtgctgtttagtaagtgcttgttaaactttcagaggtcaaatatcttgaacacaaattggagaaggagtaaatcagtataaagtgaaaaatatgatattttctccaaaaggcagtcactgactgctttggcagaaagaattgaggtgattactcaagagttccaccaaattgttgtgctagcttttacatttgcaaactataaaaaacgggactaaattaagtagcagctcactttttttattaacagtattacaagttgactttttcatttcttgtgtaattgagataaaagggggggtgtgtgtatgagagagagacaaagattttgttaatggttttagtatgattcatttcttatgtcatatgggcattctaatttgagtcatattaattaaggtgatctatgtatgtaaactctttgagggagggacttggcatgccttgtatacagctagatccccagtgtagttccggacacgtggtagatgtgctcagacaacattagctgtatgaatgaaagaacttcttatgatacccaaatctggcagccacaagtctcattacaatttactttatggagggtccccattggtaataaggtctattaattgtagaattgtccctgctgactttaagagacttcactctgtgtccttttatgctgacagagcctacaacttttttcatctccaataatcttcagctccaggccaaaaaaaagttgttcttgccctgctcacattaattgaaataagtcagtgagattccttctgcccaccacctcacttctcactagcatggggctcagctaccattagagatgttagagtggggctgttgtgcagttcttcagactattagtgctgtatgctatgttctgaggagggttcgggcttttatcttctcaaaaatgtgtaaaattttgactcactcatacagctttagatgttaacagatagaagtatactgactgtgtgtgctaggctcttccatgtattatatcagatgttgcttccagccaacctgagaagctaagtactaacattgtccctattttacagaagcataaagaagttaagcaacccaacctaagttcacaccaaaatttgaacccaggtagccttacttcattcagtgcccgtgttcttaaccatgtccaatgacagcctcaagctcatttgtttataagtaactcgttcttactttctaaaagcttttctgttttctttattttgaagctcagaaattagaaatctgactaggatatatatataggtatatgccctttttcatttatcctgtctggtactcaatgagcccttttgatttcataattctagtctcctcctgagggaagttttcttgtattatgttttgattattactttttccattatggtccttgttctctctctgaatgccttttatttccaattagacctcctggacctgctggttagttctctcatctttttattcaagaattccatttcttttttttttgctccagataatgtgatacacattcacctgcttttccagataacagatttgttctttggagggtctcctgtactttttacttcctcaattgaaatttaaaatttataaatcatgtttaaagaattacccaatctattattttgtttcagttattcccttgcattcaacagcatatacaaaataaaatatacaagtaaacatggtttattttagaaatgtgagactatttcaacattaggaaatactaatgtaagatatcactctaatagatcaaaggaaaaaaacttagaatcattttcacaaatactgcaaaggtatttgataaatcactactcattcttgat

SEQ ID NO: 82 - DNA, 2975 bp, Homo Sapiens
  AK128192
agatcgaccggccgcgtcgaggtgtttccgggttcagactgacaggccgcgccgaggtgtttccaggtttggattgacctgccgagccgcagtgttttccgcggaggcgtggactttcttctttgcacgtcgtggtgtttggagacgatcctccctggccggcgggattcatgacccttcgcgcagttgccccgtccagatccacgtgcaggactggtctcgcgtgacacacgcggccggcacctttcagacggaagtggaggggctgacgtgccgtgggcagagctctagccaggctgcccagagcgcgtgtcatgtccgtgtccatgaagatggtgtctctgtgtataggtcactgcaggggggagaggaaagagctccgtggaccttgcaggacgcagcctgtggggaaggggctcccgttctcgcctgcatcccgcagccctggggtgtggtttcctgtcttaaaccacctccatcagcctggattatgttcaaattgtggagcgcagcgccggagggggcctgcatccccaccgtcccttcatgtccaggtgcggtgtctccgtcccagagaaactgcatggagtccccccacggttcccactggagccagacctcagactcggagctcctcagtctctgctgggtcagaggcagtgcgttcattttaggagcaaagttgaattcaaatttggatgagcacacgaggcccctggtggagctattccttctgcctttgaaagttctgttgagaagttgcacataatgacgttagcagtcttcgctaggcataggatgttttaatgaatagtcttccgtttccagtcatctcttactttaaaacatgtctctattatagaactaaaaaatgcccatcatagagggaaatattggaatacaatgaaataaaaaagaaaattcaaataaataatccataacttggttatccagaggcaactcctgttaatttttttggatatatttcattcctaaagttctatctttttaagattgtcatgtagggaacacaggaatcacatcccgtgcccccttcctttcttaaaatagcatagttgatgccttattaaaatctttttttattatagtaagtaataaatttcagccagatttgcatgtgtggattgcatattctcttattttctctcttttcatgttaaattattgatgccgtgaatacaaacaactccctcccacgcttgctttgctttccaattaacgcaaaatgcgaagccagtctcgtgtgccgtgtgccgcaggtcgttggggctaacttttgaagagcaagagagaggagccctttgggaggtgaggcggctccagggaggggcttggtaaggagctgccgggtctgagtcacagtttctgcagtttcgtggggatccaggtgtgctggctgagaagcctctaggaaaagatgggtgaattatttcaggcagggcccagcttgctgtgtgacaggggcagcagctgggaatgagagaggcctggctaaagtcattccaagacccctcccgggtccttccttcactcggggccacccaccaggagccagcccgccacatgttcttgggggcatcccagcacgggtctgggtgtgccgtgcaggagctgtgagtctaatttcagggtcagctgctggactcagctaggttttcccagcgtatggggtgagaacgctcccacctgggctgggggctcagacactcgagctggcttgacagaggcagccccaacccatattctccttggctttttttttttttttttgttacctcccatccatcatccaaaaaaacacatgcccagcagagaatcgctgcttctgctgcctgctcctggctgatttccaggcgacccatgcctgtgtggctatgcttcttgttaagatattgaaaaactccagtgccagttggcaaatagcgcagtagtagctggaatgagtagtggcgttaattagtaacgaaaatcctaacgtaactgcactcgtttgagccagttgtcctaagtgccacaattacccttggtaaatgggtctctaatggtgtggttttagtcaatagtagaattattaaatacgtagaattctttagtagcattataaggtccagacaaattggggatataactgctgttagttcaggggaagctgaaagaggatttgcactgcaaacagtatttttgatgcaaacatacattctcccctgtaagttacctaaggacgtggtccacaggagatgggcttggagccctgatggctgatgcggtggtcaccgagtggacagaggtggagcaggtggaggtgggtgtgtctgcacttgaggaggggtgagcaaaggctggggtgggagagcagggagcaggcagtacccagtgggtgttgaggggtcaggaggagtgcaggcacccaggtccatgtcatgtgggtgtgtacctggccattatgattcaaagcatgtccagctgtgctcccgctggcaccaggacttacgactgcccattccatgggaaagtcattggaaaagtccagtgccgttccctgtgtcaaaatgtgacccagacagggtcatcatgtagctagcaatggccacatcaaagatactatgaacaattttaaacaacaccaccaacaaaatcatttataatagcatccgagacaagaaatacttaagaataaacaaatgtgcaacacacacacactgacaaatatagtgcattcatgagagaaatttaacaaagaactaaatagatggaaggatatacaatgttcatggatcataagactcaacactgttgatttcaattctacccaactggtctgtagattcaatgtaatccccaaagatgttttgtagaaatggcaaactgattttaaaatttatgtataaatgcaaaaaattgaaaataagaaaaataattttggaaacaaaaaataaagttggaagacttatcct

SEQ ID NO: 83 - DNA, 2948 bp, Homo Sapiens
  AK128384
acaaaaaagacatccagctctaaggagctcaaaacatcctgaggacagtgcctggaggtgagaaggaagcccccggcctggtccataccccaccaccaacttgcataatggggggtgatgtcacccaccctccactcccctcaaaggagcagctgctctggtggtctctcccaggctctgggggcggacccatgggaggggctgtttttgtacaaagctgtaacattgtggggacaggggactgctggggccaacgtcctgactttcggggccggcagcaggctgaccgtgctgggtgagttttcgcgggaccacccgggcggcgggattcaggtggaaggcggcggctgcttcgcggcacccggtccggccctgtgctgggagacctgggctgggtccccagggtgggcaggagctcggggagccttagaggtttgcatgcgggattgcacctccgtgctcctacgagcagtacttcgggccgggcaccaggctcacggtcacaggtgagattcgggcgtctccccaccttccagcccctcggtccccggagtcggagggtggaccggagctggaggagctgggtgtccggggtcagctctgcaaggtcacctccccgctcctgggaaaagactggggaagagggagggggtggggaggtgctcagagtccggaaagctgagcagagggcgaggccacttttaatcttttttctggggtgtttagagagaaggtgaacgatggaggagaggatttgttaggactctgggagaggcgagactggagaggacgaagggaaatcctggtttggggaatgggtaggagtgggggtaactgctattcgtaggcaaaaagagctgagcaggctgggaacagcgcgggtgggcaagggtcagcactgcgggcaggcgggtgggtgttagggggcagaaatcctgcagccgagggtgcagtagaacacagaagaaaaagcctgccaaacaaaagtggaacagagaagccaaaaagggagatgaacatgagtcagtgaagaaaagaatgaaagtttactgtttagcagtgtggatctctaatccgacttaaaactccttgttcccgattcctattcctcctaagccagagatccctgggtccagggtgagggcacggcattcatgcttacccacgggctggtcaacaaagaggtgctgacctgagagtagggcacataacctcagccactggggtacacttaccacccccgcccccgtgtagctccctcccctatcctgaaatctcccttagcacactaagtattctaggttaaacagcccagatgttcagggagttcattcgccacaaacacacattaaaatgcagacaatttgcctgtgagatgaggaaaattctctggaagatttaggccctgagagctgaaaagggaccctaaacattacctggtgacaactgccctgaggccagagaagagaactcacaatattggcatattaaccggtaccatttgtagttaggctgtcattaatctgggtgtaatggggctcagctacagtgaagcgtatccagaggaaatgtggggttcctgcagtcagctggggcaccgaaaagacccagaatttagaaccagataaaggctgagttcgaacctctggttcttttgtgatgtggtgaccttgggcaaattaatgtgtgaacctcagtttcctcaactataaaatgtaatgaacaatacctaccacttactattgctgtgaggaagaaaagagagtcaacatgtaccgtgtacagattattgatgtaattcaatggttcttttccccatcctcctaggaggtcactggggagacagggggcagggtcagcccagtgccaaaggatgggcaggatctgaagtgtggaaatggagtaaggctgtgtctgtgtcagaggtgggttgggaagatgtgagacaaacatcacaattttgcctaaggtgaatccaacccacaagtagagcacaggccaacagcagctcactagtacacatacttacaccagcagctcactagtacacacacttacaccagacgctcactggtacacactcacaccagaagctcattagaacacacacaccgtcagcttgctagtacacacacttacaccagaagctcactagtatacacttacaccagaagctcactagtacacacacttactccagaagctcactagtacacacacttacacccacagagacaagccccacaccacacggactcacaaatgcagaagaagagttgaccctgccctcatgtacagatagtatgctggtgtgtagtgagaggcggctagtgttcgccacgcctgttgcatcaataactattccacagaacagcatacatggtcaaggaatatttttaatttttacaatgaggactgagtgtttgctaaatgaagaaatcaaaggagtacattctggagggctggtagactcccagagccagggtttttgagatgagagtgaaaataagcaggctgagagcagaaagaaagaaagttctgcagatagaagttaggatattaccacttcggccccagcccagccagtaaatgtttagaagcatagtagtaattagcaggtaggagttgtggggaggaaaggaaactgacatgatgggaagcaggaccagctacaaaatcttcaggaccagctcagaatgaaaatgccggggctcgtgttaaatcttaggatttcaacatggtgacagcagagcactaaaccaagcagggggcccttctagcaggaggccccatggggacctaggaaggaggtcacatccatacaaatgtaaagaaatgtcagagtaaatttcctccattgtccaggagattcggaataggttctcctaagactgatatttcttcattttaatagagttgctcagaaatgaaaaacaatcaatgggaag

SEQ ID NO: 84 - DNA, 5088 bp, Homo Sapiens
  AK130294
ggcctttttttttttttttttttttttttttttttactattcccttggatctggcttcccaaagtctttttgctttcacctggtcagacccagatactcacacatctacctaactaacagactgtactcccacaggggttccgggatagccccctcctatttgggcaggctctcaccaaggaactaatcgagcttccccttgctcctagcagcctccttcaatacatcaatgacctccttatgtgtagtccctcctttgatctatccatcaacacatcacccaacttctaaatttcctctatggccagggatatcaggttttacctacaaaggctcaagtagcccaaacccaagtcactaaccttggactcaccctaacccctaattcttgagccatgccagcccgatggaaggagctaatacaggatgtgccccttccccacaccaagaaggacccttcctttttgggccttgttgggtacttccagctgtggatcattaactttggcctgttgaccaaaccactctgcacggcatcacgtgggtccatcctagaacatttggacccagcttgcccattaactcccacttctaaaaactgaaagatgcccttttaatgtcccagcactaggactacccaattccattaaaccctttaccctgtatgttcattgtaatcaaggccttgcccttggatttctctgccaaacccgtggcaacactccagaagccattgcatacttctgaaaactggactctatcatccaaggctggcctccatgcttgaaagttctggatgcagctacattgctggcctcagaggcacaaaaactcaccctctaccagcacattactattgcatcttcccataacttatgggaccccatgagccattgatctcttcttttcctcctgccatccagcttacagcaaccctctaacaccttccagagatgtaaaattctaaatccaaccaccctcctccctataagtacttccaattctgaatcccccactcttgcctagacctcttagcctccctctcctcccctttccaacacatttcagaagcccctttgcggaaggaacccacatggttcattgatggaagctcttttaaggaaccatatctggcagctggctatgccatcattgccgaaaacaaactcctataatccaatgctctctcatcacatatcacctcacaacaagcggaactatttgccctaaccaagaccctcactctagcaaagggaaagagggtcaacatttacaccaattccaaatatgcataccatgtcctacagtctcacactgtaatctggcaggaaaggggtttttctaactacaaaaagaaccgccataataaatggcaaactcatacacaagccgctggaggcagctaaactaccactagaggccgtcattatccattgcaagggacaccaaaaggctacagatgccataaccaagggaaacttcttagcagattcggcagcctggcaggcagcccttagaacactattgttattgcccattttccctagcatacacccaagaagaaaaaggtgccttgctggctccagggctgttcataacgaaagctgaatttacttagactacaaactcatcctacccaagacccaaaaactttctgttctcacccacatccataaccaattccatgcgggttatctcccgttgctccaatttctaaaaacctgtatacattcccttaccatggccatcagcttggaccgcctcactaaaggttgctctgcctgcagtcagacttcccctcaggggcccttagaccacctccttttccctcccttcaggcccaaaggccagttgccgggacaggattggcaaattgacttcactcatacgttcccccataaagaaagtctgatatctcctcacgatggtagataccttttcaggtggatagaagcctttcttactaccactgaaaaggcacacaccattgcctctaccttcctcacacacatcatcctttgattcagcctcccctcatctatacaactggacaattgaccagcatttatctcccaagtcactcaacaggtttctaagtctttaaacatcatatgggtttttcacattctctatcacccccaatcctcgggtaaatttgaacaggcgaatgccctcttaaaacaacagttaaccaaactttccctagagatcaaaatgaaaactgaatatcacttcttcccttggcccttatgtgcctcagggccctcccccgaaaacctctaaatctaagtccttttgaacttttgtatggacgttctttcgtcctacagaactttgctccatcccctcccttacaggacacctggccagcactgcacctcactcaacacttagtccgacagtacactgacactcacctccccaaacctgaggattcttcccaattcactttcttacccttacagccaggagactgggtctgggtagcacacccctcctcccctttccaacaaaatggaagggtccctatcaggttatattcaccatccccgctgctgcaaagttaacatcctttccctattgtatacaccattccaaatttaaaaaggcacccggcccacaccccgaagtctcctcaccccggaaatattcttcctttcccacaggaccaacctcgctgtgcctaacaagaattccagaagtcacccatccgaaaggcactggcccatgacactctccacttccaatcttaaatcttttacttcataccttgtctcagatctctcctggtaccccttccccacgcccttagataatccatctcaattcctcatgctaattgaggagctatggctgcaaggcaccttccaggatttcacacctacacaaatctcctttttctccttttgccttctctgcttatgggatattctgagtccccacccccaatcactgacagctgggcccccttcatcagcctcacacaccacgtattaagtcagtcacaatctcccctctcctctaactgctggatttgtctttctacacacacccaatgattcacggctcttccggctgacctacttacatggacacagtccaacgtgagcttacacatttcttacttggctataccattcttggctgattcattcctgaaaccggttcataacctggaaactcagctaaacacctttccttcaaactcagctctctcagcatggtttcaggtagggctgttgccctccttcacctaatagcttctggactaacatccatacaaaccaacacagcatcatctaaaccaccaatatgggggtaccatttctactcaaacttccttcatatccccaccccccttatgtctcagccgaacctaccctaatccagcccacgccacaatggtgggacaggttccccagtccctatgtggtcttatttttacccttgcactccctgtagaccatcaattctacaccctaattacaaaatcatatccacctctgcctggcagaaggtgttatgcttttctggctcgcctaccatccacacatccctacacctcaccaccggatcctcttttctttccttccatccaattcctggcttccccgctgccaactctgctctctatgtctccagtttaaaggtgccccctggaaaaaatgtaacaattccctcacctgtgactggtacctgacagccaccacaccggggcagcaatggctaacggttgacaaagacaatttctttctctctccaaaaccaaacagccttcatcaactccctagccaagactccctatcaggcccttacaggtgccgctctggctggcagttacccaatttgggaaaacgaaaataccctatcatggctacctaccttcacctacaacttctgcctgtccacccccagtctcttctttttgtgtgatacaaactgatatctttgcctaccagccaactggtcaggaacttgcaccctggtctttcaggctccaaccatcaacatcctaccccctaaccaaactattctaatttctgtagaagcctctatctcctcttcacccataagaaataaatgggctctacatctcatcaccctgctaacaggattaggcatcactgctgcacttggcactggaatagcaggcataaccacctcaatcacctcataccaaacactattcacaaccctttctaacaccgtagaagatatgcacacttccattaccagtctccaacgacaattagacttcctcgtgggagtcatccttcaaaactggagagtcctggacctcctaaccactgagaaagggggtacctgcatatacctccaggaagaatgctgtttctgtgttaatgaatctggcattgttcatatcgcagttcgtaggcttcatgacagggctgcagagctttgacatcaagtcgctgactcctggtggcaaggatcatcccttctaagatggataccctgggttgcccccttcctaggacccctgatcttcctcttcctgttactaatgattgggccatgcatatttaaccttgtatcccgcttcatttcccaaaggctgaattgttttatccaggcaagcatgcaaaaacacattgataatatatttcacctttgccacgtctaataccagagcctacgaggaaaccattcggaagctccagaacccaggccctaatcacaacgcccctatccagcaggaagcagccagatgatcaacgacgccctttttcctttttatactaaagtaagaaataagaatgttagcccaaactgcactattttgcagacccctaccattttacaaactggtcagagtggaaaattccaccagggcctgagctgtgagaaacatcctgtcaggcaggtcccaggcctaacccctggctgcactaaattccttcattatcagcagccaaacacaccgcccccaccccattttcacaacaatcccagacctctcctgcccgggactgtaactggtccagcctgtaagcgggaagggggctctggcactagctggtaccccctctccgcaggtctttctcccaataaatctgtgttgccatt

SEQ ID NO: 85 - DNA, 2017 bp, Homo Sapiens
  AK130706
tccacacccctaggtggccttgtggggcaggccttaagatgaccccaggcaagcttgttgatctatgaggccagggtctgggccaagggaaagacttttggaccccctgccctgtcaaactcgggatttgccagccagccccaatgcccttctattagatttgatgggtgagtcagacaccagcccactgagtccccaggactcaggaccccatttcaagctttgagtattacaaccccctgccccagaaggagtgggactcagtgtcgctctctgcaaagaaaccatctctacaaattcttttcaaatatctactcttggtacttttttgccctcctcgtgttgagggatggcagagtcagggagttcagactcctgcagaaggaggccgggtgccatcaggagtccccgtttggtgtggccgccttctctttggtgtgagtgtcgtcctctctggctgggttcttattttctacatgtagctcaggcgtaagctggtgcccacccgtgttaagtgtcaggctggtcctgaagcagcccagtgcctacagtgaggaaggacctgccgggcaaagcagggcgctcatcaggccagggtttctagaaccatatcccaggctgctgagaatgggtgtgtgggttgtgtgatgcagaattctaggagatgtcatttccatcatagtctagggaaacactcgagcctcgtggagggagatggttctggagggaggcttctgtagcatccaagcccaaggtgagcaggagccccctgagccgagctgctgggactgaagaggaaaaggagagagtgggagtgagatgctaggaggcagcgctgatggcgcttggggacttgactgagaggagtgggacatggagtgggtttccgggtgggtgctcctgtgactcctctagatgggggagacaggagaaaatgtggaaggggtaaggaaagagtatacagggatgggctgaaggccacagcccttctcggcccctggggagatgttgggaggtgactggatacacccagtgactggtctgaagcttgggaacaagttagggctggaaaaacagacttgggcatcaccgttgtatttggagctggaaataggcccagattaggaacctgggcttgtgaggactggattcccagcgaaggtggaattgggcctgccagccatttgtatacttttctgaagagcatggaattaaatagcattgggcaggttggcactgggggaaagaagaaccgggcgaggttaggacgtggccttgctggcatgataaaaagcatgaggaaacgctttttacctcagaccacacgtgaattgcaagcagctgccctgatggtgccatcaggggcagtggagatacaggccgctctcctcagccatttcctttagaccaagagagcttttattgtgtagcagatgaaagacccgatgagaatttgaggtgtatagtataatgtaaagtttggaaataatgattgtacttgttaattctgtattggtctttggaatcaagggtttctgaacctgagataagcagcttttttgtttcataaaagctctagtcatttttctgtgttgaaagtggaccacagtaatgttcatggatttgttggctgaagcacttccatgtggcttagaagcttagcagacacggcacctccgcctttgtgaactgtcattggccactctgcaaatcctggtggtgcagtagtttagaactgtgtagaaaagatctggttgtagaggacaggaggctgatccagaggcgtctagtcacttgcctgaatcacagctaaaaagcagcagacagaatgaggactcacagctcctgatttattttttccttttgtttaaagcccagtgtattgaactgggcagtcagcatggtatttactgttttatattgtccaggtaagaaacctggagcttattgggagcagaattacaaatataagcaatgccaaccttccctgcaccttagcattacctttaatagtgtc

SEQ ID NO: 86 - DNA, 1920 bp, Homo Sapiens
  AK131352
caagtgcaggcatggtccccatctagcagccagggcccacgaatgacatgggtcacacaaggctgactaaaatcagaggggcctgtgtgtaggttgagagaaagtccatgagaaatagaggaacagagagagatagccagacagcaaacaccctcatccagtctgcaaacaccctcatccagtctgcaaacaccctcatccagtcagccctctcatttcacccagactcctgcaaaagcttccagaatggtcttccctgttatacagcccttgccactatccctgcccatcctccacactgggccaatttgccccgtaagaacatagatttcttcaagcccatgcttccatgtcttcaatggcttcctattactcttagcacaaaagcccagagccttcatgctgtctaatgtaggctgctgtggcctgagttcccctgaagggagagccctaggcaaggctcccaggcagaggatttgtttgggaagtgattctaggagcaggactggggtactgggaggagtgacacagagaaggacagaaggctgatgccgggagaaattcttgatagggtcacccatgtgggcgactggagacctcctgaggagtcttcaaggagcgtcttcagaatgttcctctacagggaggagagagggaggcctgtaaccactgctcctgtcccccatggccttgccccagtggacattaattatctgtatttccatgcatagaatatagaactgctgggcgcctcagctggagcccagagcaggggcaagagatacagaatgcacaaaatcaccccagaacctctcctaagtcactcgtaaagtgcacccagggcctacttagtccttttttatgtagcatcctgcagaacacttgcctcagtccctgtaactctccatcagccaaggcttccctgaccttcagttgattcatctatttcttcctgaagaagtcaacagagcaacggccaccgacttgcctaacgccagaacattgtgtttcatttgtctgtcaattgttcatcaattcctggataattcccattcttttcatacatttcacttaagctttgaatgtttctggcactgagtaatttacttcttcagtgatccagccagcatttgccctgacacttagagttgaaatgccatcaggctacctgcatttgatgcaattccactgtactgctagtattgtttaaaaattttcaattgcaagcaacagaaacagaaactatctgtcttaaacaaaatagaagattcattggatgaaaactagagcaggtcagaggatggaaggaagaacaaaatctacagaatttggaaggacaggagcagaccattaccaacatcaggaatatatggtttgccctttcagggctctgcctgcacctggcttagctccacacactttgattcctagtgtctctgattaaagtttcacatactcagtagacagaatagcttgggttagtgactcttcttgaactaatcagtgaggctatggtatcaggaatggggatgggtaacagagacacaaaccctaatgggaagcctctggccaaacagccacctgaatttgtgctcattgtatacagtcaatcgcttgctactgcacacacactcttcttctcatacaaacaaaaagaactctccttatctgctatgaacccagccatcccaaggaaaaaggcaaatgcacttgcctcttccccagtgagagccacacacagcatctccaccttctgcatgctgaagttatgtcacaggaggagggcctcagcacacgatcaatttttcttttggtccattggcagcttctgtctcagaatttttgtgtgtgtatatttgtagaaaataaagaggtacggtcaaggctacagccactactgaccattgctgccaccatcag

SEQ ID NO: 87 - DNA, 500 bp, Homo Sapiens
  AL044810
ggagaagcctggtttgagtgagtttttcctgaagcaaaagggaagagcttaatttcaaaaggaatatcttgaaagacgcatcaactcaccattagaaaacatgaaacgacagattatatcctaagattgtgtgaacctcttacctggaaacccgtacaattgctttatctaccaatcctaaactattatatcttgatctttactcaatcctaattacacacccacattgaaagacctatcttaattcagacttcaaaatcttacaaacgtccaagtccctcctttgaaatgctactaagactgcagtaagaatacatagcatgcagtgactgagaggaagagagatactaacacttgaagtaatccagtctatcaataggagatggactgctttgatttaaagcgatttacaaaaggatttggatacctcatctctcctgtttcgccaaggtcttgactcatcgctgcagatgactaaatcccattgagctaaatctcct

SEQ ID NO: 88 - DNA, 2339 bp, Homo Sapiens
  AL049390
cggacgcgtgggggcttttagccctgcggagggtggggctagagcaggcaggaagacgagctaggagcctattgctataatgtgggtgggaggtgagggtagcttggaatgagattgaaatagtggagatagtgaaaatagatttggggtacattttggaggcagagctggtagatactgatggattaaatatgaggggtgggaaggagtgaagagaacgtacacatgagggcttaagggtcttgctggagcagccggagtgggagatgctgtttgctgagctgctttgtgcgtctgtcagaaagcagcggctctctttcgggcctgctaagctggggatacatactaaacactgaagtggagctcatgagtggcacatggatgtttggatctggaccttgttcagttgaggggtcaaggatagatacatgaatttgagagcctccacttacagttggcatttgcagtcgtgggacagggtacacttgctgagggagagaatatggatagagaagagatttgaggacagagcccaggggtgtcccaacaaggtgagttctgggagagaagtcagctggggaattgcttcagtgtcctgaaggcagatcaatgagaaggagcagttctataaatagaaatccctgcagagatgttagaaaaccagcattacagcatgccaagagatagaatagtgattaataactgcttaaaagtgtatgttctgccactggaatgctaggaaagctacccaaaaaggctgttcctaattgaggaatatggttcttaaatgtttacattgccttatatttgtgatagggattattggctttgtgagcaaagctctttgacatttgtggatggagtgtactcattattgagaggaattttctgaaatgaatgtcagttccttttttcccctaagctttgctttgaattactatacagtttacttaagaaacctgtgatcagcgagaggaaagagaagtgatttctgaagcttctatggccacttcctgctgagtcttagcattctatcctgtcaagtatgctaatgggagaaggagcaacatctctggatacaaaggatcgccaggatgctgatgtgaatagtaggggtgagctagctctgtcctcatgcccagaccttgtcctgatctgtagcacacatttgagagacaggagctgtattgattgcctattgctgctgtaacaaattattacacttagtggcttaaaagaacatgtttattttatggttctggaggtaagaaatctgaaacggctctgtagtaggctaacaccctccaggtgttaggctgtaactcctgaaacgtggatgtagccttatgtggaataagggtctttgcagatgtgattaagcaccttgagatagggcaattatcgtggattgtcaagatgggccctaaatgccacctcaaatgttctcctcacagagatgcagaggaggattactcagaagagaaggcagtgtgaccacagaagtaggaattagcatgctgtggccacaagccaaaaaatacatgcagccaccagaagctggaagaggcaaggaaccgactgtccctagagcctctggagggagcacggccctgtcctgcctaccccttcgcttctacccagtgataccaatttcagacatctggagtctggaactgtgagagaagagttttctgttgttttaagccactaagtataggtaattattaatgacaatttgttatagcagcaatagggaaccaatacagagtctcactgggctaatccagtgtcagcgggactgtgttcctttcaggaggctcttagaatctgttttcttgactcttccagcttctagagtctgtccacattccttcactcatggcttcttatgtcttcaagccagtctttgacactttttagatagtgattcttctgcttccctcttccgcatttaaggacgctgtgattgcattagacccaccttgataattatcttaaggtcagctgattagctaccttaactccatctgcatccttaattgccctttgccatgtaaggtgtaacatactcagattctggggctatgacagagacatctttaggagctgttattttgccttaaaaaggaggcaattatttaagtatataaggtgaatagttaggtctttctctccaggaaacctaacttgtcattcagcggttaccatgcatgggtatcttcttccaattgcctgagccagccagactttcatgtttgagcattcagattgggctttatttctcaaggcatgtggcaaacctcacaatgacactgaaaggttaaaaaaaaaaaaaaaaa

SEQ ID NO: 89 - DNA, 2702 bp, Homo Sapiens
  AL049435
ggaaggaatagattactatgcatttttgagaggatgaagaaggcttcttggagaaggtttctgaaaagagatacggaattaagagaaatagaaaagagcactgacgaagcactcaggatggctattcaaggaattggggatccacagcagctgtgcacaaccatccctaatgccagaaaaatggggtaagggtgaagggaactgggtctagagctttgcatgtttttttctggttaacccttagagtcaccctgaaggtgtggatcccatcttataataaggtgaggacactgagtcaggaaactaacttgctaaaatcaagtcctcccagtcctcccatcaggtccttccagatctggaggagccaggatttgaactcacatttgtctgacttcaaaatccatgctttttcttgtgttccaaattgcacaatggagtcactgccagttcaagctcctatgaaaagggatggatgtgaaaagtcatttgttgattccacagatttttagtaggtaccatgtctcctgcctttatcactatcctactcctctgctacaacttctctgctacaggcacccactgcagttacttgatatgagttaaatgaatccatccatccaaacttccattcattgaataaatacttagcaatggcttcctttgtatcaggcactattctaggagctggggctacagtgcagatggaaaccagcaaagctcactgccctcatggagcttatatgtgagtgaataaatctcagggtggttctcctgtcataggtcctggctcctctgccagctcttccaaatgggttcagagaggttttctccttgtcctgttgtgtaactgataatcccatggtggacctcactttgctattcatatgcactaagtagtttatggtgtgctttgtggctggcaattgtgacagattctattcttctattggtatgtggtttctttggggcatttgtttggatactgatggcatcttccgggggtctgaggcacctacacaaacctcaggtcactatcacgtgatactggagttgcctgttaaattatatttcttcttccacaaaactgcaggttccctgagggaaaggtctatgtcctgctcatttttggatccctaatggctggcacagtacctggtgcataatatggttcaacaaatatttgtaaaatgaatgaatcaaatagtccttcaaagcatcttcagaatcaagattgtcatctagattgcacccgaagtttatctttctagtattcagaatataatcaatcattgcttaaattattccatttcatcattcttgaataaaagctactaattttaaatactaatatctgagatatcttcgaaaagaagattagtcgttgtatgtgttgcttataaattttctctatggtggaaaatattcccaaaccatgtctaagcaatgaaaaaccagtgttctggcaggaaataaactgatgtttgttgtgttttgtatctgtcttcccgttccaaatcatttatatatacttgatggtctgtgggcttgacttgcaagtattttcctgggagacatttttattcaaaagacctgtattgcctgccaaaccttcatttaagagactcattatggatgtcatctgcatcattgcaaacttttctggtcgtctctataaatagcaagataatatttacagagttttacattggctcttgaattttaaaatattcttatagacaaacattaattggaatggggggtaaggaggtaggaatggcttacttgcggaaatgcaggctcattgttgtgtctagtaggtgctaggtgcattcacacatctcttaagctttaaacaacctattgagccggtttccatttccttgatctattagatttaaaaaaatgaagcataaaggagttggctcttgccctaagtcatactactgatggaatgagaatacaaaccaaaaacactttattcaagtccaggaaatatctgccttgaaaaagaataacttaaaaattaaaagtgtcctctatttgaacatgaaaacagctaataaagatgtgttattttattttattattattaattttgtcctcccatattggcaaagataaagcaattgacaaaaatggaattcttgttcaatactggcaggagtgaaaattggtagaacctttctagaaggcaatttggcaacatgtatgaaaacctaaatgttgatacacctttacccagcagtttgtttaggaatttatcctaatgaataaaagttgtccaagtcttcaaacatgagcccaaaggtatatttcatgatgtttatgatattaaaacattggaaacaactgaaacatccttcagtaaaagatggattaaataaattccatgcagttgtcatttaaaaatatttagatatatgtttattgctatggatatatgttcccaaaatattattgaatcaaaaagtagactacaggatatatgttgaatatgagctcatttataacattgaatattttaagataatgtatgtttcatagagagatcttcaccaaatgttaaggatttttttttctgggctgtggtatttgggtgatctttacattcttcagactcatgtgtgtttgaaactttttataatgaacatatatcatttttattagaaaagaataaagtttttgaaaaaaaaaaaaaaaaa

SEQ ID NO: 90 - DNA, 3561 bp, Homo Sapiens
  AL110204
cggacgcggggtaagaaactaaatccagagcttttaacaggtacttagaaataagtattgggtaatcactaagaggacattgactgcaccaaaccaaagctatagaaagaaatgattgactttttaaaatatattcacattaactgtcctaggatacttctcttgaggctttggaaaacttcttccttgaaatttgcatatccactccagttctgtcaccaaagattttaatcttcagatcgcaatttcctctctcccagaaaaaagtactacaacaggctcaagggatatgctttggtggtcaagggattacactatggttttccttctgttcacaatggtatttacaggagaccttgtcatcagaggacgtactgaactatctttatgactttggatttgatcagaggtttaaaaaatagaaaaaaataaacaacactacttgacactgtaaatgatctttaatagagtcatgacctggagactgatggagagaaagaaacttccatggaagagagtgagctaaatcatttagaaccaaacaaaggtcactggtgaaacatagggcagcatgtacacagtgcagatcagggttctgtatggccagagccaacagcagtgaccggtgggagagtcagacaactggccaatgaattcaagtgttgaaaaagccacagtctggattttgttgtgatttctggagtggttgaaacgcccatgcccatggcaaggaaaatgcttggaggctgatctgttgtgatagtgcctttcttgtcgtagtgagtactagattaataatttattcagttacgcttttctgtaccattgcctccagtcttctgaggaggtttgaagggacagtatccacttaggatgaagggacaggatattgctctggaatgctgtgatttgatgatatttgcactagattctaaactctcctttaaactggagcaactgactgagagaaaaaccaaggacagctcaaagttaaaagaaaccaaaagcagtattttctgacagataccatttctttttctccttctttttttcctggaagaaaacttcacactagttggctaccgagctcaactcttaccagttctttctctttattttttgtttccatatggaaccatctgtgtgaattagtcatcagttaggtatagttaacgtaaagagcccctgccattgaaactttgcacaccttctctgctttattgaaggcaagggccagtgggcagtgatagcaggggagggaccctccagaaccacccagccctccaggaggccaataagcatggatatcatgtcaggagctgagctgacatatatttactcagaggacattggggtctgtagctaatcctaaagaatgctccgcaacagaaggaaaccaatgcattgtagaaaacaaagggagatggtgcccgaagtctgcctgtttctcttctcttttctttcccatctcaccaccatgtcctctctaacagaattatatttcatctcatatattacatgttactagaaaagtcatttggttccttggtttctctctttatcagtgggctggaaattcctccaaattaaatataaataccagtagcagctcccctgtgtccagccagtttctcaaatgctgtccacctggtcttactgtccacctaacataacttggaggctttggctggctcaaccacctgttcactttattttgttttcatttccatttgaacttgaagtgaggctatggaaaggtggaaatcatgggcaaggtttggaggctgcaattctagggcatagcttgtcaggagtttatattatctaaaatatatctttctataccccttttcattttaatctgttgccctgattataatttctttatatttgtggttatttttataagaatagagtccatttgctatgtctatttgagtactttttttctattgtccccacatggatgcagtaccaacctgttaatgaaatatctttttattatattattaatatgtaattctactgtagaccaaaaatataaaaacaaatttgttcattttaaagatataaagaactagggagtaaaagattaaaagttgaaggaaaagacagaagagcagtggttaactatgttgagttagaaatctaagagtagccttacctgttttttaaccagtgcttgccaatcataccatagttggaattatgtaatcttggctccttcatacttatgttctataattcttgtttgtctatttgttttctttgatgtaattgaggttgcacatcatgctattcttggcaatgcctgattctattgtattgtacttttgttagtcatttcctttagaaagatggggggaaacgtttatttcttcttttaatttaaaatttgtttaatgcactggaaataaaattggacatatttcactgtttaaaaaatcagaaacaaaacaaagcaaaaccatgagggaaaaaaacagcaaataagcaacaggggaaaacagctatgaaaaaaatatatttgtactgaatacacatacaaactacatcccacatgaaagattaatatcatcaagtaagaaaaatacatagtttaaactacaatgctgaaaatataaaaggaacctggtagttcaatggggatggagaaaacagagcattcctctgagagcagagatcttgtcattattgcaattaatgcccaaacaggttaaatgtggaagaaagtatggaggaaataaccccagccttcctcataccactggatttccacatcaccttttaacttatgcttgagctcccttttgagaaaaaatatttaaaaacaaattggctatgtaacaaatttgtgtgtgtgtgtgtatatatatatgtatatgcttatatatatatatatgtatatgcttgagaaagtggtttttcaagatgtatgtgtacagtacacacatggacacgcttcagtcctctgacttcccatgtgctacctcatgtgtttctcttctcatgaggatttgcaatggatagttgtacaacctggggactgtcagtgactcattggtatcagcatatgctaaagaagctcttgaatccaatcttgaaacctgatctcccttcgtcaacattccccaataccaaactggcccgtttacccatacaaatgcacagtaaagggaagaacagcggtatttttcctagccaactgactctatcatttgtttaatgtttgctggtttttttctggttttgttttgttttagagcaggggtgggagtggctgtaacttcacaatcctaatacagtaaatgttttgcatcttccatgttttatgcaaaaacagacatttaaatcaataaataattgtgccctagactgaaggttaatgtttaggagaggaaaaaaattgttggaattttttctacatttttttgtgaagaatcttttttggaaaggaaggatacatatttttgttgtgtaatattttctatttttgaatgcattttattggtacaagactgtttttttggtgaagacattatttaaaaaaaaaaaaaaaaa

SEQ ID NO: 91 - DNA, 1664 bp, Homo Sapiens
  AL133627
ggaggcggtacacaaaactgccaccgtcccattacccaacagcctgcctctgttgaggggctttcctgggacttcagactggcaccctcattgtgcttgcagctgtcatgtttccttgcccagattgcccatagctgcttccctggcctcggccttgaacccctctagccagcaactgcccaggtaacactttataaaactgagccgctgtccctgcttggagccttcagagtagacttcagacctaggcagagtatccactcagctctgccgtttctcctgctccccacttcgggcctgcacgcttcccgccgctcggcatgctccttccccttctccgagaatgacgtgctccccgcactccccacactgccgccttgggaccaagaaggtgcctctcacaccttactgctctcctccaggcttcgtggttgcttttcagcctttttccctggatttgaactttaacaaaggtaagatggaggtttatttttcaccacttggctgtgagttccttgaggataggaacttgtgttttactcagatctgaatctccattgctttagtggtgtgctcaatacatggtaggggtgaatatttaatgaatgaatgagtgaaaatatctaaattttgcacaggagagcaattagagaggcttaaacaggaaggaagtcttctaattccttaaaagcattatctcatatttgaagagttcaagtttgatgcaacataaactgataaagtttgaaataaaaagagacaggttggtaggaaagaccattcatatcctatccccaaactggcttaagtccactcccactgcccccagctaccacctttttactttattctacctgctatttctttggccaccggaataataagcctgatgtaaattctgtttcatactcccacaggtcaactttttttggagtttgacaataattattccaagtcaagtaattcattgattttagtggaagattgttttccaggtgttattcttccatgcgcctcacccccatctcataaagtagaaaagagatgatttaatttatgggtctagaaaataaaaatgtaaatacttgcttgttaaattaatttttttctaccttcatttttacctttaatatttcaagataatattggacttaattctctgagacacacaaacatcctgcataagtatattgacaacatacattttatatgtaagtgaaccatatgggtgagcctctgctttctccctgacagcgctgttctttaagaaattaaggctaaccaggtctataggttttaatgggagatgtctcctaacttttcaaagaccagatgttcttgttatactgataaaaacttattaaaaaaaaaaagaaatagggattgatgatgttcaacattattctctttgaacaaatacatcatttgttcatacttggtttctcagtatttcaacaataaagcatgttttaatgatttgtctttagaggagtgagcactcctctgggggtatattacaactgggaaaaaaaatatagtttgaaaataaaataactgtttacccttaaagaaattaactctatggtgccttaaggttacatttgcaataaacttttttacatcttaaaaaaaaaaaaaaaaaaaaaaaaaaaaaaaaaaaaaag

SEQ ID NO: 92 - DNA, 2352 bp, Homo Sapiens
  AL157484
ccagaatgagatacagccaatttggctttgatgacccagctgagagggaaatttagatacaattcaggaatatcatgcccaaaaatagtggtcccagcaaccaggacacagagggaagacctggatattgtcagtgattggtggagggggacatcttggaccctcctaggcctggtgtcacatctcccatctctcagaccccacagaggccaaggggccttggctctgacccaggttaaagagagccaccagcccccaggctcagggagctgaaaccacccatccgcagaaatctaagggcaaggagaaatagaaattgtctgttccttcccttcaaagtgtaaggcctcttccaggagcaactggagccaccacagcttctcagtgacattgggagggcttcgggcccaggaaaaacccaagccttttgtcctgagagccgagccacagcggatgcagtggcgtcagcatcccagagcggcagcttctctcctgcctgtcactggggactggttgctctccacccatccaggaggaaggggttaggtcccagtcttacactcttatagggtctcatggacataggcctatgcctgttctgatatctataattttttaaactcaaaaggaccaaaacactcctgaaccctcatctatacggcctgcactgggcttggtgtttcctcctggcccaggcagctccatctcttctgccattcctcctggacgaaagtggcaggaccccacctctaccacttccccacagggtcactgcacagcggcttcaaagacacgccctgttgaaggggaaacatcctccccccatcacactccaactcgtcaccccaaaagggaagtcaaagcacaggtccgtggggcctatggtttgtagacactgacacagtggttttcaaaccaggtgctgcggaacccctgatattccacagagctttgtcaggggatgctaaagtgggaagatgggagtggaggcaaaggataggtttccagccctcctcccatttccgccgccaccagaataactctgcttttatctgtcttgcctactgagatttcattttcaagctttctttgaagaagaacttcaaaccaccatctcgaggtttgatcttagaccagccagcacaggttctattcttgctgttcatgttggaatggctccagcgttccagtacaaagtgtctttgtgttggaacttgggtcacagacccaggcacaagcatttatacacacacacacacacacacacacacacacacacacacgtacatagttgatggtttttctagccaacccaccctgaagctctggccaaggtttgatttggacagggacctggtgctcagtggggatgggtcgtgaccctgatattggcccatgaagcatggggagctctggagcaaggaaacaggctcaatcccccactgaggacttgtgtctgcacccctatctggcaccccactttcctggcctaggcccaagggacacagcaggagaagcagtgtgataggagagaggctagggttaaattcatctttacacagcgccggatggatggaaatcttggctcacataaaagacagactcagggaggattttatgacaaaagtccctcctttgagggcaggattcccccaggaatcctggacactttagtgagaactggaccagcccttggcacaaaaccctgcctgccctgtcccccactcccaccccccagggaattctaggtgaaaatgtgaagctcagggcacagcaagcgcatgacacgggtgtattacattcggtccgagtgtgtccttagtttccctgtgtgcaaaatggggctagtccaggctcttcccacctcactgggacaattgcaagggtcataggagaggtgggtatgataggtggtcatatgaggtggtgagtatgagaggtgggtgcctcacaaactcggggtatggtcctgacctgcatggcagatgagcagagcacttgggaacgagcataggaagtgccatcttcccgggcatctctgctcagtgttaaggtctagccacagacactgtgggacctgcctcttcctatggaatgggggcctgcatgggttgtgtcctggggcaggagtgagggatggctgggaagaatctccaggtctgtggcccttgtgttgagtgattattttgtgacactctcattcctggaccacctgccaggtttatctgttatacctgtggcattcttattatgtcagacaagttattatagttcattcaactctaacaaatgaacaaaagaacaataaataggaggccattaaaggtcttttgtggaaaaaaaaaaaaaaaa

SEQ ID NO: 93 - DNA, 1474 bp, Homo Sapiens
  AL359560
attaaatatgtgcaccaaaaactccccggcagtctgtctgcctggaacagcatttcagcccctcaccttggggctcttagttctttggagcctccatctgctgaggaccctgacgttccttgccagggtctgctggatctcacccccagggggtcctgccagtctggtgtttatcagagaaactgcccatacatcaacgggaggtgagaagggatgcttatggggactattatacagctttagtagtggaaaattagaggtttgaagctgtcatgctctgtctctgtgccatacagacctttctatataccctatacaacagattgaaacaatgaattgcattgtacttatttacaatagatcctaagttattgatgattaacctgtttttctaagtaaagtctagcccagctctattgcagcacctggtacctcttagaggctcaataaatacctcctgagtgagcgctctgtgttccatgccagatgcaaggtttagggacagcttaatgaggaaggactttctaatctggaggaaattggggagtcccttggcaagggtgtagcagaggcagtaagatgttagacagtcaggagacctgggatgtcatcctcaattcatttgctagctagatgcacttggaaatgcactcccttctctgattctcaagtttttttagtttgccaaatattaaagtaactcccatctgatggctctcttggatggtataagaataatagatgaggaagctactattcacctttcatgcaggagagaggttccattcatcatgtggagattggagttaagatcttacaatgcctaacaatcctggaattatcaaattctagttgctgtgcatcaaattgaatacattttagatagccataccatcatcataattgcttggagtgaatagataaaaattgaaaaaaatcttggtatattttctcatagaaatctgcccagggatcaaatgttaagcagggatttattagtggacacaatgtagtcagcaaagaggcagtagtattttgagaagcttcctggaggaagaggaactggaactaggtgttgaagggatgttcaggtttaaacgatggagtagaagtgaagaagttaatgaatatagcacttctgacatgtgccaggtgcttaatgtcatttaatcctcacaacatgaaagaggcaaagataactatcttctttttaatgtaagtactgacagtgtgccaggcaacagataagtcaatatgatacctgagatagctgccagggtaacacagagctcactctgaggacctagggacagctccaagagctgagacatgaacaaaaagtaggaattagatcagaaatgaagaaagagaaggaaagtaatgatcgagaaaagggtgccccaagccacgagggtaacatgagctatggcagtcggttgtgaaaccacaggaagtgtatgggggaaccaaaaaa

SEQ ID NO: 94 - DNA, 1037 bp, Homo Sapiens
  AL528570
caaagaatatgaacaggcaattcacagaaggaaaacccaaatgacccacaaacatgaatagatgttcaaccacaatgacaatcagagaaattgtaaaaataaagcagcaacaatatatcattttacatttatcagctaagcaaaagctaaagtctgataatcccaattattgatgggtgtgtagaaaaaggagattctgacacatgctggtagagtgtcagttggtataagcccttggagagcaaaacagagatattcaccaccctcttatcccaaccattccacatactattctacgtaaatatcttgcagagagattccagcactagtgctatagaatacatttacaggaatgtttattgcaacattgtttaamacaagagaaaaaaacagaaacaaagtaaatgttcaccaacaggagactggataaacaaagtataatgtataatggaatatgttgtagcagttaamataaagaaagaaaagctacatatatcattatagtctacgtagtatcaacttggataaacctcaaaagtcattagtagtgagcaaaammagcaggttgcagaaggatacatacaatatgataccagttatataaaatgtttatggttcaacttttccagtctggtttattgagcyacaatttgcatacagtgaaattgactagtctttgtgtacagttttgtgagtstggcagaatgcatacctttaggtagacatcatcacaatcaagatataaaagggttccatcattccccaaaattgcacactgccctattgtagtcaagtcttacccccacctcacatctcctgtaatcatggagcacatagcattttgagtctgtcttcttccacttagcataatgcctttgagattcattcatgttgttgagtatctcaacggctttttttttaactgctgaatagtagtctactgtatggatgtmccatttatccattctgtagtggagtscatttgacttgtttgtctttggggcaatataaawaactgacawaatatttgtraccga

SEQ ID NO: 95 - DNA, 608 bp, Homo Sapiens
  AL602970
actccgggttttcgcagtggctcggtggcctaccccgatcgaaaccgtgaggcttttgctgagggagggcaatgggagaggggaggatggacgcagagtttagaagtagtttgccgaggtgcagtcgcacgaatggatttcatcctcactggtgtatttaatagtttgtaatctaccaaacagcaactgccagaagccagtcccagctaacctactggcgtgcacgaaagaacccagcgatgctgatctcgtttcgttatttttctgacttaaacggttaaatctaaacgcgattactaagaaaaaaaattttatacctatcattgtacacagaaaaaaaatagaaaaatgtttatataagcgtaaagctggtaggacaggaaaggaagccgaaacaaaaagtaaagaaaaatccacaaggacaacttttggagctagtgcctgagattttggatttctgagtcccaggaggtgctgatatcatttatctgcggactcgtattatgaagcgcaaggtcctagagcgtgtgattttacaggcataaggaatataagatgaaggctgagacaaaataggatgggtggcctaatttttcttcccccaccct

SEQ ID NO: 96 - DNA, 3221 bp, Homo Sapiens
  AL713633
aattccctttggacggcagctcccctccccgccacgccccgtgctgcagctggagcagaggagctcacgcctgcgggtcgggaggcgcatccgtggaccatgggggcagctgggccacactgtccttcgccctgtggcctgctagcctggtcgagagaggtggtggggttctctggaatggtttcctcctgacacccagagctgtgcggggaggcagggatctctcatctcacagagattgtgcctgggggagcgtggaggcagggcctccaggtgctggaacagtcgggaggggcagcatcatggtgctcggtcagccgaggagagagggcagggctgccctgcagcccaggcatgggactgaccacggacagcgaggggacagccagtggtgctgaggctgggagggagggccattgggcgtggggcacgcacggtgaattttctagggaaattgctgcagtcaacacctggagccctggtctgggagtggcctgtggggtccagtggcctcatgccctgtgcccatatgatgaccccatgtgtgcctgtgtccacaccatgaccctgtgtgtgcccaggcctggaagacaaaggcgtgacggagagctggggctctgagagtgggcgctacagcagctgtgttctcgtcccctggactcccttgatttctggtggccagtgttggggtctgcaccgtgtggcactgaggctggatgggctggcagaggacaggtgggggcgtgggggggcgtgttccattccagctgaggctttagaggagggacagcccccttttaagtggatttccttctctgaggcacctagagccctcctcccagcctcccgtcacgcacttgccggcccagccacctgctcacagagggaaccagtggtctttcaggccccttccctgctctggatgaagaaggccattctcctgagctctgtggggctggactgtccgcctcaggcctgggtctgcttctgcccgaaccccttttgtggaaggcacatgggagcccagtggacccctgcacttctccggagcctgacgcccctccctggccggggaggggtgctggaagaggcccgccgggctccagggtttctgaggtccctccgctccgcagatgctcactggcctctggggcgttcactcctctcacggagggtgcttcccttccgcctgtacctacgggcagctcacggccgtgggatggagaggggactcctgtgtgtgccccgcaggcaggtgatccatcgtccactgcgagccggccagagggaacggccgtgccttctggccccgtgggctgtgctgactcggtggctgtggggctcgggcccagcctgccctgccctgtgggttctgctgctgccttcctgctgtgaggtgggctgcttccttctggccagatgagcagagggcagcgttccctttggagcccgatgggtgggctgtcccgtgagtccctagtccacccgagtcttgggctgcgctgccttctgacgcccctctgcagagacaggttctcagttgccatgaatggcaccatgacacccgagccatgaagcgtgaccccgtgtgggcagaaggctgcaaggcctctccgtccaccccgcaccttcctggggcctgtccagctgcaggaccatagaggctgtggggagtcgtggagggcatcaggtgctggggcctctgtgtctccagagtaggcaaggcacgcgctcctgacacagcccccaaggattgagcaagacttcagaatgagcttttctgaaggagctttcctggcagggactccggggtcagtgagtgtatgagaggccacatacctggcggcatctccctgtgttggaaacttcaagagcagggtctcagggtcctcatgtccagaggctgaggatggaggtggaaggctggagggcaggggtgaggagggagcaggagggcaggagttgggggagcaggagggcaggggtcaggagaacaggagaacaggggtaagggagggcaggggtgagggggagcagaagagggatgagggggagcaggagggcaggcgttgggacaggagggcaggggtgagagcaagggggcaggggtgagagagcaggagagcaggggtgaggagagcaggagagtaggggtgatggggaataggagggcaggggtgaggagggagcaggagaacgggtaagggagggcaggggtgagggggagcaggagggcaggggtgaggagagagcaagagggcaggggtgaggagagcaagagggcaggggtgggaaggcaggagggcggtgggggggcaggaaggcaggggtgggagggtcaggagggcagggtgaagggggggctggagggcagcggtgacgagggcagcctgtctcccacgtgtggtggctgcttcctgtgtgccctggggttggctctgtggaggggtgggcactggctttggaacacctccctccccttcctcctctgccacccagtgccttctaaagggcagcagaaagaggcctgctaggcaggggtggcggaggccaccttccttctcacaaatacttcttggccctggccctgtgctgcccgggcaggtccccaggctcaggggctgagaggctgcttactgctgcaggtggaggccccatgccggagggagagcggggttccccccatgcctctccagccctcctgctgcccacggcccaagcccaagcttgtgccggtcattacggccttgcctagctggcagggacagctgcgtgtgatgctggtggagatgccagatgccgcctgccctgtgaggacggctggcggggttgtgggctggcggggctgtgggaagggggctgccgatcatggtgaaaggggacattttcattgggtcctcgtggtccgtgtcctgggtactcggggtcaccgtgcagacagctgccctttgtctgccggacacagtgcaggcaggggagacaggtttagggctctgacatggggcacagggactccgagccaagggatgtcagggcagctctgtgcatctgaggcctttgcccttgctttgcgggtcagttcatgtccaaagcactttaggaggctgcagggatcaatacccaatatacccaacaactggaattgtttacacatgacctacattttggacggtttatcaataaacatgtgtgaacaactgttaaaaaaaaaaaaaaaaaaa

SEQ ID NO: 97 - DNA, 2712 bp, Homo Sapiens
  AL832164
agctacaacatattttcccactttaaataatatttaacatatgacaaaccccagacaaggcttttaatatgtataaagaactgcagtgttaggtggtttatttgcaaactgttttcagtgttgtccatttttatggcacctttaacaatattcttgtttccaaagtacaaaaaaaataggttaaataatctagccataactgaatgtcaagcaataaaacaaatgacttttgtgcatagacttaaaaaatacaaattttagacatctgcatgtaaatgcaatctcttgtttactgctttcttcaacttgagcaatcgattccttatttactattaacttaagaacttgtaacggcctgtaaacattttctctcttactcttctttcaaatttacctgtccctgcttttgagtcataatatttaatgttgttctgcacatctctatacagttaactttttggctttcattctgtatagataagaaaatgttatattataaacagcctactcagtgcaaatatttatctgtttatcaaatccacaatatgctgtataataccggttttactatataatctattttagacatagctgtttagaactagagtgtgctatttttgtgtttttctgatgtgtggtgctagacaagttacttttgtgaacaacaaaaattatcccttttattcctagacaataccacctttgggtcttgttaatttcactgagtataactatatatttgtatatatatacatatatatatatatctacctatgcccaactggcagctgtatcagagtgctggatttgggacatgcttttctctttaaatacataatatcattatataaattattctagagtgtatttaattaggataaaattacttccttagtatggatatttgacatctatagggtgaatttgtttataaatatggctatatggaaacttattagcatttactttatgtttgctacttggctttacagcatatctcctaagctgaaaaataatttgccaggccttcaagatcctaaagaaacttgtttaatggagtaatatacttttttttcttattaaggaattgtattactggcacctaacacagttgtattcttagctcctattatagataatgggcatttacataaaatatcctagatggcttgatggcagaataaacctttcccctcctacctgagtcatgagaaggatggagacgtcctctgccataacatgggccataaagcaaattcgacatgggatgttctgtttcagtatgacctcaaccagttccatgaactgagtgaaggaccttcattttcaaagttatttaataagtagcttaattaagcctttctacccattctcccaagatctattggcattattgaaaagcaaagtttatcaaatatctaactaaggatgtagttaaccttattaaatattgattagaattgttctgtaatattactgaatttgtaagatctttagcaaagatttttgagcaatttataaatgtagagcaaatgtttctgtttactgcactttttgtaactgaaggtgataaattctcaagccatgattattggcttccatgcactgcagtatttatccacaattctagacattttccatttttgtggaagagttgctgttaccttaattataaatgcaattgtgtggttaatgagagctaatgccagtagttaaccttttaaagtggattggctacagttgagggagaaatctcttttaatataaatcacatcattccttaactgcctctcttggaaagagattgaaacctttttttaaagcacgatttagcatcctaagcttcctgagggtagagattgtatctttttgcgtctgcacaatggctagcacatgtcagcatttgacaattgttaaatgataacaagtgtgccccaattaagacgtttttcctgggttgttttgttaaatttacaaagtaagccaagccttacggttaacattctcctctacaaccaagtattaaagccacatttaaaaagaccacatgaaatgctgattctaattgtgtgtaggtcttgaggattaagcacacaaatttcacaaacttctgtttgagtaaacaaactcagccttctgtaaatatacatgcaagtttggaaacagtaatactgtacctataaatatatgctgtctgttttgtgtacagtatgtaaaaactccttttctgccacactaaaaatgcaagccatttatgggaatcctaaaactagtattgaactaaaactttgctaatgatctttattagaggatcgtccaacttttcacttaccttgggttttcttttcaattcactcttacactagtctgcttatttccagctgtttattttattgagtcctgaatttaaaaaaaaaatattttgattcattttgtaaatacaagctgtacaaaaaagagagatttaatgttgtcttttaaatactccaattttcattctaatatgaatgttgttatattgtacttagaaactgtacctttaatattacattacctttattaaaagtgcattgaacacatcaattttagatgtgctttatgtactgttatcctataataaaacttcagcttctaatggaaaaaaaaaaaaaaaaaaaaaaaaaaaaaaaaaaaaaaaaaaaaaaaaaaaaaaggaaaaaaaaaaaaaaaaaa

SEQ ID NO: 98 - DNA, 3080 bp, Homo Sapiens
  AL832228
gaaaaaggaccattttgccagtgaccccaattctatttgagtgtaaccacccactgctggggattgaggctgttgttggaaatgtcctaggttttatttcctcattgcaatttcctggcagccctgctccaaggctagatgaaatcttcactcttgccagagccattctcaataaacatttgctgaagaaatgcttgctacctgaatgaatgatcagaagccggaaaaatcagctttcaaaaggagcttaggaacaagcaggacaaatggaaacactgccatcaatttcagaagcctttccaacagaactgccagagccttcaggcttctttggtgggacaacgacgtggccaagaagtggaaagatccctggacattgggatctagacacagatgtgacactaaagtgccgtgaggcctgggagaaatcacctaattgctcaggcctcagtttcctccatagagatatgcactgggcccctactatattccaggcaatgttcaaggcacagtggacacactgttgtgtaagacaaaaaaggtcctttatcaggtgacaagtgccaaagagaattcaagtaggtgatgggatggagagtgcctcagggtgatactcatgaaggagccatccatgcaaactgtcgggaggagcactgtaggaagagggaataaatagcttgcgcaaagatttagactgctcccttgtggtttgcattcatttctgttgattttgccttaagattgttatgacaaccatactctatgcattgggaaataatctgtggcttcatacagaaatgcactcatccctcaatggatgagtgtaactagtccaaaatttttgctcataatcctggactggtattgtcaatcaaccattagttattgttaaaggagtaatttcataaagaaatttataataaagtgcttcgtattgccacatgtcaatactcaggcatgtcttcactagaaagaatgagaagccatcaaatgattgcccgtttaggtggaatcgctgtgcatgtgcaggaatgttgcaatagtggctcagatacagccagtagctcctctaagggtgaggtgattttctgaaatagtaaacatttctagacaaattttgaaacaaaacgaagtacatccttttctacattgacacagtcattgcattcctggaaaattccatgtaagtactttgtatttaatatataatattgcataatgatccaggctcagataatgattggcaggcaaaatgaaggaccttctcactatagtgggatatctagcattcctgaccctgcctgctaaatgccagttgcagcccccctttccaatcatttcaacaataaaaattgctcccatgaaattccaagcactcctcaggaatgagaaccactgaaccactggaaggagtttggatttattcaaagtactatgggaatccactggaagattttattctgggaagtaacataaactgatttgcatttttcagagtgctctggatgtcgtgtgagaagtgatggtagcaggggcaagagtggtggcagggagactttggcaacagataactagcctcaggcaaggcagcaggcaaggagcagagatggaaagaaattcatagattaaggatgttttcagggtggaggcaacaggttttactgatggtgttgatgtgagatgagaaaagatttttggctttagcaacggagagaatgatacatacctttatggaacctagaagaaatccatggcttttgtcttcttaatgtttttaaatttaacatggcccacactgaactcatgatccccatgccactcccaagtttgagatgacagccatgtggagatgtcaagttagatatatgagttcctgtgagatgctctggctggagacacatctgggagtcaatggtacacagaaggcatccaaaaccacgggattggagacgtgaggtcaccttgggagggtgggtggatggaggagagaaaggcagccaggacagagcctcggggaccttcaacactactaaatgaggcacactcttctattaattactccattaagagaaagactgaggtttttaacattaattttaatgggaatactcaatgattgatgacaccagttttggcttatgagcagaaattttggaactaattatactcatttatcaaagcatgaggatggacttcttcatgaatttcaaattatttcccaatgcatagagtatggatatcataataatcttatgataccaaagtagtaattaatgtttggattaagagcaggctacataagggaggccttggacttacggtctcatgaaaaattacagataaagtccattaatcagtatttattggtcacccacagaacaggctgtgaaatttttcagtttaaaaattactttcacattttctaagggaacttgatagattcaattttctaaattaaaaaaaattaacagccttattgaggtataactctcataccatacaattttaatctttaatttgaagtggttacagtgcattttcaaatagacatatgtaagttagaaactaaattaccctgccagcttaacaaaacataaaacagcaattactgtttattaggcatcaacttaggtgacaggtacgataagcagcatttaattgatcccaatcctcccagcatccctgaagagtatatcttccattttacagagagaaaatcccacctcaaaggatctggagaactggccagagatcaccccagaagagagtacaggagccaggatttggacgcaggtctctctgactcaaatccttttctctttcccttacttcatcctccccctcatctcctgaaaattagaagccggatcctggaatacacacagaaaaccctccacccattttaaggatacatcaagatcaaaactcattgatattgtaatcttactagtttgaactttaaaacattttactgccatatggggactggcttcaaagaaatgttttagtggtgttacgtttaatgccttgtgtttatgtagaattacatatcctataaatgttaaaaaaaaaaaaaaaaa

SEQ ID NO: 99 - DNA, 822 bp, Homo Sapiens
  AL832253
acgcgtgggcaaactgtcagatataaagcaatttgtacttcagacctgcctatttttgttttacaggtcctatttagttactaatggatattgatcctttatttctcagatttgttttgatatgtttatcacatttttctattaagagaaattccacttagagtcagttcctttccaaagttgattttgttggctctctctcatggcattgcatttcttcacattttacagttgtgatttgcaagttttttaagtagactttttagtttgtttcattctttggtagattgtattaatgtttctaattctttactccttcccttttacagaattataactggacatcttttgccaggtgacttttcagtgccttccactatagtagatggaatatacttccccactccattgagtccattttttgttggctaacctgtagttttaagattgtaatttttttaaatctagttaccttgattgctttttagagagctattagtcccaataacttagaccaccattatttaaaaatggaattcctaaccacaatgtgtgcacctcatcataggaaggaacacaaatgggggagtagaagaaaacagaaatgtattaataggcgacagtgagtacttcagctttatgtgtaatgttttatttcttgtattacaaagtaaaagatatgaagcatttgactaaaaatgttaatttatataatttgaatgatgggtacatgggcagttgttatatttatatatacttttatgtattctaaatttttttctcaaaataaaaaagagaaacagtcaaaaaaaaaaaaaaaaa

SEQ ID NO: 100 - DNA, 798 bp, Homo Sapiens
  misc_feature (587)..(587): n is a, c, g or t.
  AV652851
cagaagtgggatacaaagctgactcacctcatggagaatcattggcctttggagttatggcatgaggtacccatgttggggccctttgaaccccctacacccccaccactttcacaggtaatcctttctccctccagtaagtatctcttggacagaactctcagatatggttcgagttctgttttatttgggatatgattagggagaggtctttccccctcttgtttggtagatctgttgggtagaattattttccccctgttgacctcagctgcgaggtttggaccttgaggcttggatgagggaatttttccctttctttggagaaggcttatcattcttactggtaagcatgtattttattttctgtcctgtcttgtatttatttggcctttgtgtattcagtgcttgcatttacttggcttttgcatagttgacattaaatcagagcacccacgaaatgagctctcaaagttcaaaggcatgccagaatattttctggaactccagctagtaacatattcaaacattacagggatcatttagtctgtttttcttaaaactgaactaaaagatggaggctatanaatcatacactccaaataagatatgcatatttcattgatatcttgagtctaaaaaaaataaaaacaaaaccaaacacattcaggatacaaatattgccttgttaaaaatactgtctcaaggtggctgaaactttctttctagacctttcccctcccttcttacatatcccctcttattcctctctaacagctattctacatactactaaat

SEQ ID NO: 101 - DNA, 634 bp, Homo Sapiens
  misc_feature (560)..(560): n is a, c, g or t.
  misc_feature (620)..(620): n is a, c, g or t.
  AV681673
aagcagaggggacgatgaggtgcgtaggcgttggcagttgacttttgctgatggagcctctctgaagggcaaattcaaagtacagctgggtgctgcagcactggagtgcgaacttgtggctgtggttatgaaggagcctcgtcagctatgcctttagcccctggtgaagcagtgccagtcacactttgccagtcaaacggagaggcagcagtagtaagaccagaccaaatcaaaccaaaccaagcaaaccacggggaatggaggatatatttggcattaaactcgggacaaaagaagacacaaactttatcttgtggtttgggtcctccaatcctcataaaagtgtggtttcacctgttacctcataaaggtgccattgctgtatgcacatctgaatctgtttacaagttgagaatagagattattgcctgctcctccaagcccttcactgtagaatggaagcctgtgattttcctggcatcatgcatgactgagaaggtcagtgtggctaattctgagcttcaacatcaggaaacccgtagttcttcacactgagccgnctcctgcagcacagtcatccttggtaataaagctgatattttaataaaaaaaaacaaccnctccaaaaaaaatg

SEQ ID NO: 102 - DNA, 679 bp, Homo Sapiens
  misc_feature (508)..(508): n is a, c, g or t.
  misc_feature (588)..(588): n is a, c, g or t.
  misc_feature (590)..(590): n is a, c, g or t.
  misc_feature (600)..(600): n is a, c, g or t.
  misc_feature (676)..(677): n is a, c, g or t.
  AV691356
ccaactcgatcccctcggagccaggtgtgtgttgagattcaggatttttcagttgcaaaggcaatatgatctctactccacagggcacacggcaccctcagtgctcagcacagcagtgtgcagcagcctggttaacttttctgcagggaagtatgtgaacgttcacaccaagcgtgtcagtcatgtctgtaagtcatctcccaccaacacaggtcaggttttcctgcccaatgagcttggggatggcttgactttggagctctttggatctgtggattttggaattttggatttctgatacccgtttgatcaaagaggcaaccgaggtctaacgggtcaagtgactttcccatatccgtgaaggtcatgaaaagcagggccaggatggtggcctggggtgccttgaatgataagctgggcccttcactgtgcaggcccctctccttcagtccactctgccactgctgtctgccacaccctgctctgatagctcctctctgccaggctnttccctcacatcctcaactcagccaagagctggtttcttccagagagccctgctgtgcagtcagttattggacttctctntntgtgcatgtntgttttcagggtttagctgatcaaagtggtatcgttgtaacaggcagctctaaatagaggtcttcagaaggcccannac

SEQ ID NO: 103 - DNA, 721 bp, Homo Sapiens
  misc_feature (363)..(363): n is a, c, g or t.
  misc_feature (581)..(581): n is a, c, g or t.
  misc_feature (619)..(619): n is a, c, g or t.
  misc_feature (627)..(627): n is a, c, g or t.
  misc_feature (688)..(688): n is a, c, g or t.
  AV727190
tctccgttgaccattttgcaaaatagtttattgagattaggggtctgatcttttgtataacctgttgtagtgaactgatcatatgcgacttgactttggccaatagtacctcgtgcagtgtacagtactactatttagacttactgatttgggtaatagaaaagctatgatgttagaaatgttgtcgttgtatattggagaaattttgaagttgcatattggagtaatttagtcctgtatgctttgtaaatgagtgcattctattgtcgagagtaaatacagtattttgtagtataaacttaagcttttagctgaagaaattggcagcatagttggagtgtggagactattcttaaaacgcanatgttttaaattacaaggaactgtagtggtgtgtaggctgtaacaattcctggtgccaaatttgggagattatttggttgagctactttctataaagaaacatattaagtatctgcaataaaagtggatttgtagctatacacaagggattttacattgataaatataactcaataaggcaccttctttgctctttggtatctgccagttaagaccanaacatctcatattttcactggagctttctgccaaacanatactggntttgcattggctttgctgctcagtttgaaagctagggggatctcttagagcctactctggntctggaaggctgctgtattaaaaaaaaaaaaaa

SEQ ID NO: 104 - DNA, 623 bp, Homo Sapiens
  AV731331
ctcaacccttatagcacaatagatcatttctgcagtctatgggaatgtaatctgctggttttagtacagattagtttttcacattagctgtaagagcttatttttatttcattatccatacttgtcaataccagttatctgaactctatggtaaaaattaataaaattatccatagttgttttttataataagttattaatataaactagcaactttgttgaaatactgagtaaactttaaatgatgatgaataccatatttttcagttagtataaatcattagtaaattattgagtatacttaagtaccatatttgtgacatgaaagatattttccattttgtcaaattgggttttatatatatattatgtattagaattgaattttgaattaagttctctttgtaaaaaattagctgagaaagaaaggggagtttaagcctttgcatgttgacattgttccttccccgcgcctttaagattgtgtcttattgcagctgccttctttctttaacctgtgctactctaagactcttatgctcaaacccccatcaaactttatcttttttaattagtctggtaacactcatttatagaccaaaataaaagatattattaatagc

SEQ ID NO: 105 - DNA, 458 bp, Homo Sapiens
  AV737317
gatactgtcctaaaactctcctaccactcacagaacccaagacctggctaatgtactaaaaggaaagtctgagactctacgtagctaaaactcagacagtaggagtgatggcagagtagtgaagagctgataaatggagtagttgaacttgtaaaccagacactgattaaaactgagggatcaaagtaactccatgttgaagttccctggaagacagatgtacactgctctgtgaaataaacctgtaaaaaagcagacatcctgttagctgcaggttgataaacaaacgggagaagtacttaacagcaaagacagcttccatacctgttcagcaagctacactacatccacagcaaaagcatgatgaaatcaaggccttgtgctgtgtcactcaaacaaccactccagaaccctgatgcctttcttggggttactgttaatgcaaaaaaaaaaaaaaa

SEQ ID NO: 106 - DNA, 470 bp, Homo Sapiens
  misc_feature (420)..(420): n is a, c, g or t.
  AV745363
ttggaaaggttgtaggtctcaaatgcttggggtttaatggctttctaaggccttaggttcagtggaaatgaaattgaaatgccaatgcatagagacctacaaaggcagcaacagtagtgaacagggagaactagaaaatgactacttttggctggacactgacctgaagaaaagtgtttcttaaggaatgaatgctaatactatactagtactgtagtataactatagtactagtctcacatggttttgaggttcatatttgtattgtccacatgctctaataacatccaaaccaagaaattaccatatatgtaaatatttggacatctggtagtagcatacgcaaaatctctctggaaggacttacccttaacccaggcccaacaaaacatccacagaattaattgctaggaatttcanatattgggattattcaagtctttaaaatagttatgttcaaaaaaaaaaaa

SEQ ID NO: 107 - DNA, 497 bp, Homo Sapiens
  AW015915
tttttttttttttctttcccttctctcttcctccacctctccatggtcgtctcactatttcctaagagatgtgaggttttgacagaagtgccaggaagccagaggtgtgtgagtagtgggccaatctcacgtgaaggctgtgggacggggcaggagaggggcagccagcatttcctgagcgccagctaatggcggggacctggcacctttgctctgtgactctccagctgtatggtgacatgaggctggcgttttctttggtttcatacgtgaggaagctgaggcttggtgatgtcctgtgcatggctcggactccagagctactcagaggcagaggccgtctgtaaacaccttcaggtggttggaggcagggtgctgcagccaatgctgatcactcacaagccaaggctttattgttaggggtaaataaaataacatatgccctagcatttatacagcacgggggctttttaggaaatagtgagacgaccatggag

SEQ ID NO: 108 - DNA, 427 bp, Homo Sapiens
  misc_feature (324)..(324): n is a, c, g or t.
  AW044692
ttttttgcgcttcctcctgagcttttattttgttcagctggagacaaaaagtatgagaaattgaaagtgaaggtttacattgttaacctaagagttctgtcatatcgccatctcttcattgtgaccaaagttttaaattctgtattttttgttaattttggtccttttcttaaagattttactttctgtttgatttctgggagttttaatttgcttttcctcagaatgctttatgtccagttgccacatagagttaaatatctgtgtatatgaagcaagcaaggccactgagtctttggggaaacagagcagggaggtgcccanaggcattttcattgtcaggtccagatctgttcccaatcccttctcactcctcctgcactctaaaaccacaccacagttccaactctttctgagtccggaatct

SEQ ID NO: 109 - DNA, 238 bp, Homo Sapiens
  AW168583
ttttttttttttttttttttattataaattaatttcaaaaccaagttctgaggttaaataatgattgtatttgttaatcaatccaacctgggtttccttccaaaagaaaacagggtactattatcaaaatgttggaaacaggatgtttgaaactgtggggttcattaattgcagtgatgtgaagggtcctgacagcactaatgctgatatctttttatgaaacaggcatgtgctttga

SEQ ID NO: 110 - DNA, 524 bp, Homo Sapiens
  misc_feature (221)..(221): n is a, c, g or t.
  AW173314
tcctattcaagaactttacagattttattgcaagtaaaaagcacgaatccctccccgattcgtcctgcagggtcccaggtttgctgtggttcttttcttgttctctagacttttcttggggttagcggtggctcagcccccagcaggtcacaagtgtccctttttacttctcttcgttcttggtgctcatgagggctcggtaacccgggctttgagggcanaggggtcaaagcttgggtccaaccagctttgctgcgctagagccctctgcagccgcttggactgcactgcgccctctcgcccgcaccgaggccccggcacctctccaccccttcgtggagtgcactgccatccacagacaaagtctgcacgtgtggggtcaaagagagaccctcgcggagacccagagtgccgggagagcagaaggcaggggagtccacacagggcaagcagcaaccaggcttctgaggacaggaaaggagggagcatctggtgggaagctggcgaggaggggctgggagctg

SEQ ID NO: 111 - DNA, 486 bp, Homo Sapiens
  AW205635
tttttttttttttttttccagttaaattcagttttattgttttccgttacatgttcactccctgttccttctcgccgcctggtctggtgggggcataggagagggagggaggactgaaggtcatacatttctgataatgtcgctttctaaagggctgtgacatttttgtacatcttttccatcttttagtagcaagtggttgctgcagaccagaagtgaaccaaataaagactcctgctctgtgcagctctcacaaagatcacagctgcttttgtacattccagtaactgcatgacacaaaacggtacctgtgagcaggaaacacattcacaccatgagacatgcacacaggcaggtgtccctgagcgaagttgtgcagagatctaggcctaggggcagtcagctcctgccgcaacacaacctagaaaaccaaggcgagaacggccccttgccttccagcagcgaggggagagggcaaagccactt

SEQ ID NO: 112 - DNA, 281 bp, Homo Sapiens
  AW236020
tttggagatcatgtctcttttattaatattttctttcagaccaaactttcaaaatgcaacagtgaggagctgtgtggccagttggggttaagtgtcaccttccaaagcagattatttgagacaaggacaaaatactaaatgcagagatattcaaggcaagaaagtctagtgattgtatttcatcctctggaggtttcttttagataaaaatacggattgataaaaagaatggacagattcttctccccaaataggatgacgtaaatggtgattcttaaaat

SEQ ID NO: 113 - DNA, 438 bp, Homo Sapiens
  AW272352
atttcttctttttcttttttattttttgtaatgtaagcaagattctttccctcctctgccttaaatcctttagttacttgtggagtacaattacaaatctccaggatgctaaagctctgctctgctgtctacaaccacaggcaccattcaagaccctcactcctaatgagacagggctctttccactcttgaaacacagtttttccccaagtcagggttttgcacaaggtaacatcctgtctttgaagcttcatagtttggctttttaatcaaatggttccttttccatatttaagtcatcactttacatttcattttcttggagaggtcttcgcatgactccaagctatcaccagttatgtgctatcgtagaacatggtttatccagaaatagtgataactttcatcactattgatcattctttggttttctttaca

SEQ ID NO: 114 - DNA, 458 bp, Homo Sapiens
  AW273831
tttgtatttcaggccattgcagtctttattggtttggatgcttacattgtctcatctaggttaataattatctcttcaagttgactttcatgtctttttgacgtgatcctgttggactttgatggcttccttgctttctggcaaaacagatgttccaggatcaatatactgcaccatgcatggagtcagccatttctctaggaaccttgattcctgtctgactaattctctgtcttttctttcctgttgcaattcatgggtcttagcatcttctgaatggtgtttaataggtcatcctgttgatttcctgctagggagtagcatactctggctctgtaccattggccaagggacttaaggatagatgaagggctgcagttttgttaaatggaacaatatgaagagatggcattgttaaaaaaaaaaaaaaaaggcttggcagcagggcccatttgaat

SEQ ID NO: 115 - DNA, 479 bp, Homo Sapiens
  misc_feature (446)..(446): n is a, c, g or t.
  AW292488
tttttttttttttttttcttgcacatgtgttttaccctggtactccagagggaatgaccaagagtttcctgggttccttccggacacgtgcatctcatttaacctaacaactgaatccggtgtgtcttcgtggatgcacccgctttggggtagctcagtactgcatagaatggccggaccagtccaacctgctccagactgctgggtgtctgagttgttcccggccaatgtgttggtccctcactggacatccttgtttttgtggctttgcacatgtgttcagtatgaccgcacacattcctataagagcgtgatgcctccaactgcatagctgtggctccgggagcaggaccttgtaacagagcctctgcccctgactgtcctgaggggcctttcccttacagaagctctccttagtgcttcatcagacactcgctcttttccanagaaaagacaggcgcattccatggtcatctggt

SEQ ID NO: 116 - DNA, 357 bp, Homo Sapiens
  AW294414
tttttttttttttttttaaccagccactctactcaaggggcatatattttggcatgaggtgggatagaggataggtcattgctgtaacttcaatctcagttactctcagggctcacatgatgtgaacattttgctctgtgattgtagcatttgaagccacgtattttttggtgccacattgccaagtaaatgttttatctgttgaacaagttagaaaacattaaactctttaagctggagtaaacctcattgtattgtccttattgagaaatattgtgtttgtttccagtgtgtagtgtcaaataaaaaacaaatttggacacagtaaagagagattttatttgcagggattattac

SEQ ID NO: 117 - DNA, 568 bp, Homo Sapiens
  AW300122
tgtcataaatttttaatcaaattgtttatgcagaggatgcacgaaaatgagagagataatctgccctggattaatcaatgacatttaccaagctctaataagaacaagaattgtgctagataccatggatacaataaagaacaatgcacaaatggactaaatgtaactcactgtctaaactggtagcaatgcatatagacagacgcagggtgtcctgagcagggacataggaaggggtgatggaatgaacacccagcgatggttccgtactgatgttcccagttgaagtcatcaaaaaggtgaccactccacaggaactccatttgagggccttgttcaatgggacttttcagccatcctcccaatccaagtattttcttcacctattaaacttgtctttgattagctctccattggtcagagattctgtgagataccacgctgccagggaccgatatatccagagcatgggaccaggagctggactcacggtgggatctctgatcagtcacagaaggagcttgacgagctcatggggtctctctccctaggtggagaagacagggct

SEQ ID NO: 118 - DNA, 454 bp, Homo Sapiens
  AW300815
taaaatattttttaaatatttatttttcattcataaaaaataacatattcactttgtgataacataaatatgtttttaatgaaaaataactgtatttcccaaagcaaaaaaaaattagaagaatgacattattttacattttgtaaatctgtttaatgtctagcttaatagaatacagctagattctttttttctttttctatattcatcttttatgacacaatacagcatagagcatctggacagtgccactatatactaatgagacaatgagactgaaaaaacaaataacttagcatcattatgaaagtagatttgaagaagctgtgtgctccagaaagtcttggggaaccccatggatccctgaactaaacttcgagaatattgccctagggttaaacctacaatagtacccaaatgaccagatttggtaatgaccatgggtctactcatg

SEQ ID NO: 119 - DNA, 482 bp, Homo Sapiens
  AW337833
tttttgaagtaaaaatctttaatttgaacttatttaatagattattttaatttttgaacaagcataaaggtgccaatttaattatctgtgggatttaaaaacttcaacagagaaagaaaataggaggtactagtgagaaatatattttacagtctacatatttattgtataataagctatattatattctaataacagcaaatataacattataatgattttgatatctggactcgctagacttggtcccataaatcctatagttcttaacaaaaaaacccatccgttagcaaacttacacatcaaagctcagtttaatgcaacttaatgagacattgaattttatgcagctaacccaagttatctatagtgtgtgccctcctgagtaccccaggaaatagaagtaaagaactgacgaacatcagatccaactggcccatttaggtttggactctaggagagagcaaggaggaggcaggaga

SEQ ID NO: 120 - DNA, 618 bp, Homo Sapiens
  AW376320
tatgtacaatctagagataatattaactatagataaaggataatcgataggattatatgcttatgagataatgcatatgagtagagataatgagtgatctgagattggacatataggtaatagataatatatgccctttatcaatcatacagattgaaggatgcttatggagctgtcttgcgtatattcgtgcgcgtcagatctttctggagaagttctaagaagatgaactgtttccgcagcgatgatcatgaataacaatcgcttaaagcttttgttaacatgttgttgtttttttgtcagaagggcaatactagttggtttacctatccctcagttatacctgcatgtgacctggaacacgtggcagttcatggtttttcattatatttttattactgctgaatttttacatttttcaatgtagttactgaccctttactttttatattttataagctgtctgatcttctcattagcccatttttttcattaatgtgaaaatatgttttcaggatacagagctgcactgtacagtactaatgcatttggctcgtagggcaactgaaacatggccagttctcactgggacatgctatgagtataaaatatacccca

SEQ ID NO: 121 - DNA, 466 bp, Homo Sapiens
  AW451280
tttttttttttttttctcagtgatttaacagaacaaatgtttatttcttgttctcacaaagttcactataggtctggagactcttgggaatagccgccctccatgcagtggctcagtgttctggactgctttgatttcatggctgctctctctgtatgtggttccatgattaaggcaggaaaggagagcactggccttgtaccagcaaaaaaataaaaaaaaaaaataaaaaaaaaaaaatgaaaagcttcagccagaggctcacaatgctcacaactcattgaccaaaactatctcatacccgtcttagagcaaggagcaggaaagcaaaaccattcttcttactgttcactggaatacaagttccatgaggggatgcaattttgtctcttggccactcctgtgtcctcagagtataggacagtgcctgacacatcataggccttcattaaattgaacagaatga

SEQ ID NO: 122 - DNA, 500 bp, Homo Sapiens
  AW664700
ttttaatagattttagaagatttattagtgacacctcatttatctggaggtaattaatgcagttcagacttcagtaacctctgtttgtatgggacagcacaaaacttggcagttttaaaaaaaaatgaaacaccaaaaaacaaaacaaagagcttgtcatctgtgagcaggctgaaaaaaacccaagacccaatgaatatgtatgatcaacatgtgaccaacaaataacagagacagtgtctcgtaggagagtgttggcagcaatttgtgatcaagggaagcaagcttgacatgacagcaaagagagttggacaaccaaaagaaaaagaagaaaagtaggacatctttgcacacagacagacctattccagtcattgctttttgaggcatcattttgtcacattgaagacatttagacagttgagtccaagttagagagcattaagtaaacataggttggtttatcatgtttacctctgtaatgtacagggtcatttgct

SEQ ID NO: 123 - DNA, 549 bp, Homo Sapiens
  AW817811
atgacttacatttacccacattctgaggcctggtccacatgtagaccctgagctgtagacccactctcccagcgggtaggggatgcttccagccggatatccatctctccaaatgaggaccagtaactgagaagtagctgaggagaagcaatgccaaagtgacatgggtccttggtgatgagggagcacagagccacttgcagagaggattgcccggcacttccacgggatcccagcctggatctcagcccccatcagagaagatgactaattgaatcattgtccatcatctggattagtgttttcaggcagaagggaagaggataaggagggtaaacgctgtttccgggtgatgccacatcattcagcctctctaggcctagtccgagctgggcaagtttacctctagcttctggggaagagatcttgactttagatggagaccacatccctctttccctctcacctccccacttcccttgggggtccaactttgtggaattaagttgtcttctgtccccactgggtggggattggtaaacagctggg

SEQ ID NO: 124 - DNA, 634 bp, Homo Sapiens
  AW844097
ttgagccagaactattatgagccttttatatgacaaatgttaatttggataaccatttttcaaattatacatatttttctaaagatactttacagaaaatgctttccccccgtttggcaaaaaggttcattctgtgagccaactgaattcgtattaataataaagtacatttcactatcatatgctgttctctcattggttctatcccattaacacttattcctggttgtagattctggagctttctaaagagatggtaaaacctctctctaaagagatggtaaatgttttaataaagttctctttgggggaaaaagaagcaaaacttagtctctttcctcaagatgttcacaagctattagagataacagatacttttaaaaatacatgtttttgtttcttttatggagtaaatgacaaaacactgtggaaacattattctttcccggggtgtcagggaaagcttcacagaagaaaataattcaatctggttttaaagggtgattgggagtttgacaagtggaaggaggggcaggagggcattctagtcagaaggagcagcgtgtagagtggtgcagaggcttcagagaatgatgtatttgaacacgtatttgtcttgtgtgtggatcttcgg

SEQ ID NO: 125 - DNA, 746 bp, Homo Sapiens
  AW954246
atcatgggaattttgtcatgttcaatgaaaagtaatgttctgtcaaatgaaaataatgaggttcataaatgggaatatataagacaaaaatatgaatagccaaaatacgtttaaaaaatctaaactattgaacataaattaaattggttatccctgggaaaagatactgtatattttaatgatctctgtgtatttgggaactatagcagtaaatgcaaagatacatcttgcctgtctctcccggttttaagttaattgacacagatatttcaatagtagtattactcgttaaaattctgcaatacttattacctggtatcatttaaaaagatattttctctaagataaaagatactaatgaagatagaagacaccaatctgtttccatcctccttttctctcttgcattttcccttctgtgtattagaaacaataacaaaggcctgcttttatagtcttgacaaatcgtttcttacctgaaaggaacttgggttttctctttttaagctagctcttagtctgtagcttctgatagcaagtaatctcttcattctctagtatcctttgccatgacttaaaaatggagactatagcttaattgattgaatactctgacctagcagtcccatgtttgagtgcagggatggtgttgggcaatttatcccctggtagtgatattctagaatgctttatgttcctaccccttaaaaatcctccaaatcctcatattctcaagtgcccttatt

SEQ ID NO: 126 - DNA, 621 bp, Homo Sapiens
  misc_feature (522)..(522): n is a, c, g or t.
  AW962683
gctgtcctagccccacgtgatcagcagttcagtgcaaattgaagacagatggaagcacctctgtgagggcagcccaaatccccgctagctccaaccgactgctttgtcctgtgcctagttgatttttaccttttgtgcttggaaagttgagcatcactgcaactctggctggggcattggatttttataaaactttatttcaagccctgaatgactgtgttctccaatctggtagaatacagctggagaaaggcagctggctgggtgcccaagagaagggaatttcttcctagcactgtgacggagtggagcatcggaaggctgaactagaaaagggcgcataagtaggaaatagaaactgaaaagccatcccaggatatttgagttgttcaaaagcaggctggtagtttgggcatgtctcaggcacaaagtgactcgtgaacatttgatagatgagctgtacctgtgtgtgtgcttgagaagagacttcgagctgcttttatctgcatgctgggtttgttncattatactcactgaaccctctgtgctctctggggttcttttggcatttggctttgggaacagcaacacaagtgtatggcacaggccctgcctgtttta

SEQ ID NO: 127 - DNA, 541 bp, Homo Sapiens
  AW967735
attattcaacatatttattgagcatctacaatgtacctgggcactgtgctaggaacagggaaaacagtagaggaaagaaggacacattccctgccctcatgttgctttgggtctagtggaggagagagacagataagcaataattataacatgctaatgctatgaaaggagagcatccaggaggcaccaacccaagttgggtcatgaggaaagggtagccaagatgaaatgggaaggatccaaaggtggggaagaatgtttcatacagaggaatagcgctgtgcacagggcaagagggaccatagtgaagggcattttattttattattattattttttttttttgagatggaggttgcaagggggttgggggagaaaagtttttccaaagataatcagtgaccagatcctgacaaattttgttagccatgtttaagagttttgtctttttctggggttaacgggccaagagaatagttaatcaaaggaatgaagtggtcagatgtttactttaggaagtcacttgggtgccctgttaaaa

SEQ ID NO: 128 - DNA, 702 bp, Homo Sapiens
  AW978486
aattcatggaatattctctgaagacaatcaaaggcctgccagggagggactcctggctggttccagcactgtccttaggcctctttttaatactaacttgttggaactgatgcactttgtttaatgtatttaaccttttttttttaaagctgctcatttagaacaaaatcaaatgcttattgcattgtatccttcctgcttgctgtttttcctcttaatttcaaaagttatgcattaaagataaaagtacacttaagaagtatgcacaagaatacctattaaaataactaccatcaagtttgatggtataacttcaaaggattaaaaaaaactattttggattaatattttgcgtgttttttttgtaaatatgattgtatataaactggtggtacgttatgacagttttaagtggttgtgagaaaactaaagagaacaggtcttaagctatgtttaaccttaactttgtgctgatttgacaacaaggaaggcattttggccagagtaaattttttaaaactctttccagcgggacctcagagaatcatttccaaatagatgagaagttccttcctactttaataaaactccggaattcttccccctctgttgctgtctcatcctttaaccttctggatttaggtgctttttaattccagttcaggaaaagataggaagaagtgaatttccccacagcaacct

SEQ ID NO: 129 - DNA, 992 bp, Homo Sapiens
  AY358510
ggcacgagccaggaactaggaggttctcactgcccgagcagaggccctacacccaccgaggcatggggctccctgggctgttctgcttggccgtgctggctgccagcagcttctccaaggcacgggaggaagaaattacccctgtggtctccattgcctacaaagtcctggaagttttccccaaaggccgctgggtgctcataacctgctgtgcaccccagccaccaccgcccatcacctattccctctgtggaaccaagaacatcaaggtggccaagaaggtggtgaagacccacgagccggcctccttcaacctcaacgtcacactcaagtccagtccagacctgctcacctacttctgccgggcgtcctccacctcaggtgcccatgtggacagtgccaggctacagatgcactgggagctgtggtccaagccagtgtctgagctgcgggccaacttcactctgcaggacagaggggcaggccccagggtggagatgatctgccaggcgtcctcgggcagcccacctatcaccaacagcctgatcgggaaggatgggcaggtccacctgcagcagagaccatgccacaggcagcctgccaacttctccttcctgccgagccagacatcggactggttctggtgccaggctgcaaacaacgccaatgtccagcacagcgccctcacagtggtgcccccaggtggtgaccagaagatggaggactggcagggtcccctggagagccccatccttgccttgccgctctacaggagcacccgccgtctgagtgaagaggagtttggggggttcaggatagggaatggggaggtcagaggacgcaaagcagcagccatgtagaatgaaccgtccagagagccaagcacggcagaggactgcaggccatcagcgtgcactgttcgtatttggagttcatgcaaaatgagtgtgttttagctgctcttgccacaaaaaaaaaaaaaaaaaaaaaaa

SEQ ID NO: 130 - DNA, 831 bp, Homo Sapiens
  AY375451
atggcatgccctggcttcctgtgggcacttgtgatctccacctgtcttgaatttagcatggctcagacagtcactcagtctcaaccagagatgtctgtgcaggaggcagagaccgtgaccctgagctgcacatatgacaccagtgagagtgattattatttattctggtacaagcagcctcccagcaggcagatgattctcgttattcgccaagaagcttataagcaacagaatgcaacagagaatcgtttctctgtgaacttccagaaagcagccaaatccttcagtctcaagatctcagactcacagctgggggatgccgcgatgtatttctgtgcttataggagcgcgaagagcaactatcagttaatctggggcgctgggaccaagctaattataaagccagatatccagaaccctgaccctgccgtgtaccagctgagagactctaaatccagtgacaagtctgtctgcctattcaccgattttgattctcaaacaaatgtgtcacaaagtaaggattctgatgtgtatatcacagacaaaactgtgctagacatgaggtctatggacttcaagagcaacagtgctgtggcctggagcaacaaatctgactttgcatgtgcaaacgccttcaacaacagcattattccagaagacaccttcttccccagcccagaaagttcctgtgatgtcaagctggtcgagaaaagctttgaaacagatacgaacctaaactttcaaaacctgtcagtgattgggttccgaatcctcctcctgaaagtggccgggtttaatctgctcatgacgctgcggttgtggtccagctga

SEQ ID NO: 131 - DNA, 855 bp, Homo Sapiens
  AY475219
gaaccagggcagaaaagaatgatgaaatccttgagagttttactggtgatcctgtggcttcagttaagctgggtttggagccaacagaaggaggtggagcaggatcctggaccactcagtgttccagagggagccattgtttctctcaactgcacttacagcaacagtgcttttcaatacttcatgtggtacagacagtattccagaaaaggccctgagttgctgatgtacacatactccagtggtaacaaagaagatggaaggtttacagcacaggtcgataaatccagcaagtatatctccttgttcatcagagactcacagcccagtgattcagccacctacctctgtgcaatgagcgcggaggcaaattccgggtatgcactcaacttcggcaaaggcacctcgctgttggtcacaccccatatccagaaccctgaccctgccgtgtaccagctgagagactctaaatccagtgacaagtctgtctgcctattcaccgattttgattctcaaacaaatgtgtcacaaagtaaggattctgatgtgtatatcacagacaaaactgtgctagacatgaggtctatggacttcaagagcaacagtgctgtggcctggagcaacaaatctgactttgcatgtgcaaacgccttcaacaacagcattattccagaagacaccttcttccccagcccagaaagttcctgtgatgtcaagctggtcgagaaaagctttgaaacagatacgaacctaaactttcaaaacctgtcagtgattgggttccgaatcctcctcctgaaagtggccgggtttaatctgctcatgacgctgcggctgtggtccagctgagatctg

SEQ ID NO: 132 - DNA, 2593 bp, Homo Sapiens
  AY726563
gcggctgtcccatgctgacagggacaagatttgggaaggcatagcccggaaaatcacctccgtcagccaggtgccccgctccgtcaaggacattaagcacagatgggatgacatgaaacggaggaccaaggacaagctggccttcatgcagcagtccctgtcgggccctggggccgggggccgggcccccaccatcgtgctcacggcccacgagagggccatcaagtcggcgctgctcacggcccgtgcagggcgcggcttccccagggcggaactggatggcaccgacagcccttcgaccagctgtgatgaagatgaggaggcgcctgggccctcaaggcagcctcttcgggtgcctctgcagcggtctccggaggaagaggcccacctggccaggcccgccctgctccgttcatcctcctcctcagaccagtctgagacggtgggccccaagccagaggccctgccccatccctcgccccaggcccaggctgcctgcaggacccctcggccgcaccccagcccacccaccacgggccttgactggcagctcctccacgtccatgcccagcagaccgaggtgttccggcagttctgccaggagctggtgaccgtgcaccgggacatggccaacagcatgcacgtcatcggccaggccatggccgagctgaccagccgtgtcggtcagatgtgccagacgctgacagagatccgggatggggttcaggcatctcagcgggggccagaaggggcagaccctacgggctccactccccaggccacccaggcccaagcccccctgccagagcccccaccagcttccccagcatcagcccccacacggactaccaggtctcggaagagaaagcacaatttctaacccagctagtctgcactaggaggaagagtcatggaggagggatgtctggcctcacaacaggggccagtctttcgtgtccaggaacaggatcgatgacccttgtaggacactgggggcgctgttacctcctcaccgagcgcaggtcgctgccctgtggtctaacagagcatgtattcagacccgcaccctcatctttggcggatgctgaagatgcaagaaaagccacctgcttgatgcttgcttggcctggagatcgttctcctcttggtctgtgtcccgtggtggcaggccttgcagggaggggggcgcaacagtggggagcatccgaatggagtcccactttccaaccttggggctgctgcatcggcctcccacatgtgacctcccaggccctgatgctgcttcttttgaagggggtgaggcctgatgggcaggtcaagtcggtccttcagggaggggtctaccctcccttgcccgggggtggtgcccgccttggccctccgcttgcccttgtgcgcgtgctcagctgctgtgcttgccttttttggagtggggagaagaatgggatgacgtcggaggaaggaaaagactgtcttgcattcatagagagcactttatgcttttcctcgcccttgcagagtctgggtggtctcagtgggggctcaggacagtcagctcaagacagccaagtcaggtattattatgatcatttttatcatcatcatctgtataagacaaatgacacagccagttagtgagagggccaggactggaagccagggtatcggttttcccagctcccctgtcagaggccagatctggagtagtgggaagaggaggcagggggcaggtcttgccccttgccaggcctctgccccttgccaggcctctgccccctgtatctctgcttctgcctcagctgtcctgggtgaggtgggaggcacctagcatttagcaggtgattctcccaccctgccctggctctatggctcatagccagtggcttggagaggcagggccagatctcaggagtggagggcaacctcttccctggcttctaaaagaatccagagcccagtggggctcatgtcccattccaggttccagcatgccttgcctctgcttgctcgggctgcctacgcactagctacatacacctctagcttcatgtttcatgttggagtgtggggagaaaactgggttcttagcattagagagggaagtggcaggtggcagatacaagcttagctctgacctgggtgcacctcagctctgtgtccttttttttccctgacctgaagctgaccccagcagaagtcccccagccaacccctccacccaacaaccccccaccctcccatcctgcccccagccatagtgggagctgggaggattgcagcatctagtgccttccaaggctgttcctggagcgctgcttgtaaacccaagccaagctttgtcccacgtagggagaatggaaggtgactgcaatgtccctgtgcctttggctccatctccccattctgtggttctttgggggttcctgcttccctcaaactgaacactctcctgtccaacagcctgatggcttaattattgcctggaattgcccggcctccgatgctggaatcaaagattgccttccgaagtatttttgttaagatggcaataaaaagaaatcaatctcactctttgaacaaaaaaaaaaaaaaa

SEQ ID NO: 133 - DNA, 1449 bp, Homo Sapiens
  BC014384
gggatttccagagattgttttaaggagcagtcttatattcagggtagaaagttatgattggatctgctgttaaggagaacaaaggagcttctaaaggtttgggaggtttactggtagtaactattctaggaaatatttatgttttaaggtgatgttcacatgggttctttagaaggaacatagtcaagtgtgatggattaactctatatagtctttctcctcttgtgcgtgtaggaaatctgacctgcagtgtcagttgatgtgacaagagataaagaaagcacagtattttaaaatctaaagcagattcctttcttagaaaacaataggaaaaaattatagatggatgtctttgctgaaatctaacaattagctcatattccatgagaaagagtggcctaagaattatttcatgttacctagccttctgaagctactcacttgatgtgcctagcactttgaaactaaccttttctttctttgttcatgacagtttaattccaaatatttactattttctcttgtaactgttagaacagttccttttgacattaatttttgcctacatatatatttttaagttgagaccaaatcggtgaagtgttgagcaagtaacatttatgatgtgtgtatattggaacaaatgtaaaagggttacaaagattagaaacagagtcataaaaaatggcttgatttataaaggcattacttttggtgctttatataatggcatatattgaactaaaaatttgtatatacagtatgtcagcatttcttagtaacttctcttgaatccatttttaatatctaatattgtacaggttggggagttacattcttcaggccaatactatccagactatataaatttataaaataaattgaaaaattcattcccctgtattcaagaccaaagcacataaatgctaatgtagggctcagaggggaaatacagttctcctgcatatttgagaaaatgtgaagtcctttcaagaaaatctaataaacataataatcatagcctgctgacactaaggaaaaaggacctcattcactctttcttttatgcagtgatttactggtccctactgatttccaaattggatcacgatagtaaattatccatgctggtacctgtgaaagtaagccctgggatccatatttgttttgtgttctgcttaaatcagcaagaatgataaatttgatggtgtgaaattggaagtatcaagggctttctttggtgattgagggaaataatgtctctacttgtaatttattgtgaccctttttcactgtatatgctttgtatgtctaatatttatttcaatgcaaattaaattgttccttcatctgtattgttatatctaagattttattgatgttaaaatctaattgtggaataaaaatctctctggaatccaaaaaaaaaaaaaaaaaaaaaaaaaaaaa

SEQ ID NO: 134 - DNA, 981 bp, Homo Sapiens
  BC016972
aacctcataggtggtttgggatgtcttttggctgtgcttaaaaatttccaacagatttgctacacatcttaggataaatatgtttcctgtgaattgtgatgatttcttacagtacatttgcaagcatgtgtatgcatctgcaggaaacatagcctggctctgtgaaggaatactgctgtgaccgcaaaactgtttctgtagaattttctccggtgtggtcatcctgccttcagaggtttctccaggacgtcacctgtatgaggtacacagtgtgatgacacactctgtgcttttcctacttgtgtccacggctcaagcctggaagaagccttaggacgtgggggaaatgtctaacgtggagtccacctgctgagcaggaccgggtgtgaaggaagaagctttgttctgattcctcatggcccagccacccctcgcctgagctgagcctggccacagggcccgcctgcaggaagggctggcccatggcttcacactgggctcaggctgcgctaagagccccgggtgaggacctccaagcccaggaagcctcagttggccaaagtgctagatgcgtgtggtctgctttcatccccgcttccctcagagcttgcattttccaaattcaagagaggctccaccttcaagaagaccggcctgtccctgttatttatgtgtccccctaccatatctccctttgttctgcagagcggccatacctgccagcagcctgctctcccggccatgctgcggttcacaaaagtccagcatttggctagcttcctgggggaatgaatctttcagagccaaactaatgctatgcatgcagcttatgatttttttttttttgtcttcaacaaagtgaatacttactttttttttgctctttaaaaaaaaaaaaaaaaaaaaaaaaaaaaaaaaaaaaaaaaaaaaaaaaaaaaaaaaaaaaaaaaaaaaaaaaaaaaaaaaaaaaaaaaaaaaaaa

SEQ ID NO: 135 - DNA, 1553 bp, Homo Sapiens
  BC017440
ttgggatcagatggcgcaggtagcctgtcctcagttgtcccaaaggggcagaggcaggggtgcctggagccaagagttcctgagcctgcaggacctgtgaccatgtgggtcacccactggctgaacaggtgggctggtctggagggggtggcctcctgagcccagaaccagcctaggatctaggggcacaaggggagccggcgtggcttcccacaggggagggccctcctctttctggacttggcctccattctttgcatctggctcaatgtctggattccgcccggccttaaaaggagcccttgtgaaacctgggaagcctcgtggccccgcggcgttggctcagctgcagccctggtcctaaaccttggagcgcagacttgaggcaccccctcctgcctgttggtgctgagggggttgggtgctgtgtcacttgatgacgtggctgactaccacccagggcagcggccgagcccatagtggcgtcagtgccgccggcgtccttggggtccagcggtcaaggctcagcccgctgaggggacccccccggagttggttccagcactggtccaggactggagagtttctcaaggaccttgaggaccccagaagcccttgcagcaggaaaggctgtaagggggggtcagcctagggcaggacctagggaggggaactttcttgatacatatttgccttttcatcccatctagcaagcacagtgttaattttagaaattatagaagaaaaaatcagcaaggagtgtgggaaaactgcatgccccaggcctcccccgccccagggtgaattggaagccctggaatgggccgaggcacaccaggcagctgatctgggtgcatgtgggccacagaccactctcacaaggttaaatctttaacaagagcctcatgtttgttaggagaaggtgggaccccagcccaagcacttccccattgcagcctggcatgaaatctttgccttttagtggggatcactcctgcccgagtcctggctgtggtggggactctgcaagttgctaacccagcgtccattctctttcctccgtactaacagaaccccggtgcctctgcccagttccaatagcgggcagacgagagccatgtcctgggctcccttgcagcccggggtgtgcagctgtggcgtggaggtgggtggtgctgggagagacttgcagggaagctcctgtgaaggggactcagctgccacatgcaggacccttcccctttgccttcttcctgcctggaacatggatgtgatggctggtgctgggacagctgtcctgagagcgtgaggaaagggtcacaccctaaggacagtggagcagaacacaggaaggaccctgggcctttgctgacgcagaacgcgggaaggaccctgggcctttgctgacataccagccccagactacttaaattcagctttttttttaatgtgagaaaataaatgcacccctctctggtttaaaaaaaaaaaaaaaaaaaaaaaaaaaaaaaaaaaaaaaaaaaaaaaaaaaaaaaaaaaaaaaaaaaaaaaaa

SEQ ID NO: 136 - DNA, 1255 bp, Homo Sapiens
  BC020840
gtgttggttcagaggagggaccaggcagaaggtggttgagaggcagagctgcccctgagtgagccatgcagaggatctcctccctcatccatctctctctcttctgggcaggagtcatgtcagccattgagttggtgcctgaacaccaaacagtgcctgtgtcaataggggtccctgccaccctcaggtgctccatgaaaggagaagcgatcggtaactactatatcaactggtacaggaagacccaagatatccagaaccctgaccctgccgtgtaccagctgagagactctaaatccagtgacaagtctgtctgcctattcaccgattttgattctcaaacaaatgtgtcacaaagtaaggattctgatgtgtatatcacagacaaaactgtgctagacatgaggtctatggacttcaagagcaacagtgctgtggcctggagcaacaaatctgactttgcatgtgcaaacgccttcaacaacagcattattccagaagacaccttcttccccagcccagaaagttcctgtgatgtcaagctggtcgagaaaagctttgaaacagatacgaacctaaactttcaaaacctgtcagtgattgggttccgaatcctcctcctgaaagtggccgggtttaatctgctcatgacgctgcggctgtggtccagctgagatctgcaagattgtaagacagcctgtgctccctcgctccttcctctgcattgcccctcttctccctctccaaacagagggaactctcccacccccaaggaggtgaaagctgctaccacctctgtgcccccccggcaatgccaccaactggatcctacccgaatttatgattaagattgctgaagagctgccaaacactgctgccaccccctctgttcccttattgctgcttgtcactgcctgacattcacggcagaggcaaggctgctgcagcctcccctggctgtgcacattccctcctgctccccagagactgcctccgccatcccacagatgatggatcttcagtgggttctcttgggctctaggtcctgcagaatgttgtgaggggtttatttttttttaatagtgttcataaagaaatacatagtattcttcttctcaagacgtggggggaaattatctcattatcgaggccctgctatgctgtgtatctgggcgtgttgtatgtcctgctgccgatgccttcattaaaatgatttggaagagcagtaaaaaaaaaaaaaaaaaaaaaaaaaaaa

SEQ ID NO: 137 - DNA, 1469 bp, Homo Sapiens
  BC025727
gaaaagaaggttggaattatcgtaatttgtttctaggctgagataccagcatggagaaaatgttggagtgtgcattcatagtcttgtggcttcagcttggctggttgagtggagaagaccaggtgacgcagagtcccgaggccctgagactccaggagggagagagtagcagtctcaactgcagttacacagtcagcggtttaagagggctgttctggtataggcaagatcctgggaaaggccctgaattcctcttcaccctgtattcagctggggaagaaaaggagaaagaaaggctaaaagccacattaacaaagaaggaaagctttctgcacatcacagcccctaaacctgaagactcagccacttatctctgtgctgtgcgggggaggggaagccaaggaaatctcatctttggaaaaggcactaaactctctgttaaaccaaatatccagaaccctgaccctgccgtgtaccagctgagagactctaaatccagtgacaagtctgtctgcctattcaccgattttgattctcaaacaaatgtgtcacaaagtaaggattctgatgtgtatatcacagacaaaactgtgctagacatgaggtctatggacttcaagagcaacagtgctgtggcctggagcaacaaatctgactttgcatgtgcaaacgccttcaacaacagcattattccagaagacaccttcttccccagcccagaaagttcctgtgatgtcaagctggtcgagaaaagctttgaaacagatacgaacctaaactttcaaaacctgtcagtgattgggttccgaatcctcctcctgaaagtggccgggtttaatctgctcatgacgctgcggctgtggtccagctgagatctgcaagattgtaagacagcctgtgctccctcgctccttcctctgcattgcccctcttctccctctccaaacagagggaactctcctacccccaaggaggtgaaagctgctaccacctctgtgcccccccggcaatgccaccaactggatcctacccgaatttatgattaagattgctgaagagctgccaaacactgctgccaccccctctgttcccttattgctgcttgtcactgcctgacattcacggcagaggcaaggctgctgcagcctcccctggctgtgcacattccctcctgctccccagagactgcctccgccatcccacagatgatggatcttcagtgggttctcttgggctctaggtcctgcagaatgttgtgaggggtttatttttttttaatagtgttcataaagaaatacatagtattcttcttctcaagacgtggggggaaattatctcattatcgaggccctgctatgctgtgtatctgggcgtgttgtatgtcctgctgccgatgccttcattaaaatgatttggaagaaaaaaaaaaaaaaaaaaaaaaaaaaaaaaaaaaaaaaaaaaaaaaaaaa

SEQ ID NO: 138 - DNA, 815 bp, Homo Sapiens
  BC030118
agcggcgtccgcgcgcgcggggcggccgcggcggtgagcctgcgcgtcagggccgctggcctctccttggctgttggagagccatagaatacctgtttcagagctgaaggggacctgagcccatgataatccattacctcgtgagaaagcggaaaaactgacttcagcttgcccagatggcgcagagaatgggtttcccgtaaccccgcctgtgtctttccttcagcctcgtcccaaatgccgtgggagggaaggcactctctgtcaagctgctgtcaccttacctgaagtaaggagtccacgcctgcatgtccgaggaaaacagttttctcaaacacattagttgaaaaactgaagacgctacctaaaatacaagctgagttagagacagcccttgtaagactaggtaggtatttacagggcctctcccactagctttgtttttccagagtttgttctttatccggaaattcttaatttgcctactgatcatttaaagaaagggttctattaacattgacacagaagagacactttgtggcactttttaaaaatctgagtctcgtgacttggtataacttctgaaacttactgttaatttatagcagagctatttgagtaatatgctcttctatgagtatgaacaatagaagaagtgtgatttttaaagtgatttggactacaaaataagagcatggaatataggctttacagccagtacttgctgaggatgtactgtgtattaggtgtggtgcatataaaaaataaataaaatgtggtccctgtcttcaaaaaaaaaaaaaaaaaaaaaaaaa

SEQ ID NO: 139 - DNA, 1112 bp, Homo Sapiens
  BC030766
caaaagtacagtaacgaagtattgaaaagaaaattttggagacattggagcatattatatatagcttgtggaaagacataaggctacagatggaatggaacattcctgttttcttgaagaaattcacatacacatagctgacctgactagtacttcagctcttccacagccttctataaaggttctttcttctgcaaagaaaacaaaacaaaacaaaacaaaacaaaaaaaaacaaaaaaagcgcaaaaaacaaaaaaacaaaaaaaagcaaagtaaaatttaaaaatacagaaaacaaacaacaaaaaagaattcaaccataaatagtgactattattttcagtgtgtccttcatgtgaaagctattaaggaccaaatatactactgttcataagaagaaattactttctaaacagtaactgaaaatacttagagttaaacttgctgtggattttgtcttggcagttgtcatcttacattatttgtcaaaggaaatgtgtttggcagttaaaaatctttccttagatttagtggtggactttaacctcttaaataaatgttagtatatcagattgtgtccttgaaaaatattttacttgtatgaatcatgacaacgtctaaatctttactattcttctggcaaaagcatcagtaagaaagaaggcgaaaaagagaagtatagcctttatgtcagaaaaacattctttttagctgcttactttctcatgaaaagtaaagatgtttacagtgtatgccaagttttaagtttctgtataacaacaggtagaggttctaatcatattgaaaattgtgttataatggtctgagccatgttgctaggaaacaataggttccaattttgtattcctgctctcctgtgctgaaaagtgactggatactgtacaggttcatgttctctggctgcagttaaatggtcttttgcattttgctctggctttcaggccagaagcatgcatttttctacaagagcatcacaacaacatgctgtaaatatttaaagttaaacattatgtgttgatatttgaaagaaaagtactttgaatatttcatttttaaaaaataaaattgccaatgaaaaaaaaaaaaaaaa

SEQ ID NO: 140 - DNA, 975 bp, Homo Sapiens
  BC034638
gggggaagcggcgagggcgagccgcggggtctcggcgcctctgtatgcttgcacttaacgagaacccagagcgaacacgacccacatttctctttttgttttaagaggaaatataggagttacagcatagaattacaatatctggacattagaaataacaggtcccggtcacggtatggcaccgcgcgacacacttggtccctgaggcctggatgccgctcagcaaacgttcgcggaatagggttgggtttactgtcccccaccgagccggttgctcattcattcagcataattgaatacctcctgtgtgccaggcactgaatcaagtgtcggagacaatgtcctgccctcaagctcctggccggttacttgacaaccttccgggacctcaacgctatgtgcctactgtgtgaaagcaaagtgccaggtggaggacacaaagatggcgagcgacacaggatagtccttaacaattaagcgtgactaattttaataacaaatgagaatatgatgtgacatccgttccaaatcctgtcgttccaagtaacttcttaagcatctttcacgatacagcctctgcttgaaaggaattaaaacaggtacaagcatggaaggagacgttgctatcatatttcaagaataagaaaatgctgttttgtgtggttgtgcagcaggcaatgaaatgagcttacaatcaagcttccgtgttttactgaaacaacagtcacagatgcagtagatgttaaaggttgaaagacgagtgcagtaaaagcattatgaggacaagaagaaaacgtaaatatttgtgttgtttcattctttgttgtggtggcagaaacagccccctctttctaaggtaactccaatataatgatctctcccagctttgaaatactccatgtctgtttcattttccagaagtatggaaaaatgaatatataataaaaaaccctatttcccaaaaaaaaaaaaaaa

SEQ ID NO: 141 - DNA, 4262 bp, Homo Sapiens
  BC035116
tctgtttgttatttttaccactgttgaacagcaaactgttgaggctagggttgattattgataatttttatgtgtttagtaataaccacagcatcatacgtacaactgctttaataaatcaaagttaaggactttgaggagagcatgtagcaagtattcattttaacaaataatcacagacagtttccctgttcaaagctccaccaaaaagcaagcatgcagcaaaggcatagactgtatttagagatgtggtttcatttattcttgaagtcctataaccttgcattatttaaacacaaaatcccacctaacatttgccaaatccaagttaatctcaaaaacctccgaggacattgagcacaagcagattactgtaagggcactggtggcagattgtggtggagagagggctgagtgacccagagcaaagcctgcccgggttactcgctgccacttcaggagagggattgtatcagctctcattaccttttgtcatgaggcagttcataaattaaatatgatatcatgcattatctcaaaatatttctatattaattagataattcacgatgtaaaacgtgttcatgcagaagcaaaggcggatgtaatagtcaagtatcagggaaaaacccctttaggatacacagacattaaaaatgtaaaaagtagcttataagaaatgtggattatcagatttttactatatataggttgtgtttaatagtaatttctgacacctgcacatagatgaagaaaaggcagttgttaccacttttcaccattcaaaaaatgggcttgtctcttagagtattggttaatgctttgcttatttgttaatgaagacagcattttaattttaaagcttccttttgtaggactgatggcacgggcagaatcacatttaagaaaaatggtttggaacactttttaataaaaaattgtaaaatcagtttccagtgtggtcaaaattagaatgtaaaggaaagcatttttaagaaaatacagaagcccaaatcaagggagagtaatataaaaggaaatattttaaattaagaaaaggaggtgttatagtttattacatcatgaattatgctttctgtacttacgctcttagtgaaggagataacattgaagtgagaaaatgaacattctcagttatttgcgaagttagtaaaattgcagtccctattccatttttttctgatgaaaatggatacatgagatctcatttattgctctcctcaacacctttactgtcccagattccattcacgttccaaatcgtggacagtaaaactgaagtcaggtaaacacagtcacaggtacaactgggagcaagttttaacatagtggtaattttgcaaatgccaacatgaatactagtgagtactcaatttacgacagacaatttcacaaaaaccaaccacagagtgatttgatattcttgcttcttagagagttttctaatccatataatgcaatgggtcaggttgctcatatgattaaaaaaattaatcctgtagaaatgatgtattagacatctctaacccaagaaaaagatgtcttttgtataacttttaaattcccatttgtctatcttaggacaaatgatgacttcttcgtgtagtaatgaaaacgtctaaatcctgctctgtggagaaaagctagaaccatgggacattaagcaagaatactcctctgatttaggctcccagactacaactaacagtctttatgtatttatcatcttggttattgttttatctcaagcatatacagtgtgcagaaagtagaataatgaataaaatatgaccatggagaaaacccataacttttgcttctattatagaaagcagtgtttgttccttttaatttattacatgttcacattgaaacattaacatctacaatattgtctttcagtttactcttcaattactaaagcaaatgattttgatttatagcacttacacaactgcagttcaggtcacagaattgaaatctatttgataatgtctcagcattctcatgggcagccaggaaaaaaaaaagagagagaaagacaaatagaaattttagtgggttcagataaatgattattctgacaaacctggaaaatagtaattaaacagttcattccaaaagaccccaatgtaaactctgctcacatacataatttgtataaggaaaatgtatgagtttttttcttaaaaataaatagaagcatcattgcatttataacagattgatcaatcttatgaacagattacattgggaaagtcactattattgctgtgtgtttgtatattttattctttccttttttgtgtgagcatctactatgtgccaggcagtgactgtgtctgagtgaatgtatccatggtgagcactcaggcgccatcactgccttcttggggcttacaccctattggggtgtcagagatattataacactcaatattgacccaatgggatgaaaattgttatcttcatgatttcttccaatgggcttagatttgttgggacagggcagaattagaataattatttctcacatataagagtaagtgatatgagattgggaatttcttgccaacactcaagcaaactgcagaagataattactccattttactagctcacctagtttctgaaggatggggtggggagtgagacatggagcctctggggacaaggataggggggtgggactgtcccagtggagggtgccactggaagcctccacccaagtgggccagcagctgtgcaagggtgcagcagtaggctggtgaaagccaggttgtccagatctttctaggggaagagaaggattatagaaaaggagaaaagggaggagcaagaacatctctccatggcctatttttatttttgttcccaagagactagtgtaataaccttatgcccccaaagacagcccagaactgagtatcttcagtgttcctgagtgtaaatcagtgaatctgttatatagaaagttaacatttcaggagcacaattatttcctgatttcaaatatgaacagaagactaaatgtcatttttttaaatcataaatttggtatccatagttactttacacattccagagtctaagcatggaatttaagttttgtattttgaacaaaaatagcaacatctgttttctgtatggcaaagaaaaactaaatcccagacttttatttttaaccacagaaaccatcacttctttctaaattatttgcttgcctgctcatttcccctaaacatctctgtttatgccaatggctttttaaatccaaataatactagttattgccaaattgcattagaatcctattgaattagaataattcatatacttcatatactaggcagtaaatggttagagacggtaaagatctgattgtgatcaaaagtagggtttttgttttgtttttaatcatgagcacatataaaaggaaattcaaatgaaaccaagccaatttctgatttagtaagattaaaaccatagatggagctcagttattaaggatggaaaggaggaaagcacagagtgaggagagaaaaaggggaaggaaaaaaagtagtgtttttttggggaacagtataatgtctcagaagttcttctctcttatcctgctgatgttgagacagtggctttgtataagcttttatttatacctatttcaacatcatgaaaatttttccatcagcattttcttgcaactttaaaaatcacaagggattatttgtttataaagagatacaggatctataatttattggcaatactttattttaggaatcttcaaattgtacttaataaataaatcacaggtcaaaatgactgtaaaatcaatcaggctttctcgtaagttatttcctgaaaaccatccatgataaatacaacaaggcttggcgaaacctcattactcttggaagtcttcagaggttattatacctactgatctgtatttgtctctaagagacatttgaaacacagttacaatgtcaatttggtgtaacattacctgtagtagagctcagagtatatggcagtgcacggtcactcaagatgcatggcgtgtcatttgggtcgctttgatgggtgctcgggtagaactagccttgtagagactaatgtgttcatgctatctctgatcctgtggtgttgtataaaaatgaacagctaaaaatttacccatgacaagattaaagcaaaaataaacacaaagttgttagactttaaaaaaaaaaaaaaaa

SEQ ID NO: 142 - DNA, 2880 bp, Homo Sapiens
  BC036485
agcggtcttttttttcccttttttaaataaatgtcaatttgatatcaagtaaaactattgtcattattgatcagaaaccatacattctgaaaatgaatccagttttcccaagctggcagaagtcagagatcatttttcaccttgatctgtgttgcgtttgtacttagtgaatggcagtgtggttgattggaagagcttgacactgatgtttggaaaaattctttattctagtggtcattttcaaacttgtcttctgtagagaggggaaaaattatgtatttgcagctaaagcgaagagactggcacaataattattaattgtgttagttcatttctatattaaatgaagcatcttcacaaatcaggtttgaagccattaaaagcaaaattttccctagtttaattaatttaaaattctaaattgcctgactacttagaatcttagaaacgccctgctagactgattttattatagaaatgttaacatgttcctcaacattttctcaagaaaattttcagacatatatcaaagttgaaaaaactttgcagtataaccactgctagattctaccatcaacatttgactatacttgtattgccatgtatctgttcatattctctatccctcttttcatccatcgatccatcagattttttttttaaagaacattccaaagtaaattttaggcaatacactgccctaaattcttagcatgggtgtcattaattaaggtttagtattcgtttaaatatctattttgaaagtggtgtatgaagttgataatctgagccaattaacatacttttttttttttcctcctgtggacttttgtcttccagtttctctttttgtgtgtacttagggtgagggaggacaattcctttcaaacacaagtttattttagaattggtcatttttaagtgcttgtcataaattttaaagtttcaatataatttttcttttccccacttctgataatgtatttttgccaaactatgcagcttcttcaaaaaactgtaaattactgattggggtttatgaaatcagcgaatacctcatttcaatctgttgctgcttttctccctcttgtcacttctcctttcactactttcagctgctctaccagaaggtagaggggagtaaagggtcaaacccctatataattagctgttttaaacaactctaggagagcagattaagtagcttagtaagttgaaactattaatttttctaaagaatttgatttgaattccttgagaattgtaattatccacacttcctccagctataattagcagaattaaaaatgattgtactgtacaatgagttgttgaaattgtaagccttagtaaccatctttagctttattgtagtcatgtttagaaaaaattatttttacatatgcctttatttttatgcccactttttgtggataagattctttagataaaatctaaaaattttaagtgactttctccaggtcatgaagattcaatgggtagaattgaatcagaattgaaatgttccagattcatattcttgtgtgtgtttgataaaattcatggcttccaaagtaactgaacacttcctttgggcccttggagggaaaatccatatttttactaattacacttttttttttagacatctggcagttctttgaacttaaacatattctcatggccatagttccaaattaagcccgacgcagttgctaaaaatcttgctgcactgttgaatactaataatgcaacatttattggatgtttttgcattttgatgaccttcatgattcatttataagtctttgtaagtgcttaagtgaccccctcactagtgaaaataataaatgttctatatcatttattattatttgtgtattctatacatgatatatttttttaaggaagagtaactccacatgtcagaatgagtgatattatcctagggcaaagcgcaaatagggcagtttgtttctactctgcaaatatggcatgtataggaacaaaactcttttggagtggctggtcattgttttgccctcttttggtacctgagtacctttctggggttttgtaaatcgtgtgtcatttgtaagaatttcacgttaactctgcgttacttggtgttcacctgtggtatccttgactgaccataatgatttagtttgggtatgatgtgtctgctttgaaatgccttactggagtatgtcagatcctgctttaaagcattccatatatctgctgggacaataagttgcttctccttggaaatatgctctagattcagaagcaaaaccgattttgctttcaccattaaggttgcattttaatgcagttattgttttaaattagagaataaaatgtaaaaccaagggaggctttagaaccctttattgaatggcatggcaaacttttaaaactgcttttgctatttcactagaactatctttgataaaggatatagctaaaaaatgtcagcccaaactgtgtgtaattagggttgtttattaaaattttctctaaatgtcatacagaggcttaagatctgtgtatgctgttgggtcggagtgccagtcactgctttggaagtctgtgttctggggctgcagaatgacaaacgtgtcatgggattaaaaccaatcaactgtgaattgtgaaattgaaactactctttcggttttattttctttagcatattgagtatagaaatctgaaacttatttaaaatttatactgcttttgttgatggctcattttggctgtgtatcctcacttatgtactgatttctgataaaggcttgacattattataacacgcattttgtgttccagtttaataaaacggtttctgagtcttgtctgaaaaaaaaaaaaaaa

SEQ ID NO: 143 - DNA, 1650 bp, Homo Sapiens
  BC036926
ttctgagccaaccatgtgcctcagacttctctgctgtgtggccatttctttctggggagccagaatgaagaacttattcagaaagcagaaataatcaatgagcgatttttagcccaatgctccaaaaactcatcctgtaccttggagatccagtccacggagtcaggggacacagcactgtatttctgtgccagcagcaattgggccatcatgagctacaggaacaagagacccagtacttcgggccaggcacgcggctcctggtgctcgaggacctgaaaaacgtgttcccacccgaggtcgctgtgtttgagccatcagaagcagagatctcccacacccaaaaggccacactggtgtgcctggccacaggcttctaccccgaccacgtggagctgagctggtgggtgaatgggaaggaggtgcacagtggggtcagcacagacccgcagcccctcaaggagcagcccgccctcaatgactccagatactgcctgagcagccgcctgagggtctcggccaccttctggcagaacccccgcaaccacttccgctgtcaagtccagttctacgggctctcggagaatgacgagtggacccaggatagggccaaacctgtcacccagatcgtcagcgccgaggcctggggtagagcaggtgagtggggcctggggagatgcctggaggagattaggtgagaccagctaccagggaaaatggaaagatccaggtagcggacaagactagatccagaagaaagccagagtggacaaggtgggatgatcaaggttcacagggtcagcaaagcacggtgtgcacttcccccaccaagaagcatagaggctgaatggagcacctcaagctcattcttccttcagatcctgacaccttagagctaagctttcaagtctccctgaggaccagccatacagctcagcatctgagtggtgtgcatcccattctcttctggggtcctggtttcctaagatcatagtgaccacttcgctggcactggagcagcatgagggagacagaaccagggctatcaaaggaggctgactttgtactatctgatatgcatgtgtttgtggcctgtgagtctgtgatgtaaggctcaatgtccttacaaagcagcattctctcatccatttttcttcccctgttttctttcagactgtggcttcacctccgagtcttaccagcaaggggtcctgtctgccaccatcctctatgagatcttgctagggaaggccaccttgtatgccgtgctggtcagtgccctcgtgctgatggccatggtcaagagaaaggattccagaggctagctccaaaaccatcccaggtcattcttcatcctcacccaggattctcctgtacctgctcccaatctgtgttcctaaaagtgattctcactctgcttctcatctcctacttacatgaatacttctctcttttttctgtttccctgaagattgagctcccaacccccaagtacgaaataggctaaaccaataaaaaattgtgtgttgggaaaaaaaaaaaaaaaaaaaaaaaaaaaaaaaaaaaaaaaaaaaaaaaaaaaaaaaaaaaaaaaaaaaaaaaaaaaaaaaaaaaaaaaaaaaaaaaaaaaaaaaaaaaaaaaaaaaaaaa

SEQ ID NO: 144 - DNA, 1338 bp, Homo Sapiens
  BC039397
aaattgaagcaaatcaacagcaaatacagcaggattcagggaggcttagtttacaacgtactttgtacctcctgccatttaaattattttgccactctgggcttctgaaaacacaaagggagatacagccctccaactatgagccttgcagagagagacaaaagggccagaggtcctgggatggaatactagagcccccaccttctcatgctttggaaacctgccagagcacttaccctgctggaagattaatgaagactccattctgtgtttcataacagtagcgttgttttctccatcaaaaacagagggtcacagaaatgtgctgaaaagatgtggtccagcaaggttctgtagtcccacctcagtgcctgtgggctgtgtttttcactgtaacaagcactttggtaaactagaaagaagaaaggattctcaggatgtgttcaaagctaagagagttttcattttaaaaagaaacatacatactcactccatggctttcctcatcctcctctcttttttcttcttggtgggaagctggatgcggggcatgcatcattctgtatggacaaatgtgttatgtccacccatactcttgtgacaactccccagcactgtcctgcaataccatgctggccttggtagtaaaactccttggtatctgtgagagtcctctttttctatgccctagactacttttaaccacttttctctggaatgactcccacatttgattgggtattgaaagggtaacagcaaaatgatgattgtggagatggatctattaggtctcatgttggtcccctggttgaaactattttcaaaaaagccccaacaatgggcctgtcaccttgctagtcatccattcttaatgcctatttatcagccctctgaggtcatataaaagttgcaccttttgaaccaagtatttgtatttactatgggaaaggtgtggactacagattcgtattatattattttaatggattttaagtaatttataagtatgctgagtgtaaattttttttaaaaactgtattataaaaggacatatcctgtgaaatataacattttactgtttaatagaataattctataagaagaatgatttatctcacccacggaactgattacattccggatgcaatcaataggcactttgtaatttcctttttgttttttttctttgctggggggttgaggggtaacaagataccatctgtataaagtgcagtttgtgtcactcaaaatatgcactgtatggctacacaaaagcagcttgatgaacaaatcaccccatggctcattaaagaacaaagcttcaaaaaaaaaaaaaaa

SEQ ID NO: 145 - DNA, 1135 bp, Homo Sapiens
  BC039681
gattgatccgccgtgcgcacgccagcgcgttcctctgtggcaggagaggggggcctgcgtgtgaccgagcgtgcgtgggaggacgcgcgtgtgtgtctgtgcgccctgatcacggtggtctgtgggtggggcggatcgtgcgcgcgcgcccgatctgtgcgccccaagccagcagccttgccttactggtaccagtacctgcctgctgctaccaactagtcaacatgtggcatcttccaggccactgtgatgagtcagggatgagcatctgactctggttggtccaatcagcttgtccagggactttggctgggaagattggaaaggaggccagctttttgggctggggttgctgagagatgtgatgatgaaatgtgtggcctacctggcatctggccccagcttcagctccatttactgtcttgctccccaccctcactagcctgcattgaggcctcctctgtgccccccaacccctgagtttctcatccccagagagcccagctacacagaattgaagggttttctcattcatcttcctgcgctcaccctgaagactgggcctatgtcatctgctaaccactgtccccccagcactcacagtggaaaatggagtgttatgcagccctgcagcttgccttctagaacagttcacaggcaaggcctcccacactgaaccctgctacagccagatggtgccagcaacacagagctacttgttacatcagctcagactaagccacacccacaggagcatctggtgattccacagaaccacaagagacttgacctcctggaaatgaattaaccaagattaatgaaaaagattaaggtcatgtgccctgtaaaaatgtccctcactggatgaactgtgacaaagtagggtactgcgtggtctccccagctgaccctctccatgggtcattctttgcttttatcactacctggcacaaatctttacgtatttgtttatcgtcttccctccaccagtagttaggtgtttgcccttgctgtatcccctgtgcctagaacagtgcccaacattggcaggtggccaataattgcaaaataagcaaatgtatgaatgaaccattaaaaaaaaaaaaaaaaaaaaaaaaaaaaaaaaaaaaaaaaa

SEQ ID NO: 146 - DNA, 2220 bp, Homo Sapiens
  BC041923
gggctgctgtagcccctacgtggtgagtagatcgtctccacagaaatcagcggaggcttccacagtccctggttggaatggaatcggcggtgaggatgagaggcgctgaagaccagaagacccagggcgtgaacggggcgtgtcatccctggagtttcagtagaatttcaggcctgtctgcttgagcagcagaggaggagtttctgtgtgcctgtgagagactgtgtgtgtgtgtgtgtgtgtgtgtgtgtgtgtgtgtgtgtgtgtgtgatgaatgaacagggttgtgtacgtgtgtgtgcgttagacaaatgaacagtgttgtgtacctgtgtgaattgtcactgtgactccaggctctaggctctgcagattcctcagccctatcgcctcacagacacttgggatgtgcagcaggtaaaagagagaagccagattcatggaggcgtgaaggatcccagcaagaaaacacagacttgatcttgagacgagatttttgaaattggttgcggcctcaaggcaggctctgagaagactcgataaagagttctcaggaataggcatcactcctggatatttcccccttggaagcgccgaggagccagctctatgtttgtaaccatagcatttctaaagctccagccccaggaacctgctgtgaattagagacagattccaccctaggcatcactgatcttggcctctcttgtattgggaaggtcaacactgttccagtttctctcctactcccatctggttgtgctcggtgaagtaggtgagcagtgctacccttctgttaaaaaaaaaaaaaaaaaagatcctgaaagaggaaagaatttttgctacacatctgaaagctaaagtccagttgaactccagaggagaacacagcccaggtaacccctcgtttgcagcctgtgagaccagcctgaggacagcacccagctaaactccaggtccatggaaactgtgagattttatatatttatgttgttttaagctaaattcgtggtaattggttatggtagcaactgaaaattaatgcagtaagaaagtctaaggagatcggaagagactaaagagaaataacagctaaatgcaacgtagattaatgtgtgggatcctggaaaagacaaaggacattaatgggaaaacatatttgaataagatgtgcaaatttttcgtattgtaccaatgttaatttcctggttttgataattatcctttggttatgtaagataaacgctagaatgaagggtatatgagaaccctctgtactactcttgcaacttttctctaagtctaaaataagtggaaattaaaagttaaaacaaaaaaaaaggaaaattttatctatcccaagaccacaaagttatttttctgtttcttcctccagaatctttattgtttgttttcacacttagacctatgatccatcttgaatttatatctgtgtatgtagtgggatgaagttcaaaatcatttttttcatacagatatccaagtgcactggcaccgtttgttaaaaacactggccttctcttaagctgcagtcagacttttactgtaaagcatgggcccatatatgtgcaggagtctttctacttttccgttggtcctctttgtcaatctttgtgccagcacctccattttaattcctgtagctttatattatatcttgataatctggtaatataagttgaagaacaactttgttcttcaaaatcactttgtctattccaggttctttgcattgctctataattttagaatgagttaattaattttctcaaaacaaacaaaacgccctgctgacattttgttggcagtacattgaatcagtagataaatttagagagaattatctcaaaattgagtcttacagttcatgaacatggaatacatttccatttattgaattcatctttaatttctttccttaaggttttgttgtttcctgtctaaaggtcttgcacatctgttaaatttattcctgttttacattttttatgtttttacaaactgttaaggttttaaaaattttatttttcagtagctttgctttaatataattgttttatacttttaccctttattcagcaataaattatttaatttaaagcttgtggaattaaaaaatatttttatgtacataatcatgtaatctacactatctgcaaataaagatcattttacttccttccaaaaaaaaaaaaaaaa

SEQ ID NO: 147 - DNA, 1261 bp, Homo Sapiens
  BC043009
agctgatcatacagttgaccagttcagggtgcccgctgctggttggatgccaggcggaatgtcagggtgttctctggtgtctgttgtggctgtgggatccacggttactgggcggagccctgtggtggctgtggtgccatggaggggctgcgatcttctgtggagctggaccctgagctgactccagggaagctggatgaggagatggtggggctgccaccccatgacgcgagtcctcaagtcactttccacagcctcgatgggaagacagtggtgtgtccacacttcatgggcttactgctgggtctcttacttttattgactttgtctgttaggaaccaactctgtgtaagaggtgaaaggcagcttgcagaaacactgcattcacaggtgaaggagaaatcccagctcattggcaagaaaacagattgtagagactgaggcatctttaaaagatgtcagggtacagaaaaagtctttcaacacccccggctttgtagatgcctacaagaaggtgaatagcaccaacgagatgctgatggagaaatttaccaccctcgttcaagaactgaaagaagagacatcctccagactctccaggcaacaagaggagctggtagagatgctaacaacgctggaggccctgggagaggccatgagagccaccccgtcacaaggagcttttccacacctgccatgcagctgagagccaagccctgctgctctctcccccacgagggggctgggtcttagagcagcactgttcttttcccctccacccaggcctcccgagctgccaggctctgtgctcccacactgactccatctgaggggtccttgaggccagtggatctggagtaccccgcccctggcctggagttcctcctccttctcacgctgacactgcagccagctcctcaatgggcggtgcctccaaatctaaagaatatggaggtcctggagcacaccaagaaatgagggactttttctttgcagaaagtttgaattctgtcttaatgagacagaatgccatacttgagcacctcatcttttgctcaaattgaaatgtcatcgaactgtatttctcaagtcaatggtctgtaaatatgatttatgtattaatctcctaagtgaacaatttatattttatcctctacataattatcgtattatgctttaaatatatatttagtttatcaataaagacattcagtactcaaaaaaaaaaaaaaaaaaaaaaaaaaaaaaaaaaaaaaaaaaa

SEQ ID NO: 148 - DNA, 4239 bp, Homo Sapiens
  BC045657
ggtcggagcagagcttctgagaaaggcacacgctgtttattcttatatttctttcatatagaagcttgtgttgtactttgggattttcagtggctggctgaacaagagttcaaacagcaggcaagtgttgtcatggtagtacaggaggcaaaaccatttatattttgaacacttactgcactgataggatgttttgtggttgagctgattttagtactgtagataggtcagctgtttttccagagtgattgtggatttcccaagaggtgtgaaattttgacgtgatgctctttttccttagcattgtaatgtatgtgttgcaagaaaggttaacataacttgaactaattttaacatgttccttactatttacaattttttatttatatgttttatatatatacatatataaatgtaaacaaagccatatataattaataaaggcattggatcattattataaaaggaagattaacaaagttaccctggaacaatagcttacttatccaaatctcaacatttacattttaacagttttgtatgtttcaaagttgaaactactgtaagagaaagccaatactatttatatctgaatcaacagtagcataaacattttttaattgagattgtattttaatcccttttgttaaagtacattaacaacagtttttcacaggatatgaacttggcgaaattagttcttaatctgaattacagggtattactatgaaatgcagttgattttgcagtagacgtacagtcatttaaacttccaaatgagtgttgtccatgtttctgttggtattttggaaggattatacattttattgccttcagcattgattatgttcttttgaatatacttagttttggcgaaagccttgtcctttgtaagttggtttgatcttgtgatgcaaccaagtctcatttaggtcaagactaaataagagatggaggggtagagggtgtgactcaagcaggataatattgatttgataaagagcatgtcacatgcctgttttcttgccagataaagggcatagcacatgcctgttttcttatatactagaataaaggctctcctaggaaagatttttcttaaatatttaaaagtgaaaatgtgagacaaggccttcaaggagactacccaggaagatacacagtttaaaatgttggctatacagctctcaatagattattttatagttatagttgaataatcagttataatacactgtaaagaaatcagattttccttctgtttggtgtctgagtccttcctgctcttcttacttctgagaatctgggcactaagaaatcagtaagtacattgtagtgctcctgcatcccagagtccttaacctaaggagggtcttagtcactggtaagaacttggctttctaattatattcacttggtttttaacattagtagcttgacgataatcagggtatagtaaatttccaccaaaaatgtgatgcgaagaattctgccttggtcctttatggtaaaacagataataacgtctaaaatagatcagccacaagtgcagcaaatatttttacactctctttgaatagaatcccaaccaccctcccccatgattttagaaataaaggcttcctaaaataatagaacaaattggcaaacaatcactaattggaccagtaggttcttacttaaatatctctcctagatttttagtgtatgttttgggattttatgggtttttttatttattttttttaagcagacgttacagtttgttttaatctactatagatacgtttttgttttttggcttagttggggataaaataatttatttgtaagttagctttctaaaacttagagaaagtaatttaattcacgtatcttaaaaataaaattccaaagttaaaaaatttctgacttagtaggaagttaacaaaactactgctgatgcatttcagtttccaaaatctgtaccctccccccataaaaaagggagataagatgtgctagtttaagtagttagctgaattatagattgatcctcttaaaatctggagtttgtaaaggggcctacataaacagtagatagacttggagggattttgtgggggaattgaaactaatagtattctatctagtttgtcagtgtttactttttgatttttatttttcagaaaattttcctttcccaggacaccctcttgtattagaatatcctcttctgtatcacattaaaaacagattttactgttagaccaaataagatgggcaaatagcaacactagagcatctcacccagtttgaactaggatgttcgtggaagttatgacaccaatatattcctgaaatgaaaattaacctaaattttaaagtgaatctatttgaaaatttacttagataatgaaacctcgttttaattgtgctttttgtgaatccaacacttgtttgcttagaaagtatcttatccagtattaatattttgttcttttgggttttaaagttgagcttattcagcctcaatcacattacagcaagcataaagtaacagttgactcaatgaaagacctaaattgcctgtacagataaaattcactgaatcaaaggcacaatagctatcttttcacttgagctcagaaaagtaagatggcttaatttgaactattaattttcagtggcctctaattaaacaaaaacaaaaaaccacaaatactggctaggtaagatattcctgaggtcattttaaaagaagtgtggcacctaggattcaatatttaatgctaacagtattatattttagtgaaatttattttggtggtgacagtttattaaacctaattagacttctttcaatagcttgttgtagagacaatctcaagggctggaaagtgttgctaaaatgaatgtcatacatttctgatatactaaggagcttataaaataattctttcatagtgcaagaattattaatttcttagaggatgtttttaaaggagctacttaattgggaaaatgttctttaaatatcagtaatagttcattaagtaacatagtagctaagaacatggactatattttcacagcatagttcagcttaggcacacctttagtttggattattggcattctcttacgtaggaattatatcattgtagatatgtaattatggtaataagcaattttcataaccatgctcactcagactatatcatttgaaactgccatgtttccatttttgacaattcatgttcacaaaacaacaggaacaatttcctatttggtataaagagcaaaatttccaactttgccccaaaatgccatgggtggcatattgccatatgattatatcatatatttaatcatgtatgggaaagattttggattttttttcttatttaaaaaagtgctaaatataagaatatagttttaaatcagcaagtctaataacactattgcagctgtacacagagagaaccttttgtgcctttttgcctgcagtaagcatttatttctattttacatgagttctaagaatgttgatgattattgcaccttgttcttctgtatataaacttgattaaggaatttttttttttaaagcaaggagccgttttttgttactaggtggataccttagtaaacatgaggggaattatcagatagatgtctttggagcccagccttccctgtgtagtgagctggaaactcctttagattgtattcattggtgtgtatgtatatgtacatatatgtataaatagttaaatacataaacataaaacttaacatcgcattgttgtgatgacaagaagtagtaaggtgctaggtggttacattaaaaagcacagcacagtgtataatcagtcactatgactggtggttttgtaagctgggttcagtttttgaaccacccagaatacctcatgtgtaaatacagtgttcatgacttaattgaaatacagttattgtttaaaaaaaaaaaaaaagaatgtgaagccactggttggcttatgccttctgatctatcattcttgcctctttttttgtaaaggggttttcttcttgttgttctgttttttaatagggtttacagctagaattttgaatgccaaagttctatttattaaattaagaaaaaagttttcaatgttaatggctagtatttttccactggactattgtttgttgatgttggaatttgtatttacagagaaataaattttttataaaaagaaaaaaaaaaaaaaa

SEQ ID NO: 149 - DNA, 1750 bp, Homo Sapiens
  BC064139
caatttttaggtactttggtatgataaagttgtattatgattaataataacaagtcttaatttgaggcttactcacttgaggactttggtacaaaaatgctcttttgctgtttttcctgaccaattttcactctgaatgcaaaagggtcatatgtgataaacactgaagtgccacaagtcagatttcttgattgcattctgcctcagcctgaaatggacttgctaactcaggcagaaattgaatttgttgagaaaatagtgtatcaaagggaagactttgagggtgctgaaagtcttttatattttggtctaggtggtggtttcataggtgtttacatatcaggttgcatacttaagatttgtgccctttatatgtcatacctctttttaaattttttttaatgggcaagcttgagaaatagacttggaaaagaaacagaaactaagagaggctaggtcgtcagaatgacagcaatcaaggccatacctggttatgacactgctgttgctgtcactgtcactaagcagcctcatgtactccccactggagttagttagaaaacatcctcattctccattactcctgattcacagtcccagacagaagcatgagattgtactccagcttccaggaggcagagaggaattagcttgcatcctttcttagaatttacatagtaagtagattctatgatcgcagaaggagatttggatgctgagcaggcaaaacagtgacaaatatacacaacactttcctaatcatctgaaccctgttgctccaaaattggagtctttcttaccctgtcccccctgtatatcccagccatcaacaggtctaagtgctgtgtgtcttaaactgcattggagtttgtcactgctaataccctagtccaagccaccatcatccctcaatctcatatttcctctctgctatcactctcccctctctacacccacgatccagtctattcatggaagctactatgaaaaagatatactgcatcatttcctaggccttctcccttgctccctggctctagcaacactggggaccctcattgctgtctgaggctctctgctcttgccattgcccctgtctggaaagctctttatccagatgttacttaagcagttcctttttgtcattcgcttctctgctcaaatgtcacttcaaagagcctgcttctgaacagcctgctctgagaataaggggaagaagcagatggagatttctgggtttttttgtaataaatgctattaataaatacttatggtactatctgactaaactgcagatatttatcactttggtaaatgtttacatttaaaccaaatttaagaagaaaaatgtttaaaaaactacacccacatccattgtcactttttgtctatcacctgggcttcaaggctttatcattatctgaaattatctcatttatttatttgtttattcatttattgtctatgtccactcctgtagaatgtaatctccatggcagcagggactttgtataacaatctagttcattgccatatgcctagggactataacatagaagctgttcaattaattgttaatcaatgaataactgtaataagatacttgagaatggttgtctttttgttaggaaaagactaagtactataatcgcaatgtctacataattttaaaaatattcactcctgagtaataaattatttgtggttaaaaaaaaaaaaaaaaaaaaaaaaaaaaaaaaaaaaaaaaaaa

SEQ ID NO: 150 - DNA, 1303 bp, Homo Sapiens
  BC067908
agtggagacggcggcggcggtggctggcgtcaggctgtggacgaagaggcggcctcggtggtaagtggcggccgctgggacccagccaggtaccggtccggctcggccctgcccctttccggccgctctcactccttccctcggcctcgagttcctcgtaggcccgtgggggccgccgcggggtcggggctgcgaggcagcgcccgccgttccatggtaagcggtgctacgggacgttcggaaggaaacctcgctagagcaggggacgcctgggctcctggctgaccacggggcctttgcacggccagggctttgcgaccgcagtgtcttccttctgtccccggtcgtgcgccgtgcccctcagcgcggctcacgtttcggaacacgtctgcctttcatgcctcccgaagagcctccccgcatcccgtgccccctgctcgctgctgccgctgacccttgggcgctgcgctggtccagagcgtgttgtcctctgacgccgtcagaacctgagctccctgcgagctgggactccgccgtgtcttcattgcctccagtgcaaagcaactgcttgcaagagaacaaaagtgtgttcaggtgcacagagtagaaaattcaaggagcctgaaagggtatttggtgaagacttgatgtgtttttcccagtcctaacctccaaggcccagttctcccctggggcagagggaaacccgtttcttacgggtctgcaaagaaagtctatgcaggaacatctacgtgcgtttctgcaaaaggtcagttactttacttggggctcttatacttaacgtagctcggagagcgccccatgcattcagatacaggtgggattcctccggaaacggagttttatagcaccagactttatcccctttcctgtagaaatttagggtttttgctgtcttttataacgaacaatgctagcttgactattgcttgtacaaaccgttttttgcccaagtcggactattttcttaggttaaattccttggtgcagaagtgcgagggctgtatttaggcccctaaaggggtggtaccaaatcgccctcccccaccagcataagagggggccggcgacacccttgcccaagctggattttgcagacctggtaggcgtgagatagtatttcactgtagcttgtgtttcctgtaagtatagtcgaacgtcgtgatgttcctgttacatctatgttacgttgatcattgttaccactgacagtcgtttcgagattggaaaatatgtttattataaacgtttgactatttaaaggccaaaaaaaaaaaaaaaa

SEQ ID NO: 151 - DNA, 1464 bp, Homo Sapiens
  BC070337
agatcagaagaggaggcttctcaccctgcagcagggacctgtgagcatggcatgccctggcttcctgtgggcacttgtgatctccacctgtcttgaatttagcatggctcagacagtcactcagtctcaaccagagatgtctgtgcaggaggcagagaccgtgaccctgagctgcacatatgacaccagtgagagtgattattatttattctggtacaagcagcctcccagcaggcagatgattctcgttattcgccaagaagcttataagcaacagaatgcaacagagaatcgtttctctgtgaacttccagaaagcagccaaatccttcagtctcaagatctcagactcacagctgggggatgccgcgatgtatttctgtgcttataggagctatcttcagggcggatctgaaaagctggtctttggaaagggaacgaaactgacagtaaacccatatatccagaaccctgaccctgccgtgtaccagctgagagactctaaatccagtgacaagtctgtctgcctattcaccgattttgattctcaaacaaatgtgtcacaaagtaaggattctgatgtgtatatcacagacaaaactgtgctagacatgaggtctatggacttcaagagcaacagtgctgtggcctggagcaacaaatctgactttgcatgtgcaaacgccttcaacaacagcattattccagaagacaccttcttccccagcccagaaagttcctgtgatgtcaagctggtcgagaaaagctttgaaacagatacgaacctaaactttcaaaacctgtcagtgattgggttccgaatcctcctcctgaaagtggccgggtttaatctgctcatgacgctgcggctgtggtccagctgagatctgcaagattgtaagacagcctgtgctccctcgctccttcctctgcattgcccctcttctccctctccaaacagagggaactctcctacccccaaggaggtgaaagctgctaccacctctgtgcccccccggcaatgccaccaactggatcctacccgaatttatgattaagattgctgaagagctgccaaacactgctgccaccccctctgttcccttattgctgcttgtcactgcctgacattcacggcagaggcaaggctgctgcagcctcccctggctgtgcacattccctcctgctccccagagactgcctccgccatcccacagatgatggatcttcagtgggttctcttgggctctaggtcccggagaatgttgtgaggggtttatttttttttaatagtgttcataaagaaagacatagtattcttcttctcaagacgtggggggaaattatctcattatcgaggccctgctatgctgtgtgtctgggcgtgttgtatgtcctgctgccgatgccttcattaaaatgatttggaagagcgaaaaaaaaaaaaaaaaaaaaaaaaaaaaaa

SEQ ID NO: 152 - DNA, 1186 bp, Homo Sapiens
  BC071749
gcaaaggcttaagggtgtaacctcagaatggggccctgaatcagctgtgggcgagctcctagagtatcttaattcctgcttcatctctttccattttgcagttgggcaaactgcggctcagaaagataaagaacttctccggagcgaaaaagctgctaagaatgtatccaaaactccgcacgaagtctggaacgtttttttcttagagttccagaattgtgactgaagtgtacccagagacacaaagaaatacagaagtccagaatgatcaaatgagatcactacccaatgaaatgataggccgaggagccagaaattgtcctactacctgctttccaggtccagattccacgagagccttctgggctcccaccagagaccctcagtgaagactctgttgaagactttaagaccatgctagaaagcctcccggcagaggttcaggaagttctgctatgaggatgcagctggccccagggatgtcctcaggcatctctaggaccttgctggacggtggtggctgagacctgatatccacacaaaggagcagactgtggaaatgctggtgcaggagcaattccaggctgtcctgcccgaggagctcagagctcaagcacagagatgtcatcctggaatcagtatcactggctaagtcttgctgcttgcttcttgctcagcctgcatatgagaagtcaaccaagcattctcttggatgcaagatccaactgcacccatgggaaatctgaacttccactttctttgagcttgtctttggttgtaataagaatccatcaaaacccatgtctggatctctctttggctgaggcagctttatttcctacggagtttctctgtcctcttgttaggacaatcagcctgctgctttgggcttttccaagagcctatttttcatctgctggatgcctctttttttttttttttttttttgcactttgtgacgtgctttaatatatatattttttatgtatccaaagaggtaatcaactttaactttcagaattcatgaatcttggtttggtggcatgaatgaaaggttatgtaaccccaccagtaactcatttggggtgcccttgaaatattaaagtttggtcctcaataaaaaaaaaaaaaaaaaaaaaaaaaaaaaaaaaaaaaccaaaaaaaaaaaaaaaaaaaaaaaaaaaaa

SEQ ID NO: 153 - DNA, 1476 bp, Homo Sapiens
  BC080552
cagaaagtgactcctccaagtcccaggaggccagggcttttctcatccttgcctttcagccctaacccatgggactgcccacggattggagacttcaagggctgaggtctgggagctgcataaagggcattgcttcagcccaggttagaaatctgcctgggcaagctcttcctgccccagacctacaaagcagcagaccgggggctctggtggactagcccctgacattggtggggggccccacaccactccaccccaccctgccttccagctctcctgggcatttttctccctgtactcaaacagcctacccacccaaggtttcctccctgggcagcctagcaatgaacagtgcagccggcagggcagaggcccggcagtcaccgggcccgtcaggctcaggcagagaagccacaggggccaggagtcactggagactatttctaaatgatgggggtaaatgcacaaatagaatctcaccaaagggctgcctccacattgatgccgtgcccagagggacagaaccaatgccaccagcctgggtatatgtcactgggcacagctctaaccccctcctccggactctagtcccgctcctctgcgcacagagcccccagcccacaggtacaccttcatgatttggagaaagacgctcgccccatgcacgccctcctctgggccttctgccctgctcccagtcacttccaagcttcctgtttgcctgtgatgttattgtgcctgttgagggaagcagcagaggaggcagtggctgacttggcacagatgcctgctacgtgctctgttgaaatgcgcggggtggccattcctcggtacagactagtcctggtccttgggtgtgggcagtgggggaggaaccaactggtcgaggtttcagagccaaaccttgcctttggttggtgagtccttgccccccaggcctgcgctccacgatgcctttcacccttggcaatctcagggccatcctgggtagtaaccccactcctctctgctcccgcccgcacctgtggctctcactctgggctcaacccctgcaaccctccaggagcccgacagcagccagctgcctgcactgtcgcctccgtaagctccaacttccagacccagaagtccctctgcttccctctgttggaaaaagcctaaaagaattagcttccagattcctctagcccctgctccattcccacccagtccttctgaagaggaatgagcaatacatctgagctggatttctctctagtcctttctccagacaaatccttcttaaagcaaaagtcctggctgagcacctgtccttggggaccgatctgccgtgtgaccaggggaagaaagttcccgaaagcctgttccaccaattctgcttctgtgttgtgaatccagtctgctttccattagaaaaccgcttcggcacttatggtcactttaataaatctagtatgtaaaaaaaaaaaaaaaaaa

SEQ ID NO: 154 - DNA, 3761 bp, Homo Sapiens
  BC090942
gggatggtttgtatagggcaggaggcccacccagaagtcctacccagggaagagagggcccagaatctagttgcagcatttgcccagtaaccctaccccggcctttctttgtgtgttaggaagctggaaatgcaggctggtctccctttcttgcctttgtcactaaccccgagctgtcagccatttggaatcagaactgctttccagtgttctaagtccttatttgattacaaatatttggtgaatcaaagtaaggcactttggtcctaatttttgacctttggtcctaatttttgtttgtaagatgtggagaataaccctgaccttaccaggggtcctgggaatgtgaatccattcgtcaagtggttccacatctagaagaattttgcctatgccgtgtcaggcatcattcaacacaaggccaactatctgctgccagtctggcataagatcagattgaaactgctaagtaatggtacatccaaataaacaaagttcttccaagagagtaaacccaagtccatcttatacacgtatttgttctgggttcgtggggacgacagttcagccgagtccgatgttctagagcagaggttctcaaccctggctgtgaattaggatcatctggccagtttttgtttttaaatcagtgcaagggccctcccctcagagattcagattcagtagcttcaggtgggacctggaatccatgctttgtttggaacctcaggagtgttcttgatgtgcagccaggattgacaagagcctttagtctagagctcgcagcagacctctagactatttggaatctgattttaaagaatggcccagcagatgaaggtgtttttttaaattgttagtcatgtgaaacgaactgagtattgatcagtaatacagacagggcagctgtgagagagtttgatgctaatctttgcagaactcaagaacatactccataaagtacagctgaaaagatcacgaaaaccttggagccttcgaggaaagagaagggtgacttggggtatgtatggggagaactaaaaacctgtcatcttggttcccacttgtggggaataaagggaaggtattgtcttaactgagctgctgactaatcaagcatgaaggtttctgggaagctgttttgtttttttttttttaatttcacctggaattaaattaatagtcccctctggactcagattttcttttccttcacctatcctcatgcctgagtccacactggattcctcagaataagggtgggcccatttactgctggagcaaagtagaaggttgtggtcctttgctatcacatggtgatggtggtggtttccgtagcaggtaattaaggagatgcacacttttgtatagccctgacagagagaagatgaaagctgctattccttttagtacactttttgagaactaccagaaacctgaactttctctcctagggaagaaaatttggaatttaaataaggccacatttcttcctaggacacaatcacaggaagggcatatggatccgagcatccagggtggttactggggtgatcagacaaataagcattgatgcctggaaggcagaaatcacactgcgacatcaaatgtttcatcaagcaaacagcaaggatctcttcaggctgtgttctctagacccgaaaatgtcctctgtggtttggctgacaaatggaatctctttagaaaacatgcaaaagggtatctcagctatccatgaacgattcggtctaggacaaagaactaacagttccttccaaaatagaggtctgttggtctgtttgacgtcatcccatcatcctatctctccctgtccttgtctgcagtagaagttaatgtaatcataccagatgtttaatgtgaacaagtaatttccaaatgtagaaacaccactgatgcacttagggggaaaaacagtggcagggtgttagagcatctcatcagaggtgaaaatcacccacttggaaacctactgtgcacccgttgtgagttctaagagtgtatcagaaagctgattttaccatctgttgtgaaagattatctgcaatgagggctgctagaaagtcagcctgctgatctcacaagtatatgacttcttattccacttcaaaagtggggaacttgacaagtttcttgtctgccttttgatgttgattctatagattaattagttcaggaacaagtctttcatatacattagactggtatcattgagttctgagctattctgttgttctttaactgacactctggattgccagtgtcggctgctacattctgatacagtaagtcaaaggaatctagtggccaagagttgtagtttagaaacaacccatctgaatactgcttttaccactttgatacctgaaaagatcatccccctttctaaaacctgaaaacaacatatagagaaatactgtagaaaccattgctagtgtcttaactaggaaaagcaagtagactcatcaacaatcctttcaaaacaagacctagagataaacagttttttccagtgtcaattttcatagacatttttaaaaaattaaacacatcttgtcacccagtgctagcaaaaattgtaaagagcaaaaccaaagtttttgatgttagtcttatttttgtaagcagggtatactatagtcgtggcccatatggaacacacaggcagccggttttctgctacctgagccttggagaagatgagaaggaagggctgcctgctgtgctgccctttgaaaaggtccaaagcagacaggagcgcacacagcagaagtcaccttctccttctgatgaccacctttcaaaaggcttaacagaatcaccaagtgtcacagtcagctcttggccagtggaaaattgtctgggcctgtatatgttggaggaactcagatagaaaaggacttgtaaacagcatggaaacctcaacatctgctgtctcaagcacttaaaaaaggctacaattcaggtgttactggatgacttaactgcatggacatttaggggctgacttgtgttgtgattattccaattgtgggctttggagaagcagagggatgattttcagttgtgtgggtgttaagtctatggattgggaatttaccactgaaattgatcgttcaaagtgtgacttcatagtagggccagctcctcctaagttgtccttttgtttttcacataaaatacatctggtactttttacttggaaagttgtactatgtccatgaaaatggttaaatgagaaggccataaagattcatttaatagctgaaaagcaacttttaaaatagaataggacgaatttaacatggaatgatgtgaccttctagggaactttttatagagagcttacatagtgtaattggggagaatttttgtcttctatttccattcaacagtagcaaactggtggttttataaaattaacattatagtatgttatataaataaacgttatataaaatgacattaaagtataactgtgaaaaattaaagacttggagttatccacaacctttatgtgcaataaggaaaactgcagtaggcccccaaagtgccgtctttccctagcattttactcaatgtttgcctttgtgtatgtttagattgctattgtaaagctagccatgtgtgttcctgccctttactgatatttaacacattttctcaaagcttttctttttttaaaaaaacaaaactcaaaataaaacaactaactggctgaaaaaaaaaaaaaaaaaaaaaaa

SEQ ID NO: 155 - DNA, 340 bp, Homo Sapiens
  BE152897
cccgggtcacgccattctcctgcctctcgctcccaaagccctgtgattgcagctgcgagctaccgcacccagctttcttttcttttgaacagttgggtaatgtgactctcttgagatctgtgcattcaagtgtaggtctctggggattcagtctcatactatcaaatattctcacttaaatatacaatatgctagagtatctctaactttttgtagcgtgcgtatgaaagattgcaatattagttgaaaatatttatttttttcgccatcttcttatttagagatggcgacattcttagtgtgtagactgaaataaatcactattgaaccggatagcttg

SEQ ID NO: 156 - DNA, 830 bp, Homo Sapiens
  BE276063
tcggctaggtacgaggctgggtgtgctcccttactggccgctcgaagctgaagctgcagttcactttcgcgaatgtaaggaacccagcttctgtgtggtgggcactgagagcagaaccgcattgagtcggagtggagcacagaagtgtaggtccttttgcgctgtttcaagctaaacccgtgtcactgatgccgtacagaagttacagaatgggacgccaccccaaacattacgtcatccgctgaccatttccttgcggtcttcccaccgtctaaatcgccatataatctgatggatggggtcctcgcgcggttcagctcctgggcgacagcgtaacccgtcgctcctccctctgcgggagggcgtggacggggcacgggattggagcgtggaaggaatcgggaccgaaaggagtcccaggacaccggaaccaggactccccggcgcacccggagagtttccgagctcctttgaagtatgaatcagaacttctggatgggaatcctggagccaccacttgccctatggtcgcaatgggcaagtcgctcaacctcccagatcctgttttctcatgagtaaaacggggattataatacccacctgacaatattattttgtcgagaattaaatgagtttagaatgtacacaaaacacaacacacaaaaaaactctccggggcgctctatgccgggggcggaacaagggggttcggaatggcgcctgggccatagcggtttcctggacccagttttcttgtccacggtgggactctcggccggtcgcctatagggagccgttaaattccgaaaacccgtaactctagttcgcca

SEQ ID NO: 157 - DNA, 621 bp, Homo Sapiens
  misc_feature (474)..(474): n is a, c, g or t.
  misc_feature (614)..(614): n is a, c, g or t.
  BE500990
aattatcaagtcattatattatgtccatcagtcaaaattgaaaaaaaacacaaaggatttttaatacacttcatgttttcatctgtggatgttaattacagaatagctgacagcagaagagtattttaggttagaatctttctctgagtctcactgggctcccgggtgattatttgcagcccttctgtcccttcttccaggccttccctttatcccaccccaccccatctcacctctgcgccctcttaattgttcacggagagaaagcaagaacaccaaccaactgatgacgttctttctgtacttagtgttacttgccagtgagtagtcatttttgtgagctgggagacattctcccaggaggctcggcctctgaactagttcttcctgggcctctgaaaaaaccctccttgctgagtgccttctctgaccccatattaggccctgagaaaaggaaccattctaatgttgtanggctcaaatcaattgttccagatcccaaggcttgtaaacaattgaggctgaaaccatgcctgctagaagcctgtgctgtcccactgtgctggttgctggagagcttccatgcccttggtctgcccaacacaagccattgntcttacc

SEQ ID NO: 158 - DNA, 711 bp, Homo Sapiens
  BE540565
cctagcaggcatctaagataaagaaagcaatgattcggaagtccagtagggcccatttgaccggtagcaaaatcgaaagcacgaaatagatcaaggttagggagccagacaaagcccttggaagagaggcagtattgcagatcgaagcaagcagttcagagtctatgaggcctgggaatttaaaagcaggaagagtaagaagcagaaacaagaagctccatctgaacagactcctctctccaaccttcatgagacccacagtgtgtgatgggccaccacagcactggcttctagacttttacagggaagccagtgaacaaattacctcgtcacccagaaaacaaagagctcaggaactattttggaagttccttccagtctaagactatggaactcagaatctagcaggtgtgttcctttggatagcaaaactaaagatataaatatgaataagaaattctttgccacttctcctgggcaaggttatactttatgccatctactggataaaccagatgagtcagttgcttctgtcagttgctgtgtcacagatgacatcttctcaaaataatattatctcacagccaagaaatagcgcttcgtttactgtgtttttctatcctgaaaactaaatgggttacgcttcatagtgggtaagatactccaccaacaatagtaccatagatctttctcactggtggggcaccaacg

SEQ ID NO: 159 - DNA, 964 bp, Homo Sapiens
  misc_feature (964)..(964): n is a, c, g or t.
  BE612775
tactttaaagaaaaactatttttactagtttatctgaatggtctgtggactttatttagaaactgtttttcagtttagttttttggacatatcctttgctcagtgtattttgttacttctctagtaaaggtagaagtgaagcagatgccattgtaggttttaccagcatttaaatatattatgaattgcttagcaatgaaatgcaagtatgcatcttttacttaaagatactatttatgtattcagctacagagatgaaatagcattttatgtgttaattgttttggctataaaatttaagtccttacagcatttggggattatacacttggatttcaaaattgataaaacccttgtgaacatatctaatagatattctgtttacttgtagaaataatataatgtgtctggttctgttttgttagacattttttatgttctactgaatcagaatagtcagtgttatattccttatttcaagaattcatctattttatggctacatctcatatgtgctatgaggacttctagccagtgggtggcgctgtaataccgaagtactgcactgctttgttcctgtttccttgtgctgattcctttctagtatttaggtaacattaccggatggcattcccttaaattccaccaatcttaatcttattttaaaatggctacttttagggggtggggtacggtaaaacttaatagtacgtgtttatctcagttaatgtctggatatctatatgcactggttaacagtcccgaccgtatatgatggcgtatttaggaaagatataatactggccttttaatataaaaatcaaaaagagcgaaaaagagggggggaaatcccgggggcctaagccaatattaaaggagaaagaggataaaaagcggtaaaagagcgaagatgtagaaacccgtgagtagacaaagaaaagtatagctgtatacaaacaaaagn

SEQ ID NO: 160 - DNA, 923 bp, Homo Sapiens
  misc_feature (805)..(805): n is a, c, g or t.
  BE622355
catgcagacaaacttttgttaattcagagcgatacaaaaggcactttgaatctataaaacttgaaaaagttaaaaattgtatgtcggataaagctttaagtcatctgtcactattaacctcagtgcagcaattctgactcctgtgcctggattccttttatgataattttgccacctacaggacagattaggtgctggtcgcctgaattattttgtgttctgaattattttgagctctaaaatggtaaagtacaaatactcatgttttactgtgccttggccttttataaaaaggtatttataattcgttgataaaaaccaatatttgaagctgttgattaccaacaaaaaagtttcactctctttatagtgcttcaggatacaactttttcagggccttattagagaaaaactgattcacatgttattcttctaaagctaaattattaaaatgtaggttgaaagattggattgattgtgaatctacactaaagatatggttccaggcagacctccttagagacctccaggcagacctccttactgtcttcaggtgatgtttaatttcattactgttactgggtgcaagtgtctttcattggaagtgaacttactccagttatcgaatgtctatcatatcataattgcatttctccaccattgaggtatttaacaaagtccctaagagattcatttcttttattattcataccaaacaatagcgtaggctcacaaatttacacgtgtgggtcttttctcctggaagtatgatgggctggtaacacacaacggggcggccctgtcntttaccacaacaacaaccaacaccacaaaacgaaacaagaaaaacaccaaaaatacaaccaccaacgatcacacgagcgacgaagaacggaaaatattgaattgtttaaaattcgggt

SEQ ID NO: 161 - DNA, 505 bp, Homo Sapiens
  BE671137
tttaaagataggtgttattccaaatacattgataatcactttaaatgtgaatggttcaatatgctgattaaagacagggattgtcagattgaagtatcaagccatagaatgatatggatgatctttaaatccttattgcctggtgaaagaaagtagtttaaaagggttacatgctatgtgattccaattatatgatgcagaaaagccaagcctacagagacgatattggcaggggagacagtaaagagggagggttgcataggtgaagcataagggattttttagggcagtgaaactattctgcataataccagaatggtaaatatacaacaccatacatttttcaaaacccactgaactttacagcacaaagattgaatcttaatacatatgcaacataaaatcatttaggataacactggtactcaggaagtaatgcagaatatgacaaaagaatctaactctattaaaatagtatgtaatgacctcacttgagtacgtgggt

SEQ ID NO: 162 - DNA, 534 bp, Homo Sapiens
  BE672556
tgagaagagtagtacatctcttcatagctaatttaagagaatagttgggttctcatctgtgtttttattcatattttttttgcgtcaccccagggttccctaggccacaccttaagaacccatatacctggagaatgaggggctcttaagtcaacaatggacaactttccattgctgtatcttagtaatgagttaacattcagaacgatggcattaaaggagtttctcaacctcagcactatgacgttttgggccagatgattgttgcaagggactctccagtgcattgcaagatgtttagcagcatcattggtttctacccactagatgccagttgcactgccccaccttcagttgtgataaacaaaaatgtctgtaggcattgccacatacaatatctgctgatgggcaaaatccacttgaaaactactagattagagaaaagaactgacaaaagatggaacacaattacaggtttttctaaaaattacttttccacaattatagggtaaagtttaagctgattaagtttga

SEQ ID NO: 163 - DNA, 464 bp, Homo Sapiens
  BF110036
tttaagccactaagttatttttatttttaaaaatataaagctacgtattgatcgccattcagcagtatctgcaagaaagtaagcaatacacactcaggtaacaacattcttattactatagtgttattgtttttcctgtcttcttctgaaccagtaacctaaatagtgaaatgattgagcctacatgtaatgaatgggttgaggtaaagaaaaagcatgcaagtcaagagtttacattgcaattgttcacccatgtatgccaccaggtctcaaacagcaacatctctaaccatctatttagtttcatgagcaaagacattccatgaattatgaccttttggccaatatagcataagattttcaactttttgtaaagaaatggctctttagaaggaacctttaaatgcccacttagctaagccttgcttggctaattaaaacacaccagtattgggctgagagtg

SEQ ID NO: 164 - DNA, 533 bp, Homo Sapiens
  BF375676
agagcaaatgactgttcttatttatcaggggtcttatgacgagcaaaatgcaacagaaggtcgctggtcattgaatttccagaaggcaagaaaatccgccaaccttgtcatctccgcttcacaactgggggactcagcaatgtatttctgtgcaatgagagaggctctttatggtggtgctacaaacaagctcatctttggaactggcactctgcttgctgtccagccaaatatccagaaccctgaccctgccgtgtaccagctgagagactctaaatccagtgacaagtctgtctgcctattcaccgattttgattctcaaacaaatgtgtcacaaagtaaggattctgatgtgtatatcacagacaaaactgtgctagacatgaggtctatggacttcaagagcaacagtgctgtggcctggagccaacaaatctgactttgcatgtgcaaacgccttcaacaacagcattatttcagaagacacctttcttcccagcccagaaagttcctgtgatgtcaagcctggtcga

SEQ ID NO: 165 - DNA, 539 bp, Homo Sapiens
  BF445990
tttttaaaggttagttcaagtacaaaagataagagtatttgttccagagacaggtctgggggactttggtgtctggccttaaagagaaattgtgaaggagtcattttgaaaatggtgttggtgtgtactggggcctcagccaaagagacttgggctcaggaggcagtgggtcagccaggcagatgggggctcatccgcgtgtctgtgactgggggagacagggaccctgccatcaggagggagcaggagtggcagcagtgggggccagcagtaggtgtttgttccaggttccctgagctctcctgagattcttccagactcctggaaataactgggcagaggagagccaaagccaactggctgaggtcaacccacagctgcaattcagattcacatggatgtgatcccattgaactgcaggctgagattcagtccattcacctgagacatgtgagaccccgttgtggtctgaattaagattcttcaaatttatatgttgaagcccaaccaccgtacctcagactgtgatcttatttgga

SEQ ID NO: 166 - DNA, 405 bp, Homo Sapiens
  BF509118
tttttttttttttttttaacttcttgccatctctctggcatgtaaagagttgtctaaacaatccttagcaaatctgccataggacataccacgtttcaaaacctttaatgcacggtttgcaataagatcgcaacacacagccttggtaccctctgtctatgtaaaaggcctgacttcgacggcaggactcacagccagggagtaacagtaggtgggctgcagtgtatataaacatctagctctgagaggtcaagcactgaagaaagtagcttcaggcacattggctaaaaagacctgaaagtgttaagtttgttaccattgaaagaatatagaatagccccatcaatcaagagatgctgaaaatttggtaaatgcttattagaaatacactctcccctcgtgccg

SEQ ID NO: 167 - DNA, 477 bp, Homo Sapiens
  BF510052
tttttttttttttttttgccagtttaggaaggtcacatttatagacaaatccaaacaaggtactttgctatcctctcttttgttcacagacagacaagataaacctaggcagagagaaaacttgcctcaatcttggattaaatgcagaggtctgcttgaacattccaaggtcaaactaaaagtctacaagagcaggagacttgattcaaaacagctcgtctctgactggttttcatgtgggcagaggggactctctcgacactaagatgaccacagctcacatagaggtgtcagctgaaatatggaggattaccactactgtagaagatgtcctggatcccttggcccatggtctctcacaggctacagtaaaggtagccctcagttccttgccatgtgggcctctccgtggtgcagctctcaggatggcagcagaatttatcagagcaggtaagtgaatcctcgtgccgaattctt

SEQ ID NO: 168 - DNA, 241 bp, Homo Sapiens
  BF511927
tttttttttttttttttaacccttcagtcattcagtattactattggggtagcttttggaattttccatcccccccactttcagattacttttgtctttttttttttccctgagaaattagtgaaaacagtttgaagtcttgccacgttgtaaggagatttgcattatttaaggaaacagctgggagatctctataaggccccacctctgttctgccagtggctaaaatttcctttgcatg

SEQ ID NO: 169 - DNA, 419 bp, Homo Sapiens
  BF514707
tttttttttttttttttgagatgagacactgtagtgtccttagtatctatgcccaaaacagacactgagtatatgtttgcttatataacttacatttgaaaatgaaaaacaagtggtgtcagcagtcaaattacaggcatgctttttgtgacatgactcgttaaatctgagtgtagtgaatgacttaagattgggaacaatgtgaggtgttcagcgcatcactaatgacatgtattacatatattttatggtaaaatgtgaaattatagtgctttccctaaaatgcatattatcaaggatatcagtaaactgaaatacgttgttaaactcctcacttttctacagccttctcttaatgtagaggaaataaattaaaactgaaatttggggctttttatttctacaatacttttttttat

SEQ ID NO: 170 - DNA, 214 bp, Homo Sapiens
  misc_feature (5)..(5): n is a, c, g or t.
  BF996074
gttanagtgggactctgcctctcatgacacaggttttgctggttcaaggcatcttcagtgcataagcttatcaccaactcaaaggctgtctctaaagaaaaacataggccgggcgcggtggctcacactttcatatgtcctcctgttgttataagctaataacagtaacagttatatgtatagcctaatacatttgtttttttgttttcttgtc

SEQ ID NO: 171 - DNA, 890 bp, Homo Sapiens
  misc_feature (31)..(31): n is a, c, g or t.
  misc_feature (40)..(40): n is a, c, g or t.
  misc_feature (577)..(577): n is a, c, g or t.
  misc_feature (863)..(863): n is a, c, g or t.
  BG217842
cagccagtgtccactcctgctcactttgggnacatctgtngagcagggtgcctcctttttgtccctccaagagacagttgggggacttggcctctggccgcctcaagttgggtcagcacctgctgggcctcatcctggttcatcgtgcatcaatgggagcgcacctgggttctgctgacatgtgagagcttcttcaccgaggggttcagaaaagtgtgctcatggcctgtaggtctggattcaaagggagatgagaaaaataggaactgagcccgtggcttgcctcacccacttcctgagcctgcgcaagggacaagactttcctgtgtggccttcttacggcagtccacagggaagtggcctcattttctgtgtctgtcctgcccagcgcccccactctcctgtgctggtcccaggccatcccttagccagagtgcagaactccagacccccaatattctctcatatcctcagaatcttcagcttccatccatggatgttggctgaatcctgagtggggtcgtagaaagatctggtcctgtgagtaggggggcgaggaggaaagcacggacttcanctgggctgtctacaacctgagtcttaaacacctaaagacaagcacaacttgcccccgcttggacgaatttcttgctccagaccgcctcactgcatctctagggccatgtgtattcctgctatttggccccctttcttgagaaaaattgcctattaaaagaatttccttattcaaaaaaaaacaaaaaaatggcctccttggccctccccggaggagctctgcgggcgccttcccttaggggaggctaattcaatgaccctgcctcactacctcgcttgccctcggncgatccactggggagagaaggtatcac

SEQ ID NO: 172 - DNA, 614 bp, Homo Sapiens
  BG434868
attcaactacatgctggagattagagatggtgccaataaaggacccagaaccaggtcttgattgctatagacttattaataatccaggtcaaagagagtgacacacactctctcaagacctggggtgagggagtctgtgttatctgcaaggccatttgaggctcagaaagtctctctttcctatagatatatgcatactttctgacatataggaatgtatcaggaatactcaaccatcacaggcatgttcctacctcagggcctttacatgtcctgtttactctgtctagaatgtccttctgtagatgacctggcttgcctcgtcacccttcaggtccttgctcaagtgtcatcttctcccctagttaaactaccccaaccctgtctggtttccttgcttatttttctccatagcattttaccatctcttacattagacatttttcttatttattggtagtttataagcttcatgaggcaagtaactttgctttgtttcttgctgtatctccagtgcccagagcagtgcctggtatataataaatatttattgactgagtgaatgagttttacatgcgcttatgaattaacggtgagtctaaatgttataatca

SEQ ID NO: 173 - DNA, 799 bp, Homo Sapiens
  BG436024
actttttatagagtaactcttaatctgggtttttctggtatttcttgatgattagactgagcttatacatttttggcggggataccacagaaatggcattgttcttttcagtgcaccgtatcatggtgtcagttgtcccattacaaggatgttaattttgatcacttgtattaggtgatatctgctatattactctactgtaaagtttctaattttttacgttaagttagtaagcatttcgtggggaaatactttcagatgataactattctgtttctcaacaaactttcacacactcattttagcatccagtgatatttcttggtggaattaattgttactctggtgttgccaagtggggattcttccaattgtattattatttctgtgtttattctgtggcattctactataaggaaaatattctactaaagccttggaatcagccatttctccaaagagccttagtttcttttagtggagaatggtttttagaaaccatgatctgagcctcctgggttgtcattgcttttaggcccctttgaccagacacagctaggaaccatgtattagaaatcacaagttttcctgatatctccagttcagtccaagcgctacagggttcttcctttgccttttcctattcctttactttaatctttcttccacagtcaaacacctggcactcagcattatcaagtgtaattgtcattcacaaaacttgtgaatgtctcaagtgtaaggtatgtatggctttggtaattaaaataatttaagtttaaaaaaaaaattctgggta

SEQ ID NO: 174 - DNA, 586 bp, Homo Sapiens
  misc_feature (574)..(574): n is a, c, g or t.
  BG534105
gggatttggatcctgccagctcgtccctgcaaccccctactccggtcccctcaaacctgtccgtggctggcagccctgtgatacctcgccacattctgcaacagaatccgagatagaggtagaagtgggggagtacgtcgtggctgtcagggcagctttctgtaaaatgctgcctggaggagcatgtgattccagaccctcctctctgcaacgaaagtgaggttgacacctgcaggcctggggcctcctggcccactgagcagaacacacagaagctgggcccaccccgtgccctccccacaaagggtcacgggagccaccgcctgactttgaagcccactgacttgcggctgacaagagaaaagaatgtgcccctgtgatcatgtgaaagcatcagccaggggtccaagaacttccctctggagcctcacactcccagcgtggcacccagcagggaacagattctctccaaacctttgtgaatgaatgaaggatgacgtcactagaatccatccctgtttcatttttgtttcatttttggagacagagtctcgctctgttgttgcccaggctnagtggcgggttg

SEQ ID NO: 175 - DNA, 744 bp, Homo Sapiens
  BG542654
catactctaggcaactagaaatgatcatgtgattttacttctctggcctattatcacaataaattatgttagtagtttctcaatactggattatttctgcatgagatgtatcctgttaaataatggtggtttttccctttttttctgtgtaacaatgttgaactcaatttcttacattttattgggattattgcatttatatttatgaataagatggggttgtagttttacatttttgaattctacctttatcagcttaaaaacctagatgggtacatagcatatgaatggcctattctttggggtctggagaaactcacccataacatggtttaggcctcaatctctttaagggaggatgagtagaagacaattctctgaaaacttaaaaaacctttttctatggttttactgtcacttcttgagtatcaatttaaaaaatcatatttttaaagaaaaacatgcattttcagagaattttaaaatctgtgtctatatataattataattaaaaatatcttgctctgtatctctggttatggcttctttctcatttctggtcttttaagttacttttttcctttctttcattagactgtgcagtctttttaaggaaccaagcactgagtatttcatcagttctaatttttgctaatgggtcataactatcaatataactttcatctttaaattccttccttattttactggtcattgagtgagcttatgaatgtttgtactaat

SEQ ID NO: 176 - DNA, 711 bp, Homo Sapiens
  BG547692
aatctagacttgaaaaaattactaagaccctgatgttaaaacccaggagtcactctatcctccagggaaacaacatgacctacacagtgtgaaagcctcatgcaactgtcaagcacatgtgtacccacccccgtcgtcataggcagccagaaggcagctttgccccactagagaggatcctgtgcagccgttggcccactccccacccaacaaccaacccagagttgaccctgccctcctagagtgattcctgtgcagctgcccagtccacatgcccctgtccccagccgtacagctgtcccagagacacctttgccccatcagagagagccctgtgcatctagctgcctggtccacatgcacccatgcttagcctgacagccagctcatgggtagccctggcctcccagacagcctgccacacagcctgctgggcacccaacttgcactcagcctgacaacaaacccagcacccctgcaccatcaaaactgcactaccactgtcacaaactcccacagcctaggccactgagacaattgcaggtattgcagatgacaattacagataatgaatctacaaagaccacaatactgagtccagccagaaccagagccaatgcaccattctcaacagacactctaaggaactatctaccaaagaagaaaaaaaggccgtttttccaaaggctaattggtaaactgggaaaagtc

SEQ ID NO: 177 - DNA, 372 bp, Homo Sapiens
  misc_feature (356)..(356): n is a, c, g or t.
  BG694339
gagatctagcacataaggttgttgtgaggattaaatcaggtaaatatgatggagccacctgaaaccagtgttagcacaatgtaaatattcagtaaatggtagctatgataataaaagtaatacattagttttcaataagcacattataaacagagatgtggctaagagatccaccacagctggtaaatggagagggtgcagagatcctgctgtcacatgctttgccatacattgacacattctggagtaactaactgcaaagctgaaatggcatccccaactgaatttactgaaattcatacatttaatatttttgactgccttctcttcttcccagtctaagaaacccccccttngggggaaaaaaaaaaa

SEQ ID NO: 178 - DNA, 862 bp, Homo Sapiens
  BG723262
agcggaggttcttttgccaatggcaaccagcagagcttcccctgaagattggaggggatgagtcaggggcaaggaaggattaacagattctgcctcaagtcctggtgaaccaactcctctccccaagacagacacatactagtgaaataaattggatttaaatcatcacctgaggcaatcctgaaagagaaaagcagtcctagaaaagagtggaggaaaagaggacagccccattctctttgtgaccacgaagactgccgccatgtggttgggagccacgtaacttcttttagtgccagctgagattcttctgccctggaactagttcctccgagttattgccaggcctggagattgaattcctgcagctggaaagtggggaaaggtacggacaaatgagctatgaatttaacaggctaacatcccagctccacagggctgtggccagagaggaattctcccctttcaaagctgactccggattgcttagagaaagaagcgaataataattgagtcagaatgagaagtccttccttccttctcaggaggatgtcctgttagcaacttctttggacacaaggaggaaattaagaagcatcattactgttaatatcattttctttttcagaatgttaacagccttgatatttataccaaggttgataaccctgtcatttcataagtcaaaaaacaccaacggaaacaaaaagttctccaagggggagaacggggcaataggggcgaagaacctcgaagggggcgcgcggtacccagttgtggtgccctttaaggaggggttaatcgaagctgggggaacccagggcaacagtggtccggtgggagatggtatcggcacaatcag

SEQ ID NO: 179 - DNA, 806 bp, Homo Sapiens
  BG753981
gctctgctctcccaggcactactgagcgcgctcgcggtcgccaggagcggattgggcccccgccgcgcgcaagccttggtgacaggggatggcgcggagctgcctctccgggaaagttggatctgtgcgcccagacatggaaaagggattaggacaccggcagatcttgccctcacagagcggaggtgggggccttggaaggggcacaccgcccgtaggcgcgaaatccaagaagaaaatgacactcatcagccagcctcgcgcggggagaaagggcggggtggggggtagtggcaccctgcccgtcctctcccacccccacagtccaggagtcacaagggatgtgaatccccaggcataatgtgaacccccaacaaacccaaggcctcagaatgcgcctcacctctccctccccaccagcagaaacatcctcccactctcccaagccctgctccaggccacgccaaccctttaaccttgtcccagaatgtctaaactgtatctgcctctgtgcctgtgcacatgaagttgccttggcccggcgtttgctccacagccttctgccaaactcctactgcttgatggctggaagccttcgcaccctggacgctctcctcccaggtcagacagtcactggccttcctgtgcatccagaccagctttgaacagtcctggggcccaagccttatctttctccgagtaattacatggttgcatgattggcttcaaacacaaataaaaacaaacacaacaagcacaacacgaaacaaaaacacagacacacaatcaacacagcaagagagaca

SEQ ID NO: 180 - DNA, 398 bp, Homo Sapiens
  misc_feature (40)..(40): n is a, c, g or t.
  BI024234
accaggctgagtgcagtggcgcgatctgtaaaatcactgntgagcactgattagcacatactggaccgttgctcctaggagaaatacaggcttgcgttcctgtgagctttggtcgtgatattttcatcagctgatcaatatgtaatcttgttttatgtgtatttctgtttaaagattcatatatatatgtgtatatatatatatggttgagttgttaccgttgaactcacagcccactggactagaacacatgcctaaataaagttattggcacatgagattttgtctggtcttttttttttctttggataatttcaaagtctcttcacatgtgttctcttccactttaagttttccttaacaattcatcatatgaatagccagcctgggggacggag

SEQ ID NO: 181 - DNA, 126 bp, Homo Sapiens
  BI258188
gtttcatctattctctcaatatgtcacttcaaatatgatcaggaaagaagtcttaaacatggctggaaatgtgggggcaacaaatacattagtgaacaccctggcggatccaaaaaaaaaaaaaaa

SEQ ID NO: 182 - DNA, 816 bp, Homo Sapiens
  BI821208
cacgcgcgctccggaaggcgccctccagtgggaggttgctcaggtgatggcggagctgtgaaactcggagctagaaggaaagtctcaacgcttgtctaaattttgctttgtcgtgacgagctacctagacccacgcagagctaacttgggagagcgcttgtgacgctacgaacctctcgaacacctgacgactgggcgccagggccggatggagggtggagagccagtgcggcgcagctgcctcctcttaaccgggacaccttgcaggaatgtgcggagtggagctaacgggagcggatagaaaccgagggaggggaagagagcgcgaaggcttggccggaaggagaggttaaaaaggaacaggcctaaaatgaggaagagagttaccacaacaagcagtacctagttccagttcttggtcccaggagttgtggttgttgctgctttcatcttcctcagccaacacaaaaggaaagtgccaaggggcgattcctaggaccttcagttgcagtctccaccttgcggacttggctcaatttgtgtccactcctttctccagccttttacacttgatgctcttggatgactagaaaggagcacaattaatggaaaacacaagcttgggagtcaaggggataggggttctattctggtccatcccattggtgacgacatcattaccgtggggttattcaagcgtttcagtgccagaagttcctatatcaatacaaagatttatttacatttgacctcttaggagaattgtttcatgggtactgaattgccagataaggtatggtgtagcgattgtgttaa

SEQ ID NO: 183 - DNA, 885 bp, Homo Sapiens
  BI831346
gtgggtgatggctttgaacgtaagtcaacggttgggtggatctaggagggctgcaggttagagtaagagggtggatgttggctacaccatgggaagagtgactcttagagtgagggggtgtgcagttgtggattgagctgggagctctaccagtgtggataacaaagggagatttccctgaaggatgttcctggtatcatcacagctagggaatttgggtttaagtctaggggaaatgggcctttcgcaattcccatccaccctctcaaaggcctcttctggcatcttcattcaaaactcttccctgtcttgaccccagcccatctcaagaagccagtagtaatccagaatcattcaggtaatgtgcgtggctggcagctgagagattttagtctccctctggacactggagccatcttcatatttaagagagaccctgcttatccagaaagcaaaacatgtcataccctataaaactaaatactctttgctcaagttgatcaaagatctattacaataaagccattctgtgaaaagaaaatatagttttaaatacacagttctttatggatgccaattcgtttttcatttagttttaaaatgtcaaagccacccctatcatttagaaaggatgcatcatcgcagacaacagataaggtttcgttgaaaaacacaaattgttcaaaacaccattacctttgtcatgggaggagagtagtggacatcctttagtcatcttttctgtcctctatacctaactcagttcctgtcaggtagtggacactcaatgtgtttgccgaatgaatcactgaataccaccgattatcccaaatagagtcagaaatgttgaaaccgcttagaacaggacattagatcttatattgg

SEQ ID NO: 184 - DNA, 581 bp, Homo Sapiens
  BI835545
ccagtacttactgatcatgctgatcaataccagaccacttaccaggcacttgcctctagtgagtatacaatgctccagctcctcaaagccttaaaataccgttcgaagtcaagaagctaagttacacagcaatagggttagaatgttgtttttcctaagggaaatgaatatatttcacgaggaatcagacaaggcttctcgtagctggtgttgataactcacatattttctttccactgccctttattacaggtgtatactttcaacaaaaattgttgctaagccctgcgctaggtgctggagatgtaaagattaagtaaaagacagttccaaacctgaaggaacctcacagactattgagaaggagagaagcaaacataactgagtatagtagtgaactgctataagctgtacaaattgctgtgggaccacttaaaatatataaatacataccctttacattctgcttggagggtaggagtgtgcttataacatggcgcttttaacattctttgctaaataaaatgtaaagatctctcagaaaagaaaaagaaaagaaacagaaacgaaaaaaaggggcg

SEQ ID NO: 185 - DNA, 724 bp, Homo Sapiens
  BI836710
tcaccagtggccgtgggagccagtggcctcggcgagggtcagttggactgcatagctgccggctgagtctctctggccaccctcactggccccatcactccaggttgcactgctgcccaggggtttgtgccaggcctgggtcacagtggaagagagtctggaaatcacaaggcagaggaggagacctctgccaatgtgagagaacaaagttaaggggcagtccatgggggcattgaccttacttaggtgaggaggactcagggaacatctacagactctagggctagggtgagatcctcctgatagtgctggtagctccagctgctgctttggcaagacttggtcgtctctatactgagagagcaaaagctcttttcctggggctgcatgttcttccataggaaagtgggcttcaggtgctgcctattaaacctcctgcctcccctgctgcagtgctttgatgcctttcacctgtgtctacctgcgaacctctgcccaccacggaagagcagctcacatttggaaggggctaaaatttttacctagtttgaatctgctctgcaatgtccccatcaagttcttaaccatcccgggttccagtggttacagagttctgccctggggagggaggaattgcttagcaaatgatgttgagaatagtgattatttgggggaaaattcaggtaaagatctcaccttcataccatataccaaaatacatctc

SEQ ID NO: 186 - DNA, 575 bp, Homo Sapiens
  misc_feature (563)..(563): n is a, c, g or t.
  BM353240
ccgcttatacattttgcttattaatgctttgtctgaagtttctttttgaatatgggataagttaaggataacatagctagccaattgaactaactgtccttattgaataattcctccctttctcactgagttgaaatatatacgtatatgaatctgtttttggactgtgttccatctaatgctgtgctagtttcacagtgttttatttattgtggcttgtagctggttggtgaagaaggatgggaagaatgtttggtggtgtgttttcatgtgcaaaagtgtgttttcatgtgcaaaagcctagagacaggagaaaacggcaagggactgaaggaaggccagaggctaaggaaggaacgagggcctgaggaggagggggaatgacgctggagcacaggtttggctcagatcatacaagaccccacgggccattttcaaatttggatctttattcttagagccatggaaagattttaaccagagaagtgacatgatcagacttatattttttgaagctttctttggatttctgcttctggctatgatggagtaactggtactangctagccctccc

SEQ ID NO: 187 - DNA, 415 bp, Homo Sapiens
  BM683583
ttttttttttttttttctacaggtaaaggaacggaatgtttagtctgaaagcttagaaggaagatgaggtgcagcatgaagacaaaagcaaaatcggaaagctaaaacagtaagaaaggagacaaaaatccgagatgaattgtagcaaagtgatatatttatcattatcccagaatatataaatttctttttttaccagaatattaagtcttttgaaatgttccaaaaacatgagaatctaaaactgattctcactcttgatttcaacaactaatatttcatgagtttctgcctcctcttggtgaattttttcaaactaacagttccacatggcactttttcatcgcatgcagggatcacaacacaggcacctttatcttcacaataaatggatactgaactttgacctcgtgcc

SEQ ID NO: 188 - DNA, 446 bp, Homo Sapiens
  BM703456
tttatttaaagagttattttgtctgaaatttctttgagataatggagaattctctgctgaatgtttcctattaatttctttgtattcttcatggatgtatgtttctgttgctgatgttcctttctttcctttattcttccctgaaaatgtgtatttttttattttaagcatacatcccacaaatttatcttaacaattactactcaataatgaatgaagcaggctctttattaaaaagtactatgggaacaaacagaggaaattgagcccaggcacttgaaagccttcatacagatttgctgccacaaacgcctcatcaaatctagaggcataccttccttcagcttctggctttcaagacttcagtatgacacaataaaagcccttcagatcacaagttttttgtgaaaaaaaaaaaaaaagggcagcctttaatctactatctt

SEQ ID NO: 189 - DNA, 699 bp, Homo Sapiens
  BM723547
gggcttgccctacttaactctccaatgcaatccatgctgccagcttcatacagactccatccagtgcaaatggcttccttctgtgtgcagagcaaatgctccagggaagagatacagaggattccccatcatcattgttgccaagtgaccccaaatattcctatcctgtctgttgtaaaaaggaaaaatcatgtcttggaagaacagcatcgccctacagatacagactaggcactttgcacatgaaacaagagtcccagaaatttctagaagcaaatctcgcattcgtgaccgccagacctacgggatgtgtaaggcacattctcaatctcatcacttgtgagagttgcattgcctactccagcagccgtgaaggactctctgctgtttttcctctgcttcatttgacacatgagagagaagagatgaagatggaggcgggccctgccccggggacatgtatatctctctgaatgtccttgacagacagcagcagcccagcaatgcccagcccccatcctgtctgtatgcaccctggtgagcattttctacagtctcctaaacgctcccattattctgttttgcaggtgtgatgtgtggcacctcagtgttgtcatagcttctgcctcctccgtgtggagagagggcataaagacagagctgagatattatggctattccagaaaataaatatttttt

SEQ ID NO: 190 - DNA, 492 bp, Homo Sapiens
  misc_feature (464)..(464): n is a, c, g or t.
  misc_feature (466)..(466): n is a, c, g or t.
  BM930393
taattttaccaagcacttaaaaaacattttctgcacccatgaaagttatgcaaaatagtttggatgataaaatgatgacgaagataaatattctagcacccaagttaagggtgtaaagacagtatcgcactggcctcttctaccttattaggcgacactggagacatctacgtctacagtcacttgagaaattttttacctacgggttgaatttgaatttctgggtgttcgctttggtttatgatattcaacttttattcaggggatttccaaatagatcaggggcggggctgctgacctaaggagaggagaaagttttgagagaagttttagtagatcacagctgtgcatcagtggagtcccactgatactaggggagaaatagacagtgctgggaatggggcaatcctgccaggtgtttttgatgttatgcctacagaaaataaatttgcgttagccataananaaaaaaataaaaaaaaaaaaaaggac

SEQ ID NO: 191 - DNA, 498 bp, Homo Sapiens
  BM968685
tttttttttttttattttccaaaaatttattggtggatcagaagataactggattttttggatgtgtgcttctcaaccagcaatgtaagttcaataggtctttgggttacagcagtgtcaactcttaaagtaaactacgatttttttttttttttttttttttttgaggaagtcgtcttctgctttgccaggccactggttatacatgattaggggacacagtgtaataatgagtctccttgataactagtaataatgaatcctaataccaaaatgccaataccaaaaacaaaacacctcacagtagaatgattacttggggaagcagactgaagagcataggaactagttactactctcttttgtatattgaaacttgaaattgatgcaaaagcaataaaaatattctttaaagctaaaaatgtagttgctggggataacagaaataaagtcatacagctagtgtgaaataactgagacaatttatctatttaaata

SEQ ID NO: 192 - DNA, 527 bp, Homo Sapiens
  BM973882
ttttttttttttttttttgccattttatcgttttttattacataacaaccattaataaagtgtagtccctgcaccttcattgcctggagactaaagttcacttcctgtcctccatgcaggctggggatgccattgtcacagccacgtacctggggtaatacaagtgtaaatacatttatgggcaggaagaggggcttaggaggagggccctgccgcccacagggcagggcgggtcctggagctctctgctgggaggagccactgccttcctcccaggatgatgatgggttaggggatcctgggaccaactggacatgaagaggccactcccactggggtagaatgaggtgggggctgagatcctcctgcctccccttcctgatcaaggagggcccatgcaggagaaggagatgcaggcgcaggattggctgtatggtgcacacacacacacacacacacacacaccctggacccccgtgacagggaagcagaacaggaggccaagaccagccacacactgcgagacc

SEQ ID NO: 193 - DNA, 487 bp, Homo Sapiens
  BM997836
ttttttttttttttttttggcagggacatttatttttctgggggacaaaaagagactccgtctcaaaaaaaaaaaaaaaaaaaaaaatttggggagggaagggggttaaataaggaactctgggctgtcaggaaactgcctactgggggggtcaacttatttcccactatgacatttaaacctttatttttcaaaattaaattgaaggcagtgggaaaggggaaagggtgggttttacctgaaattaagggggggaaccccttccccaagcctgatgcaggtccatctaaacagctcaaattaccctaggccatgccctagggacacggcctaagggaactgggctggagggggtctgcctgggtaaggggatctggcttggccctgagctgcttagggacaggtgagtccttgggggcatggaacaaagctggtcctgtattctccaaggtccggagctggccaagggcggggaggaggaggatgg

SEQ ID NO: 194 - DNA, 451 bp, Homo Sapiens
  BP398340
caaaacccagcagcgtgaggagtttcttggttgggtgaattagaggctggaaaaattcatcgcaagcattacaagataaccaatgatacccctgatgaaagaaaacctctgcaaactgctagctgaagccagctcctgtccttttatccaaaactgggtagtgtccagccaaaccattttgggggttgaatgagtcacttcaaagggctcaaatgactggtgaatcttccagataaaaggagagaacacagactttcctgcgcattttaaagtgactgaggtgctccacactctgatttatcctttattaccctgtggcagcattaggcatacccctgctaccacatgcatcttgcaagcagtgatgtgtcatcaatatatgcaccgtggcaatcacagaatgctcaaatatttattgaataaaaagagcaagccatacctaattatagct

SEQ ID NO: 195 - DNA, 539 bp, Homo Sapiens
  BQ025528
ttttttttttttttttttgaaaatacacatagatttcatttaagataaaaaaatacaacttcagtgaaattgcaactgccccccaggaggccttcagtgtatgtgttctcttgtggtcattagggcaacgaaggaaaagatctgagaagccctgacatccttggccaatttaattttcacaggaattctatgacatagatgctgttacgtgagaaaatgtaggtccagcaagggcataccaaggccaaggttacatggctaatacacagctgactcagaactcaacccaggatctgtgtgcaaagtccatgttcttcatgcaacagcctgagcagctgatcaatgaggtgtgctaggaaacaaagctgaaaaggtaggttggtgataaatcatggaaggtcttgaaggccaggcttaaataaaggcagcatgtgagagaaagttcttggctcactagggcgagacctggagaagccgaaggtaagaacatgaagtgcagtacagtcacaagacaggtagtgactcattcatcctcgtgc

SEQ ID NO: 196 - DNA, 614 bp, Homo Sapiens
  BQ025535
ttttttttttttttttttagggtgtggttattctgtttttattttttttcttttttctttttcttttcttttttttttttttggcattaaagatcagaaacaccaattgttgccttaaagggaagatgaatccaattttaacagatgctcagttcaggaaatatcaaaagctaccctttacaaaggagtattaaacatagagacaaaaaaatatgcagggaattgccaatgtatcagatgacaatgggactaaatcacacccatttttggtttaacagctgttaaatgagtcaagagacctggatctagatccagctgcaccgatccagtgagtgtctgggtaaatgccttcactgctctgggcctctgttgatttgtctgtaaaatgggagattttgactatcctgtgtctacagtctcttaaattgttaatatcctataattccatgtgcagtattctgacgatgtcttagtggatatgtggatttcccccttccttttctccagcagtgctcctctgcagcaacctcagaacagtggcccacactcctagaatttgagaaaatggcatcttcttcagaggacagaggttcgtagtctccctcgtgccgaat

SEQ ID NO: 197 - DNA, 279 bp, Homo Sapiens
  BQ027559
ttttttttttttttttttgggaggcaggctcctgaggaatgcagtgctgctttctgtcttgttatcacatttccttggaggagagcccagccttggtggagagccctgctctggctttgtccctcggcatgagatggcagaggatggtgctgctgggagaccctcacgtctgcacactgggggctgcttgccttctccattcctccttcaagtatctgagcagctcctgtgtgccaactgctggtctacaagatggatgggtccttggagatcacgctg

SEQ ID NO: 198 - DNA, 459 bp, Homo Sapiens
  BQ027703
ttttttttttttttttttggtacctgatatgaaaaaagggtcaatgtacattttttccctaaatatttaactgcttgacaatttgttcacttgacaatttaaccactgcacagtttgttcagataagctttcctttcccctgctcatttatttaagatgtctgtcttatcctacactgattaacaatctcttattcacaattctaaaacccaaaaggttccggcaaccaatttttttcccctagatttaacatcagaactcattctgtggcaaacctgacctgaaatgacacgaggctacttaacagtctttatctcatttatagtaatgttgattagtctgctgttccagactcaactggggggcatatggtgcatacatttgagttattttttagaaatccaaaatattctgatttatgaaccccagctaaccccaaaggtgtgtatgacctcgtgc

SEQ ID NO: 199 - DNA, 1034 bp, Homo Sapiens
  misc_feature (786)..(786): n is a, c, g or t.
  misc_feature (866)..(866): n is a, c, g or t.
  BQ068637
ggtggcaattcggacgaggaggcaagcagctgggtttactgattcatcaagactaaatgtgaaaggagaggtaatttattcaaaggaaattgtgggaaagactgttagacaaacaaaatctgacaaatgaccaggtggttacttgaagccctgacattgaaatatgttgggtgttgggtatatactaaatgaagggcaatattataacaagtggacatgctggaagtatgagcaacttacgtatgtagtttgtgtggacgggcctttagggactgctgcttcagatcccataagctccacttccacttgatgaatgctgcttggcttgccccactctgcctagatggatggtgagcaactttgcatggtaagcaaaggctgtcttgtgcaaatgaaatctcttaggcaacagctatcagaagaataggtgactgcctgtggtagtctctgttttagggaggtgtcagagctttatctttctttaggcagataaagggccttcagagagaaacctctgcttgcatcctctgtttagtaaggtggatagatgtaaatttcctttagaaatggacagcttttcagagctattcctgcctgcagttctcagaataatcaacttgaaatatgccaaagaagtatattctgaggtggcatattgtggcttcccctcattccatcaaacctttagacataagaacaattgactgacctggtgcctacccagtttgctggtttcctgcctataagggaaagtatgttgcagatcagtggtagacctgaaagtcncctaatagcaaaaaaagggagataaggagaaaatgatttgctgttccccaagtaatccgagattggtttcttccttgcanggaagatgaatgggaaaataattgtgacctgataaaaatggttgatacaatttaaataaggggtttggccaccatctggcactaatggtaaccctttggccttttccaaagcctttttctggaaaaatatcctgaaacagtttgggcaataatcctttaaacaaaact

SEQ ID NO: 200 - DNA, 712 bp, Homo Sapiens
  BQ182905
ttttttttttttttttttaaaatactgaagtttatttctggaaacataagtagttacatttacattatgtgtagcatgctgtctttccaaacgtcacccaactccacacaccgaactcagagcagagtctcctcggagagtgggggcattggcttgaggaaaaggatggaagcgtttcaatgtatatgtgatagatagaaaaaagagataacactcagaatagttaacaacctttgctccaacaacacaggctccacaaccctccccaggccagggtgaacagccttgtgtatttcagaaaataaagaagtgtggaaaaatactgtgtttgggatttaggtggtgagtacctagaggttctatgttgttctctgtactattctgtgagttctaaccaagaataaataaataacaaattactgttatgtattgacagcaggggctgtcactgctggggtctcagtgccaggggtgtcagtgctgcggacgtcaatgttggggtgtcagtgctggggacgtcagtgttggggtgttagtgcagggctgtcagtgctggaggtatgagtgctgggggtctcagtgttgggggtctcagtgttgggggtgtcagtgctggaggtatgagtgctgggggtctcagtgttgggggtatcagtgctgggagtgtcagtgcagggctgtcagtgctggaggtatgagtgctgggagtctc

SEQ ID NO: 201 - DNA, 602 bp, Homo Sapiens
  BQ186372
gtgatttctgatttttcccttgggaaagcagaaagaaacccttcctcgtacagctgctcccatgagaaaaagttcaacagaaaacatattaaatgcccatttcccaagactctcaatcagagtggtaagaagcaaagggacgacgctacagaggtgtctgggaaactcaggctgattaaaggtagcctccttgacttgcaggctctgtgaaggaaagcacacctcataaatccttttggactgttttttggctaaactctcagatttatacgaagaactattttaaatgaatcagcgtgtctttgtttgcatcttctgagattctgaagactgcagccaaggagctagtaaggctgagaaatggattgagcatttaatcggttgaatacttccttatgttttcctcgtgtgttctcataacaagcgaccttagtccaactcctagtaacacatgattgtggaatgtgccctcctgagaaatactgccttattttttcatcctgagcacattgaaagtctctgaaaatgcagatgagcttgtttggacaatggtaataataatatatgctagcgataaaaaaaaaaaaaaaaaaaaaaaggac

SEQ ID NO: 202 - DNA, 932 bp, Homo Sapiens
  misc_feature (584)..(584): n is a, c, g or t.
  misc_feature (756)..(756): n is a, c, g or t.
  misc_feature (778)..(778): n is a, c, g or t.
  misc_feature (838)..(838): n is a, c, g or t.
  BQ709011
gccaccacactagcatgggatgccctttcactactatgggaaaaagaaatggagtgtattgtttctaccagttatgatgatggtataaccacggttgttgttattgtgacagccagccaaatctgttttctaaataatactatagggaaaaggattgacaagtggcattaaggacttggcctactggaaaccaggaatttgtaatggcaatctgcagttatgtgatgctgtttcactgggctcagccatctgtattagtaggaaacatagatgataggcttgatgtagggttcatttggtgcaataagtaagggatgaggacgttaggatgcttctgaaaggacttttaggaataggtttgagctgagcagagaagaaatgaggctaatggagactggaggttcctatgacattgcagtgtaagtgtcggaagaatgagagcacaaggtatttcagctaggaatctatggactcaggaagtgagcagtactcattacactcaattagtgacagccccaatttttattctataatatttatcaatacacttggcccttagaaatgctcagcagctagaccattangcttctgcttgaagagttgatttggagcaattaaataagcctttaggatttaatggcaggaaagtcactcagggaggacctacctcaaggagaagctcaaagcattttgcttcagctcatcaaacagagctctggagcattgcgaaaacgattttaaaaatggcaagacaanaaaagtagaaaactatggaatnatgtttttgcttcaggtgtagctaatccaaactgccacaaaggaaaattggcgcactggntgtgttgggaataaaaggggtcccgtagtcaggaaaacatccttttgttgaaatggatcttttatatggcttgaatccctacccatgcctatac

SEQ ID NO: 203 - DNA, 956 bp, Homo Sapiens
  misc_feature (690)..(690): n is a, c, g or t.
  misc_feature (859)..(859): n is a, c, g or t.
  BQ711516
acagagaaaggaaggaaatagcttttcatgagcacctactgtgtaccaggtgcttccctggcatgagctctcgtaacccttatagcaacatgagtttagagcaagaatcacaccccgactttacagagatggaaactgaggctcggagaagtaggggacctgcccaaggccactcagcacctagaaagtgtgcctagcacataggaggcacacaaaaatatgtgttgaatgggtgaatgaatgagagaacgggtgaaaagccaggcctcaagcccacactactgacactgcactacaccacctctcaggagagaaggcaaatatttccttgactcagccaccttcctcctagcaaggcttagacccccaggctctgggggtcccttcctgctacagtatgaccctctctggtgcttgtcatcaagaagtggtatgcggtggacttgctggagagagtgtctgcagccaggcatcatggagggagggatggagcttgagggactgtaatggtggaagggggggggaagttgggcccccagcactcctctggtgggcgtatgaccttggggcacgtctccctgaccactctaagcagcttttgattcccctgtccaagagggtaggcccccctgttcctatttacaggatccctaaagagactccaagaagatagggtagtgccagccccanagagaagggggcttgtggaaggacttctacccccccgggcttctcaggggcattctcctgggctggccccctgacaccccatccttcccttggttttcccaggatgctttcatggatcttcccccctcccctgaaaattcccccaacctccctttttccttgtcccttnttgccaacttccttggcccttctacctggccttcagaatgggggcttggttccctcagccctcagtcccagaagagcctcctcttctccatttaggc

SEQ ID NO: 204 - DNA, 950 bp, Homo Sapiens
  misc_feature (11)..(11): n is a, c, g or t.
  misc_feature (656)..(656): n is a, c, g or t.
  misc_feature (792)..(792): n is a, c, g or t.
  BQ717459
tctatggaaanatacaattttggagaatacaacattaactacataggattggtattaacagtcatggacccactgaaggcgagttttactgttcgctcaatgaatgtccttcagtatctctaaattagatggaaaagcatctatgatttcagggcccatttaaataaattaaagccagaaatgagtgtgctaactttgcatggatccaaacatttgccactgttttcctgtcttccctttctaccattaaattcaacccgacctttagaatttgtgtcccccaagcagaagatagatgattcccgtgtatcatccttgtattaaatgcctaccatgcactaagcactaggaaaatagggaggaaacaacaccctggatccttttctcaagtagctctcagtgcagcgggcttagcatggaaacagaagcagcaaaatgttgtgggaagtgtctgtgtaacatgcggcatggctgttatttaatcccaattaaaaggatgagaaagttgaggtttactaaagttaaggaactcccctaggtccatagttagcaagcgctagagacagaattccaaaccaaagcagtctgcttgaaaagcccagttttgtcccaccccttccctaagcatttgttcagatgggagtgaacaatgcatnaaactggctgtggcattcggctgacctgagatctagtggtggccttattcccagcatgcaaactctcactgacatgcaaaccctttgctgactacttcatatgaaaaggcagcacccatcctctggagtgtatgantgccaatttccctgagacactttttatttttccgcggcttggtttttaaaataattaatggccattggtaacaccagccctcccctttcatctaaggaggggcattttccactcctgaattttccagttctcaacattttttcaggtttctccccaaa

SEQ ID NO: 205 - DNA, 1161 bp, Homo Sapiens
  misc_feature (810)..(810): n is a, c, g or t.
  BQ925543
gaggaggtaaaggctataattgcatttctaaagagctaagtaggaagttggaaaaaggaaaaagagaagagacagaaaaaataattaaactatctcttagaaaaatgggagtattcagtgacagtttggggcagatcacaaagggtcctatgttctccttgtatgctaccctacccaacctctaggctcttcttcctccactatctcctgtatattgatcttcccagagtatagatctgatcatgttgttttccacttcaaacaaaatagaacataacacttcactagctccttgttgcccaatgaataaggaacaaattctttagataagttttgaaacttttttcctactttcttctaccaatcttattctttggctaatgtagtcattttccaaatgctccttactttttcaaacctctgtgctttttgcttttgagccattctggcattcctgtttttctagagtgctcattccctgtctctaccctagaagagtggcccacctttgaggggctaatggcgggggggatttgcttactggggcggaaatcttgaggggggaacgtggcgttcctggccttttaactcccgggcgccttttggcgggaaggatccccctgccacgcccccggcgagttgccgaatgacttgcacggggggggcccattggaattaactacccgggctgggcaaccttcttgggtccctggggggtcctaccccgtaaaacgctccaagagatccgcgcccggggggcgtgtccccaaggccagggcgcgaaccgacagatccgctgcggcggggggngaggtgggagagagctatgccccctccacccgcgcgcgtgtgggggaaggacgagagggggcgctgcgcgttttgcgcgcattgtgaatcgtgccgggcgacgaaatgggagatggagacatagtggtgcaaggggctcagcactaacatcaggggggagccggctgagagacgaataagcagcgggggggggggggcgactcggatggtaaaccagtgtgttttacacacctagggcttcaaaaaccacgcacaacaccctcctcgggccagcacccctccacccacgagtgggcgtatcgcgagcatcgcacaatgaactcgcggtcgggcgaaaacagaggaggcgcg

SEQ ID NO: 206 - DNA, 574 bp, Homo Sapiens
  BU071960
ccgcccaaccccggccgctggccctccgttatatgcatcaaggtgacaggtgacggcatggttatggattaactcaccaaggaaatgagtgtggaaagaagaatgcagaaatctgaggactagagcctggagatggggagcttcgagctcagaggaagaagaggatcttcatcacggggagacatcagctggatattgagatggaaggatgactatgagtatgagctattatagaaaccatggttccttatccatggcttaagatgagttctgcattggacctgagactggagttttaagccatattggactgagtctttaaataaccaaaagggagcagagtgttatggactctgaccatgatgttgtgaagaggtacaaaggagacatttgtcatggcacagatgaagactgatgggtggcaggttatgtttatacctgaccaagctcaatgctcaacagataagttaaatttatccgtcacgaaatctatccctgaattccattgttccacctttccctgcagtctcagaggaatttctttttcttttaaagtgaatccctggctgggcac

SEQ ID NO: 207 - DNA, 815 bp, Homo Sapiens
  BU145923
acacctttagagtttcaggtctctactatccgattccttgacttcccaacccagtcaaagatacatgatttgcttggaattgtgtgtttggggcatgtacacacatgctgaaattaattaattttgctttgaagatttcctaagagccctagaaataattgcaaatgctctgcagtatatcacaaccaggactgataattactgtttctgtctacaaaactaaggggagagagaaaaacatactactgaatgagcagaacacagaagccagtgaatgtttcacacttggtgacgtgcagtttttgctgtttttttgccctagcagattgtaaccaaattgctcaacttcacagaaataactgtagagactcaatttctgaatgctcgtaattggcttttcaaaagaactttatagggataaattaattgctactatacttttaatggttttaaagttacttaggccacttctagaaatatgtaaaattgtatgatcctaacttaatgtttcatttctccctcagtttttatgtgatttgataatataatgaagggaactataaaaatttgatattgttggggcctttttagaaaattgagatacatttttctttgtatcattgttgctaaaagaggttaaatattgctacttattacctaggagaaagaacagcattttgtggcaaaataagtaggttataccgaatttgacagacttctctcctgaccgattttggagcacatatcttcatgtgcccttggtaaaaactagagatggcattcaggtttttcaaatggttcccccagaatatatc

SEQ ID NO: 208 - DNA, 585 bp, Homo Sapiens
  misc_feature (520)..(526): n is a, c, g or t.
  misc_feature (528)..(584): n is a, c, g or t.
  BU166084
agagcggcaggctctgctgctggctggaaaccccaccccgccctatccggtaccgccttgttacgtagaagttactcagcagactgacacccaatccccctcgggcgatcatctgccctgtcttcccacctccagggctacagtgggcagcaccgccatccccagtgtgacagggccctgggagcctcagggctgcccggccaggttggtctgctctggttacattctggccaagctgccccttcctgctgacctgcatgtgtattgttgtcaccttcagctctcagcacctcggcccccttgggcagtgaggaagggccctggaggcgaggttgggagaaaggatagctagaacaggatcctgcggggaacaagggtgtgggcagctctcacccggggctgcctcactgagagcaccgccgagtgggggtgggggtgtccaactctccagccacaaaccgcttcctccttgtctgcaggctgtgcaggtctggcctgtgagtaaacacatttatcagcnnnnnnnannnnnnnnnnnnnnnnnnnnnnnnnnnnnnnnnnnnnnnnnnnnnnnnnnnnnnnnng

SEQ ID NO: 209 - DNA, 959 bp, Homo Sapiens
  BU526515
tgtcttccgaactctgctgcttcgccccggcaagagcacttccttccgcggctgctaaaactggtgcgcgggttcccaacttcgcagaagcagcttcatcggccccccgctagagacctcagaccgcagccatcgacgcctcgcctcggggatctgtccccaccctcggggccaggtcagggaccagagacctgcgaagccctctccttaggggtttagttcccaggctttctgaccccagtaattccaaacgcttccctttgtttccacagccctagcgtagcaggtgctccctgcagtttttgcttctgagatagagttctcttttcagctccttcggtagtcacttcgtacatagtgattcatgatgcgaaatcctctctgttgaaataactgacgaggcctctgtcttctgactggaccctgacttccatgccctttccactctcactccagtacatgcccaaaccccaatctttgttgctccaggcattgcctctgtggcgctgtgtccccctcctttgaactctgatccttctgctcaggccctttctcccagtctgaagtaaggagtgaaaaaatgtgaattgttctactcatctgggaaagagaaccctgaggcaggaacaagtcgttaattgcatgtgcgtttgtccacagctcaccatgagtcaggccctgtgctaggtggtggggatgagcagtgactgacacaagccctgggactggtccttgtgaagagtgcggcctgtgacacagatactggtgccatgtggcaaagtaagcgcggggggacagccagacccttgtttggcccttaaaggaaatatcccaagtcaaaaaaaaaaaaaaaaaaaactccgaggcttccatggtccgggggggcgggagaaaggagggtaagggcaatggggccatgggggccatagcctggtttcccgggacccaactttttctta

SEQ ID NO: 210 - DNA, 205 bp, Homo Sapiens
  misc_feature (171)..(171): n is a, c, g or t.
  BU564031
ggcttcttgagataagttctgtgataccatttgatagaataggacactgaggctaagattttgaggttactagcctaaaatcatataattaagaaacgatgggaacaggatttgagcccagatttggttgacctatgtcctataattctagccaacaaagtatctctgccnaaaaaaaaaaaaaaaaaaaaaaaaaaaaacatgt

SEQ ID NO: 211 - DNA, 171 bp, Homo Sapiens
  BU588364
ggcatttttcgtataaatatttagacgcattgggggtatagccataaacaaaacaaaagtccctgctctgtggagatgacagtctcttggggaaaacagacaataacaaaataggtgcttaacagattgctgatatacaaaaaaaaaacaaaaaaaaaaaaaaaaacttgt

SEQ ID NO: 212 - DNA, 655 bp, Homo Sapiens
  misc_feature (628)..(628): n is a, c, g or t.
  misc_feature (638)..(639): n is a, c, g or t.
  BU594852
gggattcatcctggcatcatggtacctgagtacttagaatgttggaaggtgtgctcagtgaagatgaataatttgcctaagaacacttgactggtgaatcccattctcatttttgcagtatccaagagctggatgcctacatgatgcagtccacagtggctgagcaccttctgtccctgggatctcagactctgcctgccacagagcagatgactggaaaaccctccccacttgctgtcatcattcctgaaaggtcttcaggtgtgccagcaattttcagactgaatatctacaccagaaaagcacataactaccatgagcataagacgtgggagtgccatggagtgaccatagaagtatagacagtaagatcacagccagatacaacttcttgttttatagatgagagaccctgaggcccagaaagaggaaggcacttgcccatggtcacacagtgagttagtgagactggagcccagctctcccaggttctgtgctgtgctaatcacagggtgttaggcaattggctctccctgggttctgggcaaattcatttttttgcctactctgctgcatctacacagtcaaatggtgatttgggttaaagttcattgaatcatgaaaaaanacccgcaaannaatacccaaaaatgtt

SEQ ID NO: 213 - DNA, 746 bp, Homo Sapiens
  BU616603
ttttttttttttttttttacagcttcatatactatttattaagttattaatatgaacagatatgcaacattacagatgtctttcaaagcctgtaataaaatatagtccactatccagcccaggagaaagacaacaaacagtatcattcttatagtaagtgtagcatacgtactcacaatagttcccttatttggacatcaaagggaacaatcagtcaagattctttacctccattagaatttaactttcttggattatagctgttttagagtcaaaagtccaacttagattatccacagagatgtgtagcatcacatgttggagaggaaggagctactgtcacctccgtggcagccctttctactgtcttgcagtccttctatatcgaagcccatcttgccttttaggccagtagtggtcaaatttgggtatggggagaaggcaggtgggtcacagggaggttttgattaatttacaaagattgtgtttcaaagctctaaaaacccatttggtggtggcagtggcagtgaagagtacactatatttcgccaagggggtcttctcatctcttgagtcttggctttctcatatcctttacaattgctgcagttctcagtgggaaagtggaggtggcaaactctaacagcgattggtatggggccatctgcagaatgaactggactggctactatggcttttatacctgctttcctttcttagtctagacagcttatttctcatctttc

SEQ ID NO: 214 - DNA, 605 bp, Homo Sapiens
  BU624523
tttttttttttttgatttaaaaatttttttattcaaatattaattttatcaaatgaaacaagaatctttgatgaaactttgatgtaaaaaaatgtttcattcatgtgtttgcactttccagggtttaatttgtttagggtaaattgtccaacctgaaataaaaattatccctttgcttaaaaaaccctttatttcttcaaaaacaaaaaaaaggtaggaattagttcaaggatgtcaatttactgtttctagtactaaagtacgggtaactatgtaatttaaagcctttaagtgcaaattatggcatcagtcagtggttcccacaacagacccaatcacactttcatactcaaaacacagtatattcttttgcaagtaaaaatatataaatcaagtttcaaagaacatcttttcagtgcccctcaagaaaagtttacccagtttgttgaaactttctctcctgccagtcttcagtcattaaatacctctaacttagagaaggcaaaatgaaattcaaaacaatttgaatgcttacaggcaaatcctgggaaagaagggaaaataataattcaagtaacatttctgtgaaacaaggaatatggctc

SEQ ID NO: 215 - DNA, 647 bp, Homo Sapiens
  BU655899
tatggccgggtttgttcaggtatctagccttctcccaaagaccctgtgtggcttgaaggatacctttgctggagccatggataggataaatcttgatcagtaaaacaattaggaaatcctgtacttttgcaattggttcggaatgattcgtacatgacaaaggacacacgaggcaatttggaggggctctcattggccaaatctggcaaaatttgagtatcaaaaagataagatggtaccattgaatagaaagagaatcgaactccatagggatttcaaagaaaaagaggttggggagggtgcagagaaaaaaaacaacagcatctttatagaagagtgcccctaaaaaaatgcagaaagagagagtgagaaaagtaccactttgctaccaccaaatgtgataattgattaaggtattttcaccattgagtgggaagttaagaaatgaaacatgtattctcaaagtaccacctcatttaaaaaggagaagaggtacttttacacggataaatctgatgaatacgaccccaaccatgtagtcacaataatgggacaatttaatatgttcttccccatgtcctggatgccactggaagtgcacactgcttgtatgtaatattcttgccaaaatgtttatgctgaatcta

SEQ ID NO: 216 - DNA, 796 bp, Homo Sapiens
  misc_feature (512)..(512): n is a, c, g or t.
  BU935198
ggaacttctatacctttgaaaatgttctagaactagaatcatcctgctactgggaactacccacagctctatcttcaatgccaggtgaaaacacagatcacaagtcagatgaatcaggccaaagcaacttttatgtatatctaggactggcgacataatttgcagagcccagtgaacagtgaaaatgcagtcccatcattcaaaaattattaagaaattcgagatggcaacagcagttgtcacaccaagcacagtgcccttctgagcatgaggctctgtgtgactgcatgggtccatgagaccagcactgtgtgggtctgaatgatggctttggtgttcagtttagcacacgcggtctaccacgtctgcatgagtggtaaatgtagtgcctgggtcaaaatgttccttctgttcaaatcgaaatacctcatctctatggctctatggctgtacattaggacctagaacagtggcccattgctcttagactggaaccatgtccactaaaatanacctaagcagatgttgtagacctagccccacaggactgcatttagctgcttcagtgacactttgatgaaagtatggagaagtggagacattatagataaaatatatcaattcccagagaaaactcttgacttaaaaacttaactgtagtaaatatatctttttcaggtgatgaattatttttttaaaaaggttacatataagaaatctgcagtatatttgggaagctatttagtgctatataatgggaaataattatttttttaagtaagtccaaaaaataatt

SEQ ID NO: 217 - DNA, 314 bp, Homo Sapiens
  BX090227
cgcaaatctttttttttcttggctcaggaacacaggttgcatttagttgtcatgtttatttgcttttaaaaagttaacattctcctcgttcaaaattcacatggtgtgggaggatattcagagaagactctgcggctcttgttccccctcctacgctgttcacttcctgagggccaccagggttaccaatttcccatgtgttccccagagatattctgtgttgacacagctagtcatgtatgtactttctccctcttttatgcatacctagtttattctatgctgttctgtactcgcttaaaaaaaaaaaaaaa

SEQ ID NO: 218 - DNA, 776 bp, Homo Sapiens
  misc_feature (10)..(10): n is a, c, g or t.
  misc_feature (741)..(741): n is a, c, g or t.
  BX090408
cgcggccagnaattcggcacgagtcggcacgagtgatgtgaagttgaaacacaaggacgcggaaataaaaactcagagtataaatatctatattgttaccattatctgggataattgatgatttataagaagctgaggtttcgtcttcctagaaatggacttttattaggccagcaagaatgaccacttagccatttaaatgatttgtcagcatcttttgctgctctcttctaagaccattggttttcactaaaggataaatacctgctaagcaaattataaaatactataagacatttaatctcctggaagaggacttgctgataattggatcaaagttccagcattattgctcttttcgaatcatatggacttagtgttctcatgaccgaggagtcacatttttagcttgctaaaatattcactggagaacatggtcaaatccacgagtggaaacgttccatggtattttcaaacgccacgtgtcaggaatttggcatgccttcctctgggagaggcactggagtgtggccagatggaacccagcagggtacagagggcatttgtgggagcagttaggaaaccaggacgtccagcttctgcctgccagggagctcgctcatgttgtctctgaaatttgcataagagcaattacctcatattctaattttaaagatacaatttttaaagacatggaaggctctgaggcctcctgaaggctattcctatgtgaggtattgnttacgggtggcctttcactatttccaaatcagcga

SEQ ID NO: 219 - DNA, 313 bp, Homo Sapiens
  BX092531
cttggctccctcccctattggatgatgaccttgtgcaagttttttgttctctctcaaccagtttttccatctggcgaatgggaataaagtatatgttctatgtagtttgtggtggtgattagccaatatcttgtgtgcaatactatctgcacttaggaagtaaatgcaagcttaatgatgatgattagatgacacaagcaacaactctacttggctcaacttgtttttggtaaacaaatgtaaaaacacttaaagaaaacttctccgttttctgacaataaagtatttaaacatgttgaaaaaaaaaaaaaaa

SEQ ID NO: 220 - DNA, 618 bp, Homo Sapiens
  BX093254
caccatgccaggaggatgctcaagcagccccaaggagaaggccatgcagagaggacggaagcagccagtgacaacttgccagacacaggttgcgcccctttggaaatggattctccagcccctattgggcctttggatgatgtagcctcagctgatatctgactggaactgtatgaaaggcttcacatgagaacggtccggtcaggtccttctgaaatgcctgacccacagagacactgtgagatgaaagagtccaagacacacttatccatcacagcgatcatgcctgtaagaaaactcttcttactgcactcctacctggaactgaaagatgatgtgttcggcttcaatagatcctgctcttcacatcagggacagtagtcaatacttttgtatttggacactgggaatcaaggcagaagatctaacagaagatacaaaataattataatacattaattacaatagcaccatgaacacagtgttgcgctttctctgttctctctggctgcagccaggaaaggactcagaccaagaagaactgctggtgtgaaggacgtggcccgtgctggcctcatgcagtccttcctgcattcattagttgagcaatgcagaatc

SEQ ID NO: 221 - DNA, 642 bp, Homo Sapiens
  BX093329
ttcatctcatctgtcattctttgttgaagcttgcccttatatcctctcttccccaaacctaaaagtaaaactttctaccactggggcttcagatacttttaatactacttatttgaatttcattatttttattatagtttattattgtcttcatagctgagtactcttaaaattactgtttattataagtgaatgtcttacagaacaaactcaaagtcaatgcttcttttgcatgtgaataatcaagctatttttttgtcatcattactttagtaagtaacattattttatatgaagaatagagtgtatatacataaacccatgtgccagctgccattgcactgcctcacattttcctttagatgtttgagcatagttttaatgactgtttgaaatctctgtctcctagttccaaatatgggtcatcttggagttggtcttcattggtgccttttctcttcagtatgagtcataattttcctgtttctctatatgcctagtaaattagaattttattctagatgatgaataatgtgtggcagagattctggattctgttacattccatcaaagagtattgatattttgtatatacatttacaaatgtacatgtacacaataataaaaataatttttttctca

SEQ ID NO: 222 - DNA, 733 bp, Homo Sapiens
  misc_feature (634)..(634): n is a, c, g or t.
  misc_feature (702)..(702): n is a, c, g or t.
  misc_feature (725)..(725): n is a, c, g or t.
  BX093763
ttttttttttttttatttgaatacaattctaataaaatataaaaaagaaagatcacttagagtaactttttcctgcctcacttgaataatgcagagacacttcaaattcgtaacatgtttagggggtctcaaggaggatgggctatgcgttttgaatatatgcatataaaacaacaaatgacataggcctaataatttctttgcatgtgtataatcctctcttcaatgtaattcaaaggtctcttttttaatatcagtctttacattgtccctgtaatatagagctatacacctttcctcaatcttttgtgatagtaggaaaagtagcattataagaagtatttataaatttaattcactccaccagaaatgttttattttaaagttagcatgggacttgcggtatccgcaaggtcagtgtccccactgaagaagtggccttctagagtaagaagtttcagcatcaacatgggtaatggaagccatataacagaacttaagaaggaactttgtgctaagaaaatgtagacagtggttataggcatatatgtaagaaggctgtaagttaaaggcaagagagatgtagcaattaataggagatattttttctgccatcattaacaaatgtatttgnttactactccttactttttaactcatccaccttgtatccactgctacctctgccaaccctggatctgntactgaattctggctactcttgnagggcctc

SEQ ID NO: 223 - DNA, 802 bp, Homo Sapiens
  misc_feature (741)..(741): n is a, c, g or t.
  misc_feature (795)..(795): n is a, c, g or t.
  BX094574
aaagagatcgctgacttgcccaaccttcacctaacagccagtgtgcaaacccaggtgtggtaggccccagggcttgtctcagagagaaaacacactagggtttgtggaactctgattgagagcttcaggtaggttaaggccacactgttccttcactttctctcctcaattctgttttcagggtagagaagttacccagtcctgccaccccacaggcaactaagctctaaattccaagaagagagaacaggtaaccactgagagtcatgggctggtgagggccaggtatagttatccctacattgaaccatttcctttatcttacttagtttggaaaaactttgcagataaggctttgtacagaaaacttcaaaggaaatagtttcctaatctggcctagggcacacaggtaagaaaagaagaaacatcctctaagcagattgagggagagaaaaaagaatgcataagtcttgagggaattgagacaagctgggggcctcatgctattgtgagtctccctgcagcccaagtggaagcttggctcctaacaagcacaagctgccaattgttaccttcttctgagagccttgctaaaaaagtaactctgggaaaactcttataggttcctgaccatgaatccatcttttttattccccccaaaagttattcaactattagatcaatggataataactatgaggttttgggtgactatttagatggaggaaagtgtattaaggntggaaactaaattctatccttaatactactggtttctaatttttggttttttgnctgatgt

SEQ ID NO: 224 - DNA, 661 bp, Homo Sapiens
  BX095709
catccagaaggctcattccgtggctgataattgaaactaacttctttctcactcaggtgtagtaactctgttttgggggcttatttccttgcttgcttccatagatgggcctatctttcttgccagtgattggttcaggcctaagccaattagtgcatagttttcccattggtcatggtagattgagatatggtttaataaaagtgactttgaatacttcatttgatggttgcagcaaacaagcttctctgtctttactcggaggaaccttgtttgctgatcatgaacacctcaaaatcatgagggaaagccagcctaagtaggaagccaaaaaagagacaagtgtggagctgaaggaattgtagggaaatagagctggagccctagacaaagaatgcccgaatctcccctacttccaaatacttcaggaactgagccactacatccacttaattgtttaagttagtatgggttaggttttctgataattacaggagaaagcattctaaccgatcgacgcagctaatataaatgaccaaaaaaagggtgaaataaaaggatgagattaacagttgctacttatgaaataaaagagaaatagacaaatcttcaaaaatgtaaatcaatgaatcaacaaaaaaaaaagaaaaaaacggcggcc

SEQ ID NO: 225 - DNA, 733 bp, Homo Sapiens
  BX096603
ctcttggcaaatagatcccactctctgagggttgtgttggggctcagaaaatactaccccgaagtatgacactttggcatgctgaatactttgaactaaaagagattggaaggcctcagaagcagcctcggaagcagtctctccctctgatctcctgcccttctgtctcctgcccatctttcgtcccagaagtgagtcacagaaaccagaattcttccccaagcgcagcttaacttggactcaccacctatcaagtgctcgacagccacgtgtgcagtggttcctacgtggagcagcatacatccagagatgcaaatattaatgaggacagtgctagtaacagagttgctgagcaatctatgtccccttgtaagaaccagtgccccaggggaagaaacagaactccacaaggtagcagtgtgggtgtagtacccgcatgtgcccatgttatgggaatgtagatggggagtgaccaccgccaacagaagtgtggccatcttgcccgagatgcctgaggacctcctatttttagatgctgctgcccaaggcctgtatttcatgctatggcttttgtcatttgaattatcagtagctgtctcggagctattacgcttcactgggccctggaggatattgtcttatacagtccactgggttttggatatgcagtctgtgcctttcattgccttcctggaaaataataactaaactcttcctcaaaaaaaaaaaaaaa

SEQ ID NO: 226 - DNA, 670 bp, Homo Sapiens
  misc_feature (637)..(637): n is a, c, g or t.
  BX096636
cttgttttagaatgatagcaccaagcaaggaaattctaggaggagttttcaagctcctctactctcaatatggaaggctgactaaactggtgactttgagtgtgtgtgggagccacctagtatatctcatgactcagaacttacatgagtcacttctaaggctaataatgagcttgcaaggttagaagggctgtgtctccctaaagtctgcttttagacacacatgcaccagccttgtgcctgttctaggataggttgtgtgctttgtcttgggtaccctgatatcactgttgagaaatttctcagtccactgggagaagaaaattgttcatttccatgctcacacttcctctgctctctctgtcctgattggctaaccatggtactggggtgagaaagctgagactagtggtgttgctagagcgaggttgtcttgacttagaagagctgattgtgaaattttcagaaattttgcttgctgattattagtcacagccattattaaaaattaatgtacatggcatgaagcatatatggcaagatgttagtgaatctaactggtgtgtatatgggtgttcaatgtgctattttttcctattttctgtatgtttaaaagtatatatttattttttaaaantaaaaaggcaacacaaacaaaaaaaaaaaaaaa

SEQ ID NO: 227 - DNA, 514 bp, Homo Sapiens
  BX097571
aaatatactaataacctcacaacaagttgctgaaattaataaatatatatgtatcaaagattataatgcataatgttaaaagctgcagtaattttcaaagaaagtagtacctagatacaagagtcctccagtaaggaaggtgagtaactacccatttgccatgaatcagcagttagcctattagtggtgcttcacaaatacttttttgtcatctttgaggggtagaagcactgctattccatagctcctagagagatgtagcggccaggatgaaactcagaagcccagggagctccagccgtaggatcccagagctcagtctctctgctcccctggaatgtgtttttccaaactgcggtgtgaggctgaagggccagcacactggacccaggcttatgaaatggacaagactaatgtgaaagggactggttctttgcgggtgctcattaaatgtggtttccccttctcttattcaataaatagctatttggtttgtgtcaaaaaaaaaaaaaaa

SEQ ID NO: 228 - DNA, 464 bp, Homo Sapiens
  misc_feature (10)..(10): n is a, c, g or t.
  misc_feature (451)..(451): n is a, c, g or t.
  BX097985
ttaccagggnaggaggatctttctgtgaacttgctttgatgacctccacccaaagccctttgaggaacagttttgtttattcaaggagcccttggcaggtcactcctcccctaccacaaatctaatccaaatgcgacattttcctttgaggccatctatcccttttgggggacaaaacacatcagcttttcccttcagaccacttttgactgaagcagtgatcaacattgcttaattgtgttccagtctgtttccagcggggaaaaaatgctttaggggagtgaggcagttagggatttgaaaacagggatggtgccgcctgaaggtggggaatgacttagatcactgtcttcctttggctcctcaccatgttgtgtggaggaaacgaaaagcagctcaagttcactcctcttggcagtagtgcagaagcctggccttgccacggccctgnagaaccatgtttt

SEQ ID NO: 229 - DNA, 220 bp, Homo Sapiens
  BX098778
ctaatgagaaaccagtgcccagaaatgttaagtaacccatccaaggtcatacagctagtaagtgacagacccaggcagtcaggcgttggagtctgcacatctaaccgctgggctgtgatgttcacatgaatgcagggacagcatttaataaacacttccagaatgagatgtgaattttattttaagcacattcagatatccagtgtgactccgggatgta

SEQ ID NO: 230 - DNA, 722 bp, Homo Sapiens
  BX099724
attaaaaaacaaaaactctacaaaattctatccttaaccttctttgggaaaataaaatattctggaataatcatataatcctatttctaataattctggagtaacaatcgaccatgctttgcacagtgccaggaaaattctacaatgcgtatttgagatgtttgtgttggtgtttaaagtgaggcaccaaatgctacctggcacatttacatcctcaattctgcttgcttgcctgtgccctgttgagtccaaagatgttattctatagctatctgaaacagacagaagtcagacctgtgagtggcaaacagcttctgctccgaatgtgtgtgcaaacattattttcctcacttcctcagcaattgctgtctttgcttcttttcctcatttctcaggtaaaacctgagactcggtgaaaggaatagaggtatgatgaggcgtgggctctgttgaaacatctcggcttgtttaaaatttttcattgtctgttaagaggagaacacttgtgaagcactgagctcaggagctctacttgttggaagcctgtctgctttacctgtagtccagtgaccttttctgcctgccctttctcttgcatagcctcttagttctggcttgctcgttttctagtactatcccctgccatccctttgtttccacctcttatttcatgttcctgacattatcctttttttcttttgctccttttcagaattttcgca

SEQ ID NO: 231 - DNA, 684 bp, Homo Sapiens
  misc_feature (665)..(665): n is a, c, g or t.
  BX100240
ccatgcatctataagccaaggaacctctcctgttttttatctctccttttccctcctataacactcctgaggctgcctctcaaatgtaggaaccaataggtgagaaccatgtaagatcttcgtatatactcctgaaccctgaattaagttaaggaatagccatagcctgtatttattttgcttttttttttttttcaagcactatactagcattatcttatgtcatcttgaaaactattattatcatcatccccatttcacaatgaggagaatgaagctcagaaacgttaaatgatttgcctaagatcacccaggtgtcagggccaagatttgaaccaaggtaggcttattctagagactatgcttcacatacctcatactgcttccactggcagaaatgaagttttgggaagtatagagggaaataatagaattttgtccagtagcaagaatgaggaacacactgtttattgcctgggctagaggagtcagagtgtgaggagtgtcaggccttggagagtgtttggctgagagctgaagttggcgtgggatttccatgttccatggctggtgtttggcatatatttctgcttttctgggcaaatagcctaaatctcctctttacttctcttggatagggtcttaggccaaaaatgccatactgnccccattccgttcttgcct

SEQ ID NO: 232 - DNA, 609 bp, Homo Sapiens
  BX100504
aaattttataagctgcatagaataggctttaaaatatcagaattaggaaaataaaatatagatggtaaaaattcaaatatttatcaagacttttttcttcactaatgatggggtaaagaatttttaaatggataatataaaacagacagttcaaaaattatttttggaaaatatatgcatcgggaaacataccccacacggtgccatggtttaattattccccagctctacttttgggagcctggaacttgtcagggttgtgaaatagatctcagactattaaggacattcagaaactggctaagccattcaaggaaaatcaggaatttacgtaatatattggactacagtctcaaaggacagagagaaaatcagtcaaatgggttttgatatttttttttcctagaaatgtgtagcaaatgtgattttacaaagcagctaaaaatacaactatctctctggaattgaaaatgtgtaaaataagaccacacactttcaatatgcacaaaatatattttaaatgtttaagttgtattggtaatttactatgttctcctgtagaaaatcataattaaagttggtgctcgtgttgctaaaaaaaaaaaaaaa

SEQ ID NO: 233 - DNA, 543 bp, Homo Sapiens
  misc_feature (543)..(543): n is a, c, g or t.
  BX101194
ttttttttttttttgacccttttctaaagcaccaggagcatgctgtctctctgacctttttcttttcttttcaaccctttcttttctaaagcaccaggaggacctctttctctggaagttcccttacctgattaagaacacttctaaaataaatgcagccgtcttaaagccccctccctatgaatctcattaaataaccaggaatgattaatcacccaagaaaagactgaaaaagaagctacagccaggataccatacccagacagacttttcgtcttttcttctgagggaggttccaagagataacctgggagactgtatctgcataataagacaaccttagttcacagtgcagtaccacccctcaccttccatgacttgtccacaagctattgtttgtccttcagtcccattcagcatccaaagagaaccatttgcaaaccactgtcaggtatttgggtccattcatttacagccccccagctccctttccctagtgaagagagtatttaagtgccaaccattgggcctttctgagtatgn

SEQ ID NO: 234 - DNA, 422 bp, Homo Sapiens
  BX101409
aattcgcggccgcgtcgacctcttgccagtgttacagacagtttaaaatctcttagggcatcatgaactacacaaaaagtgcctgaggagtggccaaaagtgagaagatagctaccaattggtggggcaccatcaaggcaaggagaagagtgactagtggcactgagaaacctcgctgagaaagctgatcagagagaaggtcccaagaggctggaagatcctctcatctcaggctgacattgggactccccttggattatctttgtatcaggagggcctcagaaggtttctctgaatgtagatgcctttctaccttgcaaggctggcaggtggttacaaagggcacaggctttccaagtgctcaaagagaggacaaaaacttctggaaaagcacttggtgcagccgtaaaaaaaaaaaaaaa

SEQ ID NO: 235 - DNA, 423 bp, Homo Sapiens
  BX101786
aattcgcggccgcgtcgacattaagtattcatcgtgattcttgcaatttttactgtgatggttacaaagcggtgattttccagctccacttctacttccacattaaggaaagggtttccttttttccctattcatttattttattcgttcatttacatgtctaaatgttaacctcttttccctttccctctaaaccaattgtgttcctcagggatgtcagagtctcctttaaaggacaaggtggaaagtgagagggtagagcccaggcccctcacccctgctgctccccgaggagtgccacatttatctgcttcctatagtaaggttcatttacaaaacaagcggtctgctacttttttaaaagtttgaaaaccaccatcttaaataaatatcctctgtgcccattacaaaaaaaaaaaaaaa

SEQ ID NO: 236 - DNA, 428 bp, Homo Sapiens
  misc_feature (341)..(341): n is a, c, g or t.
  BX103256
aaatgtaagctattttcgtaatttttgtataatgattacatgtgaaatgataatagcttatataatattaggttaaagaaagcattagaattaatttcatctgtctcttttcacctcttaatgtggttactaaaaaattttaaattacatatgtgagtgttgtataaagaagagaaggttagcattccccttgacaaggatggaagaggcctgtacaacactcatataacttcggcattgccaccttctttgtagcatctaaccatggttttgaggatggaaaatgattgtgtaattggtacgaggtttcctttgtgatgattaaaatgttctggaactanatagtggtgtcagttacacaatattgcgaatgcactacatgccactaatagtaaatgttatgtatcttttactgcaataaaaaatta

SEQ ID NO: 237 - DNA, 580 bp, Homo Sapiens
  misc_feature (551)..(552): n is a, c, g or t.
  misc_feature (565)..(565): n is a, c, g or t.
  BX103476
gaagctgcagaatgggatgggattagaaaacaacaatctattaggaaagatgaaaggaaggaattccccagtgttcacgctgagaagtcttcatattggaccagtgtgagggggtcttttatactgaggttttaaaaacctgacttcattttgtcctgaatgtagaagtgaagaaggacactagtttcaggcacctgggatggtggaaaagtttattcaactgaggctttccatgcattgggttgaatagctgagggaagctgaagactcttatctgaaaatatgatctgaaaatatttattgtataggaagacagaatgcctgatttctgaagttttcttgatggcccaactaaagaagaaaggcaccaaatcctcactttaacaggtaaatggagatcctgagggctggatacccaagagccaccattttacggattcctcagatttaaaaatgtctcagatagatatttccaaattctatttctattagcctctgtggataaagagttcctgaaactctggttttactttttttggaaaaaaaaaaannaaaaaaaaaaaanaaaaagttggcggcc

SEQ ID NO: 238 - DNA, 355 bp, Homo Sapiens
  misc_feature (55)..(55): n is a, c, g or t.
  misc_feature (191)..(191): n is a, c, g or t.
  misc_feature (334)..(334): n is a, c, g or t.
  BX104799
ccgacagttagaatgcgcctcggggcgactagtcccaagtcacggaaacctcggngcatccccgcccgcccttcccccggggtcgcccccgccgcctcctggcgcttcctcgctgcggagactcctgcttggccgcccgagccttccttccagaagcccgcaagtctcccaaggtcactcgggacccttgngtgcctggcctagcccagaggctgctcacctattcattttcatccgtactccaggaaataccaaaaagaaggggtcctggaggagagagatgggctgccgtgggtaggagaaaggagagggctaggagaccccgtaacacaanaaaaagagactctccagcgga

SEQ ID NO: 239 - DNA, 626 bp, Homo Sapiens
  misc_feature (3)..(3): n is a, c, g or t.
  misc_feature (15)..(15): n is a, c, g or t.
  BX106374
atnctttttaaaatntattactcaaatttatcctctaattatatacacgccttctctttacattaaacaaaaacatatacatgtgattcaagtaaaattttgtgagtgatgattttataatagggtagaaggtgttgaaatgctaaagaatacatcttgtgcctaggaaaggaaaaataaataccaaggaaaatcagatggggtaagacggaactataaaacaagtaagaaaaagagattccaaaatttgtcaactgggacatgtgtttaatccctatagtccttttttttctgtattcataagatacataaatttcccctatttatcaaatatatgattctataaaaaatggactgaaagattctaggagactcaaataccaactggaaaatgaaaattgctcaatgttaaaaagagtaagaacattctagacaaaggctgaagaaagaagtctctcacagaaaatgaactgacagtggggtgggaggctttggtggatggagtcagggacagttataggtgaaaagatgttctcttactgggaatttgagacaggaggaattagccaaaaaatgcaaagaataattagtgtaatttaggcctgggcaacaacagggtaactcca

SEQ ID NO: 240 - DNA, 740 bp, Homo Sapiens
  BX106991
aagccagcctcttcctcctcaggaactggtcaccaggtaagcctctttgcatcctcaactgagttctcatgttttaattgggttcgtgatatagaatctagaaaaattgtgtatgttctgagatcctgaggaagacaagaccaccacaaaattccacctcttaaacacacccttgcttaattcagccattttgtccagctggaaagtttgcttgggtgcctcctccttaatcatcacactgaggcctttgtcattccactgttctctgcatttgtttcttgttgtttggagccgagtcagtttacttattcaacattataggtcctattcaacattataggtcctcgaattatctggactgtcccttaatttctgctgataaactggaaaacttgtctgcgggctcatttctttcttgtaagatctttccaaatatagtcaaccacccataccattggcattctgctttccacctcttcccttacagccactggctcataggtgcgtgacctgccccgagttactgctgcccagtacatactccttctatgttggtttatttgcatttttgcagcttgcaactaaaaaatgtcccgaccgattgtctcatagcatttgtttgatttacccattaatgatcctccagttggtagatgttttcttcagctgacagatcgggtttgtacttcctgctgtatttaaaattaaactttttacatgcgaataaaaaaaaaaaaaaa

SEQ ID NO: 241 - DNA, 547 bp, Homo Sapiens
  BX107738
aaccatacacagaggaagtttgccatcagctgaagagtgcttaactgaggcgtggcgagcagactgcacagttcttgccaacatcagagttaatttggtaaatcttggcatctgctttccttcagatatttacctaaagcctccatctgcctctaaatatagatggatgagaagttcagcatcatttaagacacattattttgcacttggctatatataggaatgtactgttgtataagtagccactttaatctggtttaaatttaatttggctcctggacatgcgtatgtatatgttggttaagcatttccttttcctacggtcatctttcaaagtgcacgttgcttaaacatataagggcttacttttctcatgtaacaggaattcaaagtgggtgtttgctagtggtggttcagtggcttgaggatacgggggctgaggtctctgatattctcttggtctgttcctcatggtctcaaggtgggtgcaacaattctagccatcatattggagttccaggcagaaaagtggaaaaaaaaaaaaaaa

SEQ ID NO: 242 - DNA, 767 bp, Homo Sapiens
  misc_feature (26)..(26): n is a, c, g or t.
  BX109986
tagggtcagaaaatataaggctcagnaaggatccagaataatttcctctaaacccttcattcacagagtaaataaaatgaagctaccaatgtcacaggtagctaaagttagggcttggtctagaaatctcctccttatttaaattttctttattctccactgaacaaagagaaattggaagaatgcaagagatctccccacttcagacctacagtccacctcgccacagccagtcttcaaaagaggcaggtggagagccacgtgatggcattttcagctggtgcaaaggatcttccctgccctttcagaatgccccttcttcatgcctgcctccctggctcacacagaataaatccactcctttgagcaaagacactctatcctgagaaggagtcatctgcaaaattgtatgcttttataaaggccaggccaccatcaaacattaacatgccaatataggtccaatcaagcaaagctgatttccaagaataggaagctggactaacgcagatgacttgaggctccacacagggcttgcacacaactggagtctacagatatcatttggcttgaaaagaattgaatcatattgatttctagacaaggatcctaaattgtattgcctctagaccttcagctagtacctaaagcaaaatcaattgctctagggaaaaacaagtttgtaaggacaataataacatgcaagtaaatacgtttttactaaggaatgggagggtctctcacaccaaaaagaaaatggtttacta

SEQ ID NO: 243 - DNA, 615 bp, Homo Sapiens
  BX110173
caaaaacaccaataatgagcactgaatacatttatgtttcgggattacaattaaaacaactattggaattatggttgcgaaacaaaacaaatgctataaaccattataaagcagaaactgtaaaacccaatgaaggtaagaatgcgttaagtatcttgattttctcatttttttgtagttgaaggccaagaaaagatacgtttaaagtctgtagcccagctattagggatacaaataagtgtgaagttatacaagaaccctctagagagaggctgttggccagaggtagcatctgcttctttggtggtcttggagcttgagagtgttgatgtcatttggtgtgtggggaccaaagataatgagcaaactgtaaaatgcttgactgtcttggacaaagacgatttttctcatacaaacactcacagtgtccctacggaacagtaaagcagtagaactaataatagcaataaccagcccaaattgaatggaggagagaagagagaggatttgggagaaagtggttttgtcattactcttggtgaagagtcaattgattatatccgaagaaatgtaggattgaataaattatatacaaatatgaaaaaaaaaaaaaaa

SEQ ID NO: 244 - DNA, 460 bp, Homo Sapiens
  BX110330
ttttttttttttttacatctaaacgtatgtttatatattttatttgtgcattttattcctagggttccttttgctttagtttgtaaaacgttcttatttttatggcagtgtagtatatactaaataaagaaaaatcaggaaatagaaaatgaagaagaaaacattagctattgtcaaccaaataaaaattgtgcaatctctaagtacatgaacgatgtattatttgtacagcatgtacaatgtttatgcttcacagggtgaggtagagactgcaaaacattgaacctgggacaaataagaaagaaaggaaattttcacaatatattaatattacagaaaatgttgaacttaacagttaagatacaagtagtgaaaaatgatagtatttaaggagatctagaaaatgtcatccataccagtaatgtgtgagaagtattagaataatgcttgtatttctgga

SEQ ID NO: 245 - DNA, 246 bp, Homo Sapiens
  BX110640
tgatatccagtgaaacagcagtcctctggagcctggctgtgacttcaaggcccagttcttctggaagggcagaaaaatacttcgaagaggagaaatgagcatttatataggtttataagtaccatctttattttagaaaataatcattttctaccttgaattctagtttattgtgaccaaagattgtaaaatttcaggatatggctgaattaaaatcttggtcctgcacttaaaaaaaaaaaaaaa

SEQ ID NO: 246 - DNA, 507 bp, Homo Sapiens
  BX111162
cactttatgccttttaattggagaattgagtccatttacattcagtgttatttttgataagtaagggcttaatactgccattttattgcatattctggttgttttgtaactcctcttttcatcccttttttactattgtctttgtggttaagtgattttctctggtagtatgttaattcattgctttttatttttagtgaatctgttataggtttttgtattttggttaccatgaggcttacaacaaacataacaagttattttaaagagatggcaacttatgttagatcacaaagaaaagattagaaacaaagattctgccactttaaataggaattcacaggatgaatacttaaaattaaaacactgcaggaaaattagcctgtgagtgaagatctggttcaggagtacactgggaaattgtctggcatcttatctaaaccttacgctcaggtcttctcctaatgtctttagaaatttcatggtttctgattgtcaagccatttc

SEQ ID NO: 247 - DNA, 567 bp, Homo Sapiens
  misc_feature (10)..(10): n is a, c, g or t.
  BX112399
aatattcttntcattaagcagcaccataactatcatctagtgattagaattttatttttcctaaaaatatgaggcactgtttttgttttggacaaaactacacatttttctttaaagatttacaaactcctatgtaatttgaaagttgctatactgggagtaatctgaaaagcttagaaagttcatttccttttatatttccatcttaaatgtgctgctttttctattcgaagtttacaaagaaacaagtaaatgggatgtcgtgcatgtatgcacatgctcacacgtgtataaatcagtgtccatttaaaaaatattaacatttaggtaaatagagtattacatattatactctttagatgatcaagactctaatctgtgttgacacttcagaatttattaaaagatcttcccttacttttcagtaatttaattagtttctttaagcctgacataacgaggaggagcccaaacaacataatcaagttttaccttgggaggaaaaaaagttttacctgctagaaagaattaataaaatattgctatacattcaaaaaaaaaaaaaaa

SEQ ID NO: 248 - DNA, 394 bp, Homo Sapiens
  BX113731
ccttgaaaagaagcgtcccggagctgcaccttgggctcctgggtaacgaagcgcccgcctggatttataggggtgagcttccctcatggagagccttgtgaggattagccacctcctcttatattgctgttagttaaaaataaagtcgggttgcaacccactataaatcttattctacatgttacgaattcaagacacagagggctgctatccagtgtgctagccatagacaccaaatgtcttggttcccaatcttttgcattagagatatgtgcgacatatttaggggttaaatggtatgatgtctggaatttgcttgagaatagtggggagtgggaggtgaaaaataaagcaagttggccgttaagtaaggccatagaaaaaaaaaaaaaaa

SEQ ID NO: 249 - DNA, 696 bp, Homo Sapiens
  misc_feature (676)..(676): n is a, c, g or t.
  BX113978
caaaaggtgaaatataaaccatgatcctttgagacaagggaaaaacagggctttgaaaatgcctgtcatgtgataggaggcatctgtaagggagagactgaaatggctcccaggggtagtatatccatcctcttcccgatatacctgtgccatacaaataatgaccctcaacacgttaaaatgtggtttacattaagggtcatcagagtttaggcctaatttctgcaattcaggtattcatcattaccttgcaaacttactgtaccaacataaaaagcattttgctggtgtggcggggagaatcaggttaaattaagtagaagcattttggaaactttgcctagtacttcatgacttttgaaaattataagtgaaaacagagataagtcctattcttcgctcacattatttcccacaggcctttccagatccttatagctaaaaatttcccttttgccattaactgtcattaaaaaaaaaaaaaagattacagtctttatgtataaaaccgctgccctttataacattttatgtgacttgtttgcttcactagattgtaagcctttggaggtcagaaaaaaatgcatctaaatgtatctgccaccacatctagcacagtgccttacacttattttgctattcaataaatatattcattaaaataatggaaaaaaanaaaaaaaaaaaaaggggccc

SEQ ID NO: 250 - DNA, 391 bp, Homo Sapiens
  BX114021
ttaccattctgctttccttttctttcttttcaacaaatattgatggagcacctcctcggtgccaggcgctgctgcagcctctaggaaatcaaccgtggaaacacacggaccctgccctcccggcgccagtgttctggtggtcaggaggtgaagaaaaccagcaagaaccagcacaggaatccgacggtggcagcgccgagagaaacaagcttggaggggaaggagagctacagaggctgcatggatgtgatggttggagtggaagctgacattgtgggccaggagaccctgggagtataggccaagatgaaaagagcctcaatccagagcgttctgtgaagcagtcaccacggccaccctgggccatcagcttctggacttttacaacata

SEQ ID NO: 251 - DNA, 741 bp, Homo Sapiens
  misc_feature (717)..(717): n is a, c, g or t.
  misc_feature (728)..(728): n is a, c, g or t.
  BX114951
gcacggctcagccacacaagggcctgggcaaaggtcacggccagcaaagaacacagcctgggtcctctgagtcccgagtccacgcgatcctgacccgtccaccaccctcctcgagacacgacaagttaggcgggaacataacctgggagccccatgtcggtttcaggctccacaagggatctctgggtaaagggtttgtctcttccacatctgttcatttaggagaagcaaagaacatggaaagcagaattcctgggggtggcctcaaccccaagccctgccgatgcaaaccggcaccttgaagatgcctttggaatttaactggaagatttgaatgacatgggcagacacagaagagggagaagcattccacaggggaggaaaggcctcagtggggacctatggagctcccaggcccaccgcagggaggcaggtcctcggtcatctgcggagggagaacactttcagtcgaaggagcctgggacccttgacacagaagtgacatgtgcattcggaacctctctgtggaaaacacagaccctttcatgacacgcaaactcgaagccggtgaggccgagtctcagggctgcgccaaccaggaagcctggctgtccaatgttccaaatctggatgtgaaatggaccatgcagacaggacccaaggggcatgggggagctggcagaggcacccgggaaaagtggggaagcacctgtcggncaggaaggtanagaggcaccctac

SEQ ID NO: 252 - DNA, 320 bp, Homo Sapiens
  BX114974
ttttgctatatagtgactgttagccagtaaaaacagggaagattgattaatttagaagaaattgaaagaaaatatatttattaatgttgcttttaaatgcaaattatcagattgaggagaattttgagaccattgacatttttctaattatgactaaaatttaatcactatacttaataaacatactctattcaaggtcttgtaataaaattatagggaggaataaaacataattgaccccagcgacatcagcaaaaatgggtggactaggaagctgcaagcttttgtttgcctatcaaaacattaaaaaaaaaaaaaaa

SEQ ID NO: 253 - DNA, 698 bp, Homo Sapiens
  misc_feature (668)..(668): n is a, c, g or t.
  BX115738
ccctgtctcaaaaaaaacccacaaaaataataaaaaggatgttaaatataatctggctcagttttctgccagttcctgagtctcttcaatgttcccactatctggcctttccaggccctgcctaaatgaggtatacacccctgacctgtgcagcttattctttatgggcagtgctcattattaaaacattcttcctgaacgtgagatccactctgtcctccgacagccctgcccactagagaggccacacaggctggttgccctcccaagttagcctgtcataccaccccttggtcttccctaggctgagcacccccgttttcttcagctgtttctcataacatgatctcaagcctcttctgaaccccaggctttcttgagtctccatatgagcatttgcctctgtgggcacaacttcaagtgtcctttgtgaggaaatgtgcatctctggttggtgaacttccatccctcagagagaaatagaagcacaaatttgaaacaagctgtctgtctgtctgtttctttatgtcttggaaactttatttatccatccaagctttttttttttttttagcctttgagagcaggcaaccatccaagctcattccacgaacccagagaattaaatatacctgatttgtagcacaaaataaataaatgataaaagntccctcaaaccttccaaaaaaaaaaaaaaa

SEQ ID NO: 254 - DNA, 588 bp, Homo Sapiens
  BX115952
ataaatactgaactctgaatgaaatagcaagttatataaatcttgaaaaataaatattacctaggttaacactagacttaaccacaagagatttcaatcatgaaacctgacataacctagttgacaagtatagcttaagcaagtaagacctcattgctgatggagaagaccccttttcctttgcttgtctgttttgcaaaattcatttttccttcatgagagtaaaaacaatttaggggttattgcagatgtccaaatgcagccagcaattttaaagtcattgatgataccgtcagttatcacactcctacaccagcaatgaaaatactgtatacatagtattacatatatccactcttctaaaggcaagtctgagtttttaaagaatcatgttgtttaaaaaaaaaaaagttgcaaatgtatccattaattataattatatgcacttaaaaacatagaaaaagaatatttgaaaaagattgcaactattctgttaagatactggttttacgtatgattttctccattgtattctgttgcattatatttacaattaaataaaaattataaaggaaaaaaaaaaaaaaa

SEQ ID NO: 255 - DNA, 578 bp, Homo Sapiens
  BX116001
cgtcctctcccgggaatgtacccacaggccccctctacgcgcttgggttgcccaggaaaccccaacggtgaccccacaatgcccagcagagccctcgccctctgccaatgacggggtcaccagaatccagcgacccaaggaatccctcaaataagtcggccaaatttcgctgcgaactgatttacacatatggcctcacctggacaagaaggaatcttggaagttcctggggcccaactcctggttcacgaagacacacagcgtccacgagcagggggctgcgcagcctcccctgggtcgaggcgtgggtttcagcctcaggcgtgtgttgcgctggagatttgtattttgtgaactggtttcaggtggtctcagcacttttctgttaacagggaaccagagtttcaggaaagatctcaaaacctaattttcttcatctcgcctcactcaaaggcctctttcttgtaagactatgattgttttttttaaataattttttttctgattgcaaacataagatttttgaagaaatgttgtaaaactaatacaaaaaagaaatactcaaaaaaaaaaaaaaa

SEQ ID NO: 256 - DNA, 675 bp, Homo Sapiens
  BX116720
cgattctgttgggttttccagatggaaaattatattacttacaaatcagggtgatttttggctctatttttatatgacttttttctatttttatatgactttttttcctgttgtaatattttgcttgtaatttctagaatgatactgaatagcacttttggtgagcatctttggcttaatcctccctttagcctttagcactgttggctttagtcactttctgcatattgccaaattgctttttggaaagctgcactagaattggagagtgcttgtcacccatgtccacacccaagcttagtgaccagagcattgtgaagggtctttccaatttgtggctcttgtcattttaaaattaaatttgggtttgccatttattatttttttctagaaattctcgagtctgagaatatgagaatagagttggcctaggttcatacattgttttgttctcaccagataattacacaactttttcttcctattccaaagtaacagtgttgtggagtggaaattactgttgttaattttagcaccatagtttggtggaaaaaagtatgggtcttggagccagatatcagaactaagctatgtcactaatagcctagtgacttttcataaccttacttaaactctttgaactttagtttcagcatttgtaaaaaaaaaaaaaaa

SEQ ID NO: 257 - DNA, 796 bp, Homo Sapiens
  misc_feature (733)..(733): n is a, c, g or t.
  BX116997
atgcactctgaagcattcttgaggttttccctttggttcatttgtcccatactctctccgttataccagtcttctcagatcttcacaacacaagtaaatctgttggaagcaaggtcttgtagatgtagacatatgggaaagatagagcctgctctcctgatggatgctgttgttgagataggttgggttggcctaggtaagaggaggaccagaagagatttatgatttcttggaaggctatgagttgctgctggccccatcataatcttttttgtttagcagaagtcaggaaacgaatactggtacacttacatttcttggaagagcagcagaaaccttgggatatccttgtgggtcaaggaggcaactctcctcacggattccctgatttgataacaacatactcatggaaacaccaatccaagttttcacaagtttctcttaaagttaacttaagacttcctagaccacgaattcctaccacgcaaggcctgtgaaaatattgtaaacttaatatccgacagggagatattcaaagatgccaaagtacctgtttttataaatattaccacatggtttaagatttgacttctcacataaaatgagtaaaaataacaatgatttttctgcagtaccttaatgatgctgtaattatgaagcagggttttaaaattctgccatgtagtgccttatttttatagtaatggtttctatgaaccttctaatttaatgngtattaagagatttaaagagtatgtaattaaaaaatatcttttccaacaaaaaaaaaaaaaaa

SEQ ID NO: 258 - DNA, 419 bp, Homo Sapiens
  BX117059
cagatttcacaagccttcttcctatgagactagaaatttgaagaaggtaggtcaggactcaccagtgctgtttcaaaagccttttggttgtgagtgccacatctgaccactgcacagatagcactgagaaagaaaattggacccagttctctgcttttgccttccattctccctgtaagggtccacgtgaacagcaagtttggcctggtttccttaggtccctctgggcccatttcttttctttcatcatctttcctaaagctgatatgacaattccatggggaagaaacaaatagtacacttggatgaactttgcgaaacacaaagacctttcctcttatccctgattctaaagggatttttctgtatttaataagtaaataaatgagaacagttttagactgaaaaaaaaaaaaaaa

SEQ ID NO: 259 - DNA, 552 bp, Homo Sapiens
  misc_feature (28)..(28): n is a, c, g or t.
  misc_feature (96)..(96): n is a, c, g or t.
  BX117171
cttggtaacatcacccaggacaggaccngtgcactgtggcccaggctaatcttgaccgctgtccacggggagggagccccaaagaagccgcaaggntgaaggagaggtgaggagaggtcagtcatcatcagaagaaatacttttctggctccaaaggacgacaactttgacagatgccctctttcacaccaaccaataagtggtgtttgtttgttttcaggaaataataaccacaacaacgtgccaagcactttgcaagtataatattaattactttccgcaacacccttcctagctaagtttgtaatttctctcgctttagcaatggataaactcagggaagttaagcatgttcggccctccagatttgcggattcatcatccaaattcagctaaccacggatgagaaacatttgaggaaaaaaagaatgcttgcatctgtacggaacatgtacggacttttttttccttgtcatcattccctaaataatccaatgtaacaactacttatgtaacaattacatagtacttgatattaaaaaaaaaaaaaaa

SEQ ID NO: 260 - DNA, 527 bp, Homo Sapiens
  BX117372
ccttctctgtcagtcaatctccattccctccctgccagcctatttttctgccctccctcttctctgtctgctcagttcttgcatctctccttctgtgtttccaggtttctctatatttcttttgcctgtgtagtctctctgtcgttaggccttttatctatgcctgtgtgtctcactgtctagctgcttgtctccctgcctgtcactttcattgtggggcatcagtctctgccttcttctgtctttcagtacttcaaaaaataaaaattaaataaaaaatttaaattccttatgattaatgggtacaggagaatattttttttgttttaatgagaagactattaaggtgagaacaaagaactcaaatattcagctgtgaaatgcaaatgaagaaaaatttttaagggactctcaagccaagaataagattatttaacgcaaaagcaagaaacatatctaaagcaataatttctaaccttttaggatcgtagaaagttagaaactttctccagaaaaaaaaaaaaaaa

SEQ ID NO: 261 - DNA, 640 bp, Homo Sapiens
  BX118287
ctaatttccgtttcagaatctacttcccagggaatccaacctgtgatgccccttgagaaaaactatacctggaggattagaatgtgtgtcccctgtggccagcagccacgaggaggaagggtggcagaaactagcatgcccagtttgtcctttccaaatttacaaatcataggtcattccaccttccctgagatagaatggttaagtatgtggacatatgccaggatttacaccacctgtgtttcttcaataaagtgggaaacattgagataatatccagtgatattaaggagctagattcactaggaataaatgtattagatatagttgaggaaaaatagcgccagtcaagaattaccgatgggtcttaggtaactgagtaggtggtagtgtcgtttaccgagattaaaaaaacaagcctggagggatctatgagtttcatttgaaatgcctttgggatgtcaaagcaacttgttcactaggcaattaaagatataaatctggagtccaggaacatgacctagagaactgatatgaatgtatatacatacctatcagcatacacccagtaatgactggtatcccgcaaggccgacagatataacttagggaacagaagtcagttaaaaaaaaaaaaaaa

SEQ ID NO: 262 - DNA, 733 bp, Homo Sapiens
  misc_feature (704)..(704): n is a, c, g or t.
  BX118817
ctcatatgcgccaagaacctcaaatttaaaattgggattttttttttacttaaaaaaaaaatctgactaccctcaaatatacaaatgattctagtcttccctgatttctaaaaggtcctgataccaaacatgaacctgcattttcatccatctttgcaaccagtattgatagagtggctactgtgacttgcactaagctgggtgggcatgctttaggcacccagggaagcaaggcatggtctctcacctcaaggagcccacccacttccaggagaaacaggtctgtccacttgaaactgccctggtgtgatgcatggcttgctggaggcatggagaagtgggaaaattctaaggtgattcgagttgggacctactcagagaatggttcatataaggaagaataagtaccccgatatgggtggataatttctcacaagagacatgacttgagcaaagatacacaaacataaaaagtagctttgccacttctttcttgggcccacgctgaagaaccagtctttttctgaaacattgctaagaatgtggcagaaggaagagatatggcagaacttcatcatggccctgacaaactctgctctgaaaaccttcatgatggtgctgaaaactgactccccctgagagttccttggctaaatgagtcacttggccaagcctgacatcctcagagtgggaaaacaatcttnccaaaataagggcaccataaattacatag

SEQ ID NO: 263 - DNA, 751 bp, Homo Sapiens
  BX119501
atgagacttaagtttctgccttgaagagttgtatatccgttagtaacttaaactgtaattggcaggtatcacttgtgattctggaaattctgaggaacacagattccttaagtaatgaaattagtatctgtgggtatcattaactaaggtcacctttcaagaactgttaatgtcctttgtccccaagtttgacagatttgatgtcagaggcatgtgggcctctgtgaaggtgctgagagaatgggaaactaaggccattctaagtgataccagattacgttaaaaaccctcatcaagttcccaatttaccaagctatgcctcattaactgagggttttctgctgtatttggttccacacatgcaatttatatggcatttaatctgagagacccatctgcctcagtggcccatttcccttttatttttggttgctaagaaatgttttgtatctcctttgttccgggtagtctgtgctgttctaaatccttacaagcacttcagatttcgtacattggggttcggagtaagatcaaaaggactagctggttggtgtgaggaagaatgtctgggacctggcccattataatagtatatctggacttagattttgaactctaaagcatatgtacagttggaatggaacacttgtagaagtaacacaggtctatatatcaatggttactgcagctgtggtttctagatggtataggctgccccaatatgaacagggcataaagcgcaccatcactg

SEQ ID NO: 264 - DNA, 363 bp, Homo Sapiens
  misc_feature (20)..(20): n is a, c, g or t.
  BX119561
aagaaccctgttccccaggnaactgccccaacacctcgagcaggtgcctcccctctccaatgaagcctctcccgtccgcccggcccagaaactgggcaacttactggtttcggcattttcggtttctgggacacactgctgtttgggcaaccctttgtcagggcctgttatctcccacttgcagatccagggcatttcagaggtcagagagaggagggaggcctcttctgagattttgacctctattcaggttctacattcatggaatcagccaaccttggatggaaaagatttggaaaataataaaaataatactacaattaaaataccaataaaaatccaatacagaaaaaaaaaaaaaaa

SEQ ID NO: 265 - DNA, 509 bp, Homo Sapiens
  BX282075
ttcctgccatgggtcctgggcttctccactggatggccctttgtctccttggaacaggtcatggggatgccatggtcatccagaacccaagataccaggttacccagtttggaaagccagtgaccctgagttgttctcagactttgaaccataacgtcatgtactggtaccagcagaagtcaagtcaggccccaaagctgctgttccactactatgacaaagattttaacaatgaagcagacacccctgataacttccaatccaggaggccgaacacttctttctgctttcttgacatccgctcaccaggcctgggggacgcagccatgtacctgtgtgccaccagcaggggacagggggggcgcgagcagtacttcgggccgggcaccaggctcacggtcacagaggacctgaaaaacgtgttcccacccgaggtcgctgtgtttgagccatcagaagcagagatctcccacacccaaaaggccacactggtgtgcctggccacaggc

SEQ ID NO: 266 - DNA, 725 bp, Homo Sapiens
  BX337332
atggccgctggggagttgggagagccaggctggggcttcggcaggcccagggaaagttccctttctaggctctttattaaaaaatttagaaggaggagttgaggcgccttgaattttccttcgcgagtttggagactagccgatttttcatgaagcaagcaaagaccgcggtcccggatccggcaacatctacctcattctctccaggcctctccacttgcccgagctctcagccaccaggagacagaaggaagggacttctgggctgcgttgggagcgggcactgtcccctatctactcctgctcggtttcccaaagtccagcgacatccgaccctcctggggggaaaaataccagtacccagacacctctgcaccctgttatatgactgggcttgcttcaggaatatcttacaaagaagaagaagaagaagaagaaagaacagcttggagtcatgtttacatctagttctactgaccggttcccatctggagagtttatttataactccctctataactctctgtttggaggcactggtggctctattgacagactgatgtctaggaaatattgctctatgtctaaccgtacctaaatgtgctgtggttgtatttacagatttatgtttgagggaaatataattatttccattgtatttgtgcatatacagtagttataggagcagatttatatatgggaaaatatacgactctcttacagcc

SEQ ID NO: 267 - DNA, 839 bp, Homo Sapiens
  BX356403
tggacggcgaccctgggctttcgggagaaagccagaggggcagggttctggaaggttccctggcggctggggtgcggtgcgggctgaaatccgagcaggagctgggcgcggccctcggggaccgactatgggggacggcgccgcgggagtggggcaagtgcgggcctggacccttggggccaccgcgtcasagtcggcggggccgtgggagggacggtgcccgcccgctgtgaagggcggtggcccttctagggtcaggccaagcgcagaggcctgaaggtcaccgggtgaggagccagcgcgggtgcctcagaagccaagcgccccgtcccgagccctgcgcgaaccagtatgaccttccaggaaccagatgagagctgcgttttcaagaagcagtgccagacaccttgggaaatcgacactctcctgtccttgggtgggggtgggggtcctggaaagaagctccgtcagcgtaaagtgaactcttagctttgactttgcagagggatccgttgtgtcacagtgacccgcattcctgtcattggtgtggtgtgtttcacagccattgcctccctaggtagattgtaaaacggcgttcgtagagcctttgacctcataatattatgttggaaattacacgatagtaaacataatgataaatggggaatgttaaatggtagtatgggaacattttctaatggttgcatccttaaaattttctgtttcaagtttttaaaggctatagccttaaaaaaagctgactgtaggaaaatggtggaaagagtcgtggaataaaggtagctttgggggattatgacgtgaataaatgacagaaatta

SEQ ID NO: 268 - DNA, 1067 bp, Homo Sapiens
  misc_feature (453)..(453): n is a, c, g or t.
  misc_feature (585)..(585): n is a, c, g or t.
  misc_feature (588)..(588): n is a, c, g or t.
  misc_feature (592)..(592): n is a, c, g or t.
  BX393727
ttgcattagagctgtctgggttttacgctgtgtacctcttgaagcttatgagacaaagcccagcactgaggacaaacttctagaattagaatccaaatgggcaggatgggtaaaataggacaaaggaaagaagatctagataagtattgggaagaaaggccaagacacagagacattatatatgtgtatyyycmtactcatatatatattcttttaaatcactgtgaaaatgggagcyctaaggctgtgaagtcatcctagagccactccttcctcctaaaagtacagaaaaactcatttcagttaaggggaaaaavagagtaagtgagccaggattacagtccaactccagtcaaagttagtataagasataagagaataaatagatcaacatcctcacagacaatgaaagcacaccggaaggacatgaccacaagacagataaamacctantatttgccaaasvataaaatgcaaatatgacaggraatttatattaattagtacagttatcaataaragtaggaaaaggggaaaattaaccaagtaccaaacacttggagtcaaaagcaaaataaagcaganggnaggnattaataavagcaaaaaagaattactagtagaaaaccaaaacaatagaggcaataataaatccaagttggtgatgggtagtgcggggagttgagtcagataaactaccagctaacctatttaagaaaaaaaggaggaagcacaaatacaaaaatttaaatgacaagggggaaatagtaaaacaggaaatttgtttaaattgactattttgagcaattttacacaataaattcaaaaactattttgagaaawatgcaaattgccaaaatttactctaggtagataaagtcacaacaaaccaattaccgtagargaaacacatagttaaaagtaccccttaccaaaagaagcatcaagcccagattgtttcaaggggatttctaccaaccttttaagattaawtatcccmtttttgcttaacaattgcagagctaggraaagatcttgamcycmaaaagcmaaaaaaaaaaaaaaaa

SEQ ID NO: 269 - DNA, 1053 bp, Homo Sapiens
  misc_feature (13)..(13): n is a, c, g or t.
  misc_feature (15)..(17): n is a, c, g or t.
  misc_feature (199)..(200): n is a, c, g or t.
  BX394411
tttattctcryancnnnttacatttgtatgtgtaaaastggtcaacaggaaaagggcataaaggaaaacaaagcgttctttcaggggaagtaagctgctctggaggccaggaactactgcttgcgttgacacggtgtgagtgggtatctttgccctgaagctgaagttaaactttctactggccgtgtggcacacvctnnagatgtgtattaggttaagcctggccaactagagagcgaaggggcttattagttaaattgtgctaatatcagtyaggaaaatgcttgtcatgttgtggtgaaatcttgaggagtttgtgttgcaatgcctgggacatgaacgggccatacaaacagaggaaagctctggggcttccaggcaatggccttgtgtcgagtcatcttacaagtgtccatcttgaaatcataaagtggatttaaaaagaagtagcagtgccacagtttatcaccaagaacttattttaatggaaatgggtctaatgtcccttcatgcaacaagacagatgaacaaaaaacaatggtcctaattagctatgagtgatcttgtatccaggtggaaacaaagggcatgtgtacatgtatatatctcttagatgaaatcacacatgttgtgaagggtagaaaaacgaagcaccaagcagtgctttagtctgcaaaggaaagtttttagccataggcatgttggctagtcgttccccttgatgttgccaaggagcagatgtatgaggtggcaagtctgtgtctatctagctgcttttaaaaaataaaaggaactttaagcattttgccttttcttctacatatcccaatagaaatgtgactacaaatcattacaaaaccactttttaggcaatgtatagttcactgagattacttagatctggatacactgggagawaatatccaggaaagawwatacattaacacaataatgcagtatatttcarttaaaatagaataaataaaataaaataatttaagctgtgtttaacagggtaattaaaatwatggtdagacatagarggmtcgtgaa

SEQ ID NO: 270 - DNA, 795 bp, Homo Sapiens
  BX400436
atattttggagagggaagttggctcactgttgtagaggacctgaacaaggtgttcccacccgaggtcgctgtgtttgagccatcagaagcagagatctcccacacccaaaaggccacactggtgtgcctggccacaggcttcttccctgaccacgtggagctgagctggtgggtgaatgggaaggaggtgcacagtggggtcagcacggacccgcagcccctcaaggagcagcccgccctcaatgactccagatactgcctgagcagccgcctgagggtctcggccaccttctggcagaacccccgcaaccacttccgctgtcaagtccagttctacgggctctcggagaatgacgagtggacccaggatagggccaaacccgtcacccagatcgtcagcgccgaggcctggggtagagcagactgtggctttacctcggtgtcctaccagcaaggggtcctgtctgccaccatcctctatgagatcctgctagggaaggccaccctgtatgctgtgctggtcagcgcccttgtgttgatggccatggtcaagagaaaggatttctgaaggcagccctggaagtggagttaggagcttctaacccgtcatggtttcaatacacattcttcttttgccagcgcttctgaagagctgctctcacctctctgcatcccaatagatatccccctatgtgcatgcacacctgcacactcacggctgaaatctccctaacccagggggaccttagcatgcctaagtgactaaaccaataaaaatgttctggtctggcctga

SEQ ID NO: 271 - DNA, 1085 bp, Homo Sapiens
  BX417275
tctctttcttacttctctcctgggggccaaactgggaaggmaaggctaagccmcggggcttcctgcttcttgcttgtgggtttctggggtcctactaaccmctcctctaatcgaatgtcctgaagcccagcgactcgmcggagaggccaaaggtgcgasaccmctagccaaacaggcttctagtcctcacctcccggcmattcgctgtgtgaaggtgggcgagtcatgtcccatctctcgagtccccatcttagagccggtccccagcagacctttaagcttccttcctactctgccatatggctctgagctccggtgcaaaggcggctgggcagtgggtcgcgcggaccttgcccagagtggtctgtctgggccgcgcactgctggcttagctgccttttcactctcgggactcaacagtggacattgcacctggggaagaaatggccgcgcggaagttatttaaggactcttcctggaaggagtcacctgagcggacctgaattccatctgaggacggaggacagattccgggccctgaccctggccctggtaaggggttgggacgcggagggttagaggagtgcagcgcggcgcactggtctggatccggccgcccggctgggcgcagggcagtcaccgaagtggcctggccgggcgactagtccgtctgcaccgcaacagcagctattactgaacgcctgctcggtgaccaggagcctccccagcctaactattgttcttctcccttgtctcccatttccttttcctttcactttatcctctgcgagtcaagctcttcgcgcagatccaggactggctatcagtcgctctgaggatgcgacctacttgtcgcagcttccacttggttccgcgccaggacaggttttactttcatttctcccgcgcgcgcctccgactgctggggaggtcaaggmarctaggcgtcggccacggcagggaaggtccgtggtctggactcgttcttycagtctcmmcagtctggggggtgggggsgsggggkkttcktytcaraaaatytcsactktmctygctgcactcsytsctcyycctgcctttaaaaa

SEQ ID NO: 272 - DNA, 993 bp, Homo Sapiens
  BX436458
gctattcgtaggcaaaaagagctgagcaggctgggaacagcgcgggtgggcaagggtcagcactgcgggcaggcgggtgggtgttagggggcagaaatcctgcagccgagggtgcagtagaacacagaagaaaaagcctgccaaacaaaagtggaacagagaagcsarrgagggagatgaacatgagtcagtgaagaaaagaatgaragtttactgtttagcagtgtggatctctaatccgacttarractccttgttcccgattcctattcctcckaagccagagatccctgggtccagggtgagggcacggcattcatgcttacccacgggctggtcaacaaagaggtgctgacctgagagtagggcacataacctcagccactggggtacacttrccrgggvcgcscccgtgtagctccctcccctatsctgadatctcccttagcacactaagtattctaggttaaacagcccagatgttcagggagttcattcgccacaaacacacattarratgcagacaatttgcctgtgagatgaggaaaattctctggaagatttaggccctgagagctgaaaagggaccctaaacattacctggtgacaactgccctgaggccagagaagagaactcacaatattggkatatkaaccggkaccatttgtagttaggctgtcattaatctgggtgtaatggggctcagctacagagaagcgtatccagaggaaatgtggggktyctgcagtcarctggggcacgaaaagaccagamtttagaacagatgaggctgagttcgaactctgktcttttgtgatrtggtgacttgggsaaattaatgtgtgamctcagtttcctcaamtatgaggkgtgakgacaattactacacttactattkctgtkagraraamagagagtcamatgtacstgtataattattrtgtattyatrgtwytttcccatcycmtaggggtaytgggaraarggggagg

SEQ ID NO: 273 - DNA, 600 bp, Homo Sapiens
  BX437333
atcgtcgacccacgcgtccgaacacctccatcctgcctcttcatgccatggcctccctgctcttcttctgtggggccttttatctcctgggaacagggtccatggatgctgatgttacccagaccccaaggaataggatcacaaagacaggaaagaggattatgctggaatgttctcagaactaaagggtcatgaatagaaatgtacctggtaatcgamaaagaacccaggaactgssccctamsgcttsatctaattaactccctttgcaatgctyaaagcaataataaaaaaagcgcagcagcaytttygcarygcgcaataaagctgcttytttgcawagcgcgaaagcgcgtaaattttttbtkctttktagcagctttkcttaattttttaaaatagcaaagckttkttttaaatttgtgctgccgaaaaarcttyaaaaatagcrgscsmrcaatttgcsscgcagcttgcttttttttkcgcagcaagcgcstttyarcgcgtkcaawtgctaaatkcgcagcgcaatgtkcaaaaaaaagctkctattttctaaawtgtcakckcttgcgtkcttyttttktagcgtaawtt

SEQ ID NO: 274 - DNA, 548 bp, Homo Sapiens
  BX501106
gtcttctatgaacttcttaagttaaggaaagacctcatacttcattctccccttccaaattccaagcaaagtcaagaatccatctcaattcttatttattggaataattctgagcaaaactcaaaaaggtagggacacagacaagtcacccctatactcaggcagctgacagtccagcaggaggaacaaagtagcctgtcaactctctccagcgtgacatgtgccatgagaggtctgagaaacaggtcatgtccaagtataggtacagtgaagagatcaggaaaggtttcttgaagaaggcaacattccagacgacttaaagatggggcatcacagttgggacaggtatgactccaggaattcagagtctgaaatcaagtctacccaaaaccaaaggatctgtaacgtgaagagcaagacatcatatgttggttagtgacatctgtgatggaggctttaagtgaatacaggaggagcatgcctatttaaaaagaaagctttaaacattaactacaagggaaaacagagtttatgaaaaaaactttgct

SEQ ID NO: 275 - DNA, 4158 bp, Homo Sapiens
  BX537514
ctggtgggtgggattggagggtgggaatgtgtgagggtgggtgggaggctaggtttttggctaggagttctgaaataggctcaggccacttttttcagacttttaagtgtgtatgtaagtgtgggtatgtgtgtttttaagtgtgtgtgtttaaaaataatgttttatcttccctccctgttccttaccgttttcattttccaacagtctactagagaaaaacatggttggccttgagaacataaaggaagaggcatgtatttgacatggtatttttccctttctttatgttataattgagtagtagccctctaatttgtagtttgggcaagtacagccaacaccctgactcttaaccttattatgagaacttcctttttacccctttttttgtttttgtgcaaaacagagatggggttgaggaaggagggttggcgagcaaggccagcttctgccctacagaattgggtgtgtcttttttttcaagtgaggctttgggaaagtgttcaaatgagagcagtcttaaggtctctaagagatggggaatgtgctatgtatatcctgcctgtgaaagcccaaaccatatgggagaagctagaggatactaaaaacaatgaaattgtgatttggaagtttagaacattgttttaaaaattacattataaatgtaagacatgctttttatgtgtatatccgaagggaaacagctacatcctcaagtttttgcagcctatatgacttgagattggagcttgtgaatttaacagtactggtgccatgagaatgagcaaagcctagccaatggatactattgtgtttagattgttcatctttggtagctttaggttcttgatcgaggttcttaagatttctaagtcctttataaaaataggtcaagagtcctgttgttatggaggcttgattatcccagatattaggagtgaacatttttaataaatctttcagaaaatcttggctagaaagaattctaagttagttgtctaaccactgaaaactacctagccagagatcatttaatgagatattctttgatcttcattgcattttttttgctctggaaaaggtggttcaatttgagtttgttttcatgatttgattgcagcttacttcatgccaaggattttttagggagaggtcgaattatttttcatttggaagtcatagggagacaggagttgtacttatgctgctacttgccaggaacaggttgggaagaaaattgtggctgttggaattgatgatgtactggcctaatatagaaaggaatttgtaggcaggagtaaacgttaactgacggtgggttagtgccctgcatcttgcatatttgaactgtctagagttcctgccattgctgggtataaaacgaggagctctctgttgacctgtaaatcattaatacttcttgacttagagtgtcacttcactttatagatgacattttcctctttccccttgatattttctatgttgtgttagataattggtagatatatagttgtggtttagtacatttagggcttctatttatttagattttgtttgttggagtctgtttccaaaagggaatgtgccatttagtctgcatctgtatctttgtggacttgatgatcactggtttgattttgaaaaatgtcttttccagcttttagttactctcatcaaatgtcacatattttctaatcacatgcgctcctttaccacagaggcacataatcatttggcctcatagcagttatccatggccgtactgtagtaaagttccttagaactttgccaggagtgaactagaaaaaagtgcttactagggcctaagagttgctttgtgccgtgtagtctggcctttgcactagtagatcattgctgacataggtcagtttagagacctttctgtgttaatgcctcctggtactgtcttaagatacgtacagtgtctgtttttagatctatgcatatgtcatgaagctccttgtgggctctgcatgaagctgctgctttgtttttgggttaacagatgtgcctgtcaactagcatgtgtattgtccaaattccataaacttaaggtttttaagggctgtgtggtttctgagctctatgtgtctttcctatccttgtaccttcaaagggtgagaaatgagatttatacatccaaagttagtctgataaatatggctttttgtttctccatgtaacctagactgtcaaaaataagtgatggtgataagtaggcctggagcctcagcttctgtaaatctcattcctaaaattttgctagactcgtgttggcaaaaacaaatacctgtggattgtccttaaggcttttaatcagatacctgtgttgctgttagctgaactgtagtgaagcatcgatccaaatcggtcttctgaagtatcagttatgcttttgagtttagaaaatacttaggtgttagtctagtcttcccattcatgaatcagtgtatgtccatatcagagagcctcaacttcttttttcttcctttttaaaaatgattttagtgttttgatttagtgtatactacatagttcagtattattggctttaccagtgttgacagaaaaattttaaatctccagttgcaaacagcaatggattaggatatggaaataaaatcatggcgacatcactgctgagttatcttaaacctctgctacttaattctccatattgaaatgcatactcctccacatacatggcttccaagtaaaggcaattgtagaggggccctgtctatcccagtatggttggattttaaacatatctgtgtttccgttattttgggaactgattaatatttacaattttttttgtttatgagttattttgatactaagaaaagagagaatctagaacatcttgaagttgaaatacaaattttattcttttggtcttgggagaatttaagcagtctatgcaactcatcaaatggtgagaaatagccctccgaggttccagtaagctttcagtgactttgatacctccccaagtttcttgagttgctgcttgttaacacccagcttttaactgagtgtttgctcctgatggtttaggagattttcatgttgtatcacactgtcaagttttattttgtctttttatccctccgtggatgtgagtttgaaacaagcacggtacagtaatcctgcctgatagagtagtctggaatgagaattactttttgggtgagagagttctccattttaatgtttctaaagtttttcatatgaacttggcattggaaaagggaggtaaagaaaaaggacgtttactaaaagcagtgtctactcttcccctttgtgagtgtttattcatggctaatgaaaaaaagagaaggactcttgggttttgtgttgccatgttaagcatggagagggatgcttgacagcgtgctaattgaagccagagcaagtatgtccttcatcaggtaatcaggaactcttcagttgaagctgaggaactaactgattagttgttgatcataatataattggttacaaagtggaagtgccagctggcttaagtacccaaagaaaagaatgcagcagcctaacttagtgttaccatatgttactgaatttgaaactgaccttttttcccaccctacttcacacacctaaaactcttttcttgtcagaccaaagagcgaaaagaaaaaaaaaaagtaaaacactttaccaatctgtcactcaggtacaattttgtggtgagatttttgtctgttctctttgtattgctcttaagagtcctttctcagcatattattctgccattgcctctgtcttccttggggcacctcagctctggatgctacccctgggatatctactgctgttatgtgaatgataggaggtaagtgaccattatagtaagggctctttgtaaaaaaattcaaaaaatttaaaaaggatgtatacattttatagtctggctatcagtttgatatcttgctgtcaagtatgtttctcaatctgtatttatccatcccatcaataaatgttaatggtaaaaaaaaaaaaaaaaaaaaaaaaaaaaaaaaaaaaaaaaaaaaaaaaaaaaaaaaaaaaaaaaaaaaaaaaaaaaaaaaaaaaaaaaaaaaaaaaaagaaaaaaaaaaaaaaaaaa

SEQ ID NO: 276 - DNA, 3479 bp, Homo Sapiens
  BX537817
acttaaatttgaaaataattattaactggctagtgtttcattttttatttaaaagaacattatctaaatatttatataaagcaaagcagtcattcttttcatcctaagtgtttactagttttcattgtttaatattgattttcctttttgttggtattagattcttattacaatgcgtttgctctttgccctgtgatgttgctttgttggcttgttcatctacgttgtagacctagatgaccttcatgttctagtcctttgagttttttactaggctgaaacaaaagaaagcgattggttgctagtaaaagaactgaacaaaggcagacagggagggttttaagcatgggatactgccttagaaaacagcaggtatatctcagctcggtctatgaaaaccagcttctataaggctaggccaccacactgtcatttttttattattggccatcccttagtctctgtacactgttgaaaaagtgatgattcatcacaggatagttagaaataattggcctgttcaaaccctttacagttggggaagttggttttctacatcatataaacctgatgtccattatgcatgtatatttgggacacagtctgccttttaactgcactgtgctttacctgtatgtttaattcaggatgagattggttcctaaagcttttaaacaaagactttttctttttgctgtttttatcttttaatatcaatattgaatgaaaacatatgggaaccattcagagatgttcagtagacattaaaataaaaaggaaaatgtttgacagtttccctgggtaagctgcgaggcatttatgtagcaaaatgatgtattaaaagccaattattagaataatgatcaacataaaacctgggctttatacatcattagaaggttgtctgttgtggttgagggtttggggcagtatacatttgagtctgaatactcctccttataagtgactcattttgtgaagagaatacagaaaaatcttcaaaaactttacttacctttcccatgattggtgttcgttttttgttcaggtcctgtttttctcatagtaaaataactcagtatatatttttggctttagattgttactaatttaatctagtttctcagaatattaaatttatatttatatgttttatgtgccattaagtattgttagagaatttgtatagaggttaataaaagagagttgcccaaattctaactacattaatctgatatttaattagttgtgtgttagaaggaagataaatcaaattttacttatacctattaataatggttactgggtgaattctggtaaggtattatgtaaaggccagagaaaataaaatattgatgtttaaaaagtttgtggataagaaatcttttatttttcttgccacttaagattaaaccaaaagataatttttttaccctcactgaataaactcatttaaatagggaaaatctgaccgcatttcatccttcaattcctaagataaaggaaaagaagcagcaggagtagcaaaggttgggatagagatggcatactttacgtcatttctttcaaaagggatggaattaaacaaaaaattttttttctagctaaaaggccatcattttgtgtttgttattgttaagaagccacccaactacgattaaaaacatttaatatgcaataaaatattgacgtaaaagaaatagccaagagatagatatttgttaatgtggatatactttcagatttttaataatactattgaaattttatacagtattgaataaaatttcacttttaaaaaataaaaattcatttaacaataatttctgagatttatctaggcctcttaccacacttggacctctcatttaatcaaaggattgatatacacaataagtgtgcacattacaataaggtatctgggtcaaagatatttttcttgttttttattttgatgtttatttaagaattttgcttataatatgccaaacctttagctatttagataagtcccagtcatacctaaaatttttacttagagctgagtatttggtgtggtattgacctgggtaatgagcgtataacaaaatgttataaatgaaaagctatttctgacttaaactcttgattcttctacattagtgctagtaaaatttatgtattcttagttccaagtagtggaattttatacattttataatgccatagcaaagcacgattggaaatgagaagtgctgtctcttagaagttctctcatatttcagctaaaacatactcagcaaaaaagatatgtaaattaaaagaaaatctccaatttcctattctgagtaaagctttgatttttgctgattcaggaagtaaggttgacattggagcttctcatttcatctggaataatcactttttccttttgaaaagtctttcattttagcagcagtatcttctaaaacactccattttgcatggatgaacctgtttttctctagataacacagaaaatacaactatcataaatggtaacctgctttctatagtatagctttcctgagtgcccagtgagatactaaagtgccaggctgttcattctggagatttcactgatttttctagctgcatccctattctaaccccccaaataactcccaaaagaggaattttataacttccaaattgactgctgtaataaaatgtttatcccctaagtcagtagtggctcatcagcttaggatcattcagaatatataattccagttcttcttgaaacattgcaccatttttttctgttaaaataggttttggtttatcttagtgatgctgatattttctcagattttccattagtattttttctcccatctgaataataatctgaataaataatgaactggcttttgttataggggtaggtgcatagagcatccaatagcattccaaatatttggctgccaaataaggaaatcataactgcttatttgtattaaattagtattaaataaaatgattaacattttaaaatgttttggtataatctacatgcaatccgttaaaatttccaaactaatgtcagattctttattgcttggctttctgccaaatgatgttcaaaggaaattgagtttttctctagcatctaaggtaaatggaaatgtatgtgatgtttagctttgactagagagttacaaatggatccatggagttttggttatataatttatatgctatatgtatgagggcacttccttgcttcccatgatacttgggatggtgctgtcagtggagcaaatgtatgcttatgccatcttgtccataatatgtatttctgttgctatttgaactattaatgctatgtaataccaagtacttatatcagaaatttgtactctatgtagatagtgcttttgaacttctttctgatagtacatattcctgtattaatacaataaagccaagctgacaggataaaaaaaaaaaaaaaaaaa

SEQ ID NO: 277 - DNA, 3088 bp, Homo Sapiens
  BX538337
attgcaattactcattttgataaagtttattcttaggcgttaaccatttctaaaggatccccaaatcatcacttacttaggtgaaattatataaaatgacacatttctgagaaatgtttaggtccagtgaaccgtagttggtttatgggagtgatttcgagatagccaaatgaactttgatttttgttttgaatgtggtggagtcaagagattgtagatgcctagtttgatttaaacactattgtaaacctatcttgcctattgtgtggacaccaaaagagaccaatgagcctgtttatttttcagaggtctaggaaaattgcatccgtgtgagtagatgtacagaactaatctaaaagtgactgctagtaatattttagaatataataatttcaagaattattctgagtgttttaaatgtgccctgaaatgttggcatgtcatttcagcatttccatttgaattgctcttgtaatatttttgcacaaaaaggactgagaaaaagactactttggttaaaggaaaaaaatagtataatttggtctttaattttaatgtctcctgtggaaacactggggatgaattttgttggcacagttattcaggatatttaaaacagtgttgaacagttcacaagaaattaagcaaacttggattttaaaaattaaaatactttctttccatgtgactgttttgcatagttttttccccctatgtcataacactacattccttgtttttcttaaataaaatactctgcaggttttgttgtgagtgtttataacagtattttgtaagctgcctgggtttcctcagggaaacattatttagtggaataggatatagtttatggagagacaactaagtgaaatcccatcaccaccaccagcaagcactgaggtgctgcattaagtgacaatcaaactagtaagtatttatgaaagaatttagaaaggggttcaaagaagcaattgcttttaaagcagttctctggggttcttgaataaaaatggctaaatgtatttatttatattttaaaatacctgtgtgttctgttttctcatcaaagtgatttcggtgtcatgtatttaatgtgtggtttgttttgttttgcaccatattcttcttagggaactggctctgatttggggtgcagtcaccaactctcatgataatctttacggacagtctgaatctactttacttcaggacggcagtggaggggccaactccagatgcccctgcacttccctcctcaagtcatctaagaaagaattttagaaataactcctttcaaatctgattcatacagttccaacctttttctagtttcacttgctgccttctttgttttatgggcactttttgtgtgattacttccccaacacagtcaaaggccagtatgacagaaccaatggcacatgatgcctctattttgcccatttggggaaatgttagtaaaagaaatagcatcttttaatggctgtcattatcatatccatattaaaatccatttaaagttcttaaatttggcggaataatgtatacaggctgtaaacttctacaaaaaatgtttgctgtctttaatatggtgtcaagttacttggtcctttgaaaacaaaacaaaacttccatacacagcactgcccagtaaagcagtgttggaatattggaaacctagacattcgaggatccttcttgctcacaagcattggaacagaatcctccactttaggactcagagaagctatggagtcccacaggctaggtatagcacacaacttagagaacggtagttaaagcacgtcaaccacaattgaatttaatgatctaaaaaatatttcttaactctgagggttaaactgaagatacgttttcaaataaaagcttttaaatttcttaggaaacaaactgtgacatcgcttttaaaaatgacattcaaatgtttataatgtgtgtttttgagttggcttggactagtgcaagttcactgctggcaatggttatgccagtagttaagttaaaataagttgttaccttcagattgatgtcttgtataaccacaatcatcttcaagcaaaaaaattggccaggaaatgtctttttaaaaaaaaaaaaaaaaaaagatgtgtcagccagaacagttaccattcagaccatactggaatgattttgaaatctttactatggtttaagttggggaaggcctcagtatggcattttcatattcactctatgtaaagattgaagcccaaagatgagttaaattcagtgctgtattgaaaccagtcagtgcaaaaaaaaaaaaaagttttacctttgtaaatttttcattgttaacatcagttggtagttgttaaaacatgcaccaaattctttataatgttctgtgtggttctcaatgtgatattcttgacattgctgtccttactgcttggttcttggttttaaattaaaaagtagatgtagctcatcatttttacttccaaaacggtggagctaaaaacggctaattgatcttgagataagaataccctttactaaggcaaagatttaattgaaatccaaaatgatttatagaaacgaaaggcattttccatttgttgtcttctgccgaaattctgaattgcatacacgcatgaaggataatgaatggtttcaacggtgctatattaggttctctgattttcatgacctatgtatgtttggaaatacaatattgtataaaatgtggatcgttttgttaccgatttaatattgccattttaatttggtgtaacaattggttacacttgtttttcaaagctatcctttgaggagaaagtcaaaatgtgttgttagcctacctccactcaggcctcttgctgtgtaatcattattccaggttatgatgtgcatagcttttaaaactgcgtgtactattattctgctctttcccatactcttgtcatgtattcagaacctaaacttatagcaaaagagccaagcagtagcagtttttgtaaatgtaaaaataattagatccagactttgtttccttcaattttaaaaataaaaaatacctcagtgctaaaaaaaaaaaaaaaaa

SEQ ID NO: 278 - DNA, 7806 bp, Homo Sapiens
  BX640652
taagagtggctctgtatagccataattaactctcaaattcacattggtgtgctgtgatcaaatgaaggttggactgaatcttttcaaactgtaaccatggtaattgaggggggtggcatagaatgaatatataaaaatataatggcaattgttctgaatgactgagtgtcctcctgacatgtaattagctgttttagcaggatgtagattggcatggtcataattaaaagaatttctgtcttttatgtgattggaaatggcagcgctcccatcccctgttccctcttagcactaatgctcccaagaacatttggaacagcagctccataaactaaaataatgacatggtgctcgtgttctcccctaagtgaaacagcagaatttggagttgtttcagcttcaaaatggaagcctttgattattgttccccatttgacttctaagttctttgaaacttcactcaacatccagttccaacttgctccacctctggcagaaaccacagtcaggaccccagaagaagcccctctgaccggcccccactgcattccagcccatggtctggccagctccgggcccttgcttgcctaactcgaggatgttgctgcttgctgggctctctgggatcttcagatttcccttggttgcttgatatttccattgccgtcactatcagaaagcatttcccaaacagaagtttacagaaaattgaatcgaggtttcctcattgaatcctaagactcaaagcagacaacatgacaggacacatataactaacacaggctttaaacaggtggaggcgtgaatggagtactattcacgacattctaaagctactggagcacgggacacgtgtctgtacgctcctctcacaccccttactcggcagctgccccactcccgccgttgccgttgccctgagtcttccccactgttctgctgtgccagtgtgagcatctccccggcactcaagtccatgttctctccctcccgctcttcctcctgtctcttccatgctccctgttgcacgggacatcatgtgggcttgatgccgtacacagtccctgaccatggccccctactcttctccagaagtgtcacactagacaggagctgctgagtcaccaactcacctttccctagaatgtgggtttgttttttctcccccatcacttgcagaggtcttttttcaattatatgatcaagaatgagtctacaagaataccagcaccagacatagtgccaaatggccttttgtaagctgtttcgtgcccttgaggctcgcacttgtgctgggtgagcccaggaccgttagccttttcttttctaggtctggacactccggggttggttaggctagccactggggagaatacagctctggccttttttcatattttgctgcttctctttgtacagatctttccccctccacataccaaaaggaatcctaacctagttgaaatgctagttgcaattcagtttcatgagaatgctgaagtaggctgctgatttaaaattttcctcttccctgaaaatacacacacctagagaatttagggaaaggctcttagggcttgggaatcttatcttttcattccccacaaaatacctacaaagaaatgtctagtattccctcagtattcctcctcgtataggctctgaaagcaacctcattcccacccagcccttgcacaccggcattcaagatccatgcatgcagttgttgaaactgttttctttgggatcctatctttatgacaactggaatgattgtagatttatgacctcaaagagtagagcattccttttcctattttcccagctgctaaaatatgactgtctccattagaatttagaatccgtcttaagcttagagatggtaagagctgactggatgagtctaattctatgatttgtgagacgtgcattaaaaccgtcagcagaacattctgatgatccacctacactcaaagaaaacacaattaacaccacagttaaaaccttctaatggagcccctgtcttagggatcaaggtattagaggtgctgcttcagggatggtgctacttcaaaagaactgaagttggagagacacctcccttcccaaatgcttctgcaggccactctggtgattcagaaaaccccaaccatatattcctttaccagcagcgcccacccttttccgtaactcagcttaccaaaatcagtgaaaattgagacagtgcttacccatgaaatatgtggtttttgaacaaaaaccccagaagttagttattcttataggaaactaaagatgccaccattgtaaatcataatactacagagacaaatgcacaggtctcccaaccacctcaaagtcaatacagcccatgttttctgagcacgtactgtgtgctgggcaccgtgctggacatgtgtgctgcctcatgacccgacaccaagcaagtcaccttgcccttggcaaggcaagtctcccctcatttctttcatttcagtaggacgttcatcttcaaagaacagaccacataggatggtctgccctctctgaacactaacctggtttgctttctcacgcagcagtgccaggtagcctcccaggcgcactgtggcatcgcccccgcctctgtgagctgaactccctccgtgagggtctggacgtgagggcccctccagagtcttcctccctggtcagtgatgaggacaggagtgcagggaggtgccgcagtggttgacagggtgggaagcctgtgtggccgaggggaacttgaactccggcaccccttgcctgcagttagccaaggcagagaccaggaaaccctcttgcacttcccatcttctctctccagctcttgtagcgctaccctggccgttccttcggggctcctgctgtgttcaggcgcatcttgctcagctggcccctcctcctctctagaaaccgggggtctggggttctggaattagatcagtgtctgttctgcctcaggcctccctgcctcctcatgggccctgactgccaagaaataacagttgctggagacatatcttgatttggggtcagcataagaactttctagaacccagaatccagcaaaggcatgagctcctttgaggtagaggtctggttcctgtcctgccacatttcacgtggaactgtggtaacttgtcagggacattgaacaagggacatgggtaccaagctgacctgaggactcagctaactaaagttccacatttcttccctccttcccttgtctacctcttttccgtcaaacgtaagtggtcctctaggggttggctctctcatggtctttctcttctgatctgctctgccccgtcgtgggcatcttggaaccacctcagaagcaaggccacagctgtggactggtcctcgtgagagtctccctggatcctctgtacctgtaataggtacacagttacgttattatccaacctccaatccccaaaaagcctccttaatttgaaagagaaaaggtatatgtgccttgcattttgttatcggtccagattttgcatctggtggtggctggggtgccattgggattttggaatgggagcagtttgattcctccctcggaaggaactcatggctctcacaaaccagtgtctgtggcagtgacaagtcacagaatttgtgtttcaaggcttattccttcttccctttaagactttttcaacttcctgtcacttcgggctgagtctcaatttcagtcatgttttgtggcttcctttgagcacagaaacctctccttttcttccgttactggaactaagatcccagcgtaaactcgtgagagtcatttttccacgtcatcattcgttggagctattaagcccgaacacagaatgacattagtgttatactaatgtaagcagcagccactctggtgatgttgcattgaactcttttgttcttaaaccagattcacggcgggcaggcacagagttagaagagtgggctgcaggaagacacgtgctcagcggtggctgctttcaagcagcattgttttttgccttgaaaaccacatttcattatgttagaatcggtgatccccttaatactgcatctctgaaaatgggcaccatgaaaccaaaaccaaagttctggatgtgggggagtggagcttttctttcgaagcactgggagcttgggcagggcgtcccgactgcccctcagttttgccggagcactcggaagggcctcctcttttcctagtagttgcctcatggtgactctagaaagcaagtgtgtgcagcctgtgcctccccgacccatggcgggcgtctagatcaggccctaggagcctccccatccctgcctcttctagccacttcccggggggctgtagagcacggtcacaggaaggcctctgctgggccgagtctgcggtccctgagccatcacagcactggcgtcttcagacacaccctggctgcaaggcaggacactccccctgccgagagacaccatgtgcgtcatcattgcctcccctggaagagcccacagccttctatgatctcccccccgggctcgccctgccttccacggccatggtcacgttgggtatgcagtacttttcaaggataaatttttgtttatgttttttaagtgcctaagcaagatacagacctctggaacctgccagagagtcggcctatgccctgcccccatccctccccaccctgcactggcccttgagggtgggcacagggcggctgcccctctccagtgtccctggcgttctgcaggcagaacaaggcaaggacaagctagcgggagagatcgcttcacagccatatcaggctggcttcgtcactgttttccagcgtttctttctttagggccgtttctgtttatgtggtttggtcttggttcatagagaatttaagagtctgcttagggaaatctcagtagccactaagaagacaggagagcaagacagcctcagagcagcattccagctctggctttggtaggagttggaaatgtgtccacatccaagagggcgaagcgtcgaatcatcctagctcatgagcctgctgactcacctgccagcgtgagccaccggagccccagctgcctttccgagccctctctgcctagactagagggatcagggtgtctgctcgggagggcttgggaaagccagcaatcaggcgttcagatcccaagtgtgtctttggaaatgagtgtgagagtatttgtttctttttttaaaaaataatttaagtctgacctaaatacggggcctttattctgtgatgggtgtacgacagattattttgtgactgcagtctgttcaaatcacatcactaagcagcgctgagatgatttgttggtgcattaaaaggttttgcatcatggaacaatccatacccaggcactttattttcattaataatccagcatttttgttcagacaatgtaataacccaaacactgggtattcatatttgacacatgggcaaacttgccagtggaatggaattgtgacctgacagagaagggaaggcaggctgacgaaggtgatcgaatgggagaacagtgctgtggtgatcatgagaatgaggcttttctgtagcatgtaaaccaaaccggacccttggcagttcgtcgtccctcagttctccagatgctattttttgcaggttctaccaagtgcttgttgattaccctagttgtaattatctagggaagagatgaatgtaagtgagagtgcagagcactggggagggtgacagtgaaatgcaattagaggcagcaagagagtcctagtctgttctcacataaccggacttgaacgctccagtgcgagcagagtgctgggggtggattccactgccgaaccacggcagctttgctttactcttcagcatgggggtggtaactagctgcacagcaagttatgaaatggaaagcaagcttaacagctgtaatctcatcggataccctggagcaaatgccttgggattgcctgaagtgaagtgtttagcatccaccaaatagttgagtttctaagatgggccatgcgggatccctgccacacgggtgtgggggcagcgcgccactccctgcctcggctgctgtgtgtcttagtcttcatgtttccccttggcgtctcccctggtccctgtccatcttgtgcaccatgtgtccctgagggcgagtcacacctgtgtcttgagtctactgtaaggtgttcagtctacctcaaggggtcatcatggtaagctctatcccacggcatcctccgtccatcaccacacacactggaatgtatcccccccgccctgccccttcgataacctcctgaccttgtctttcctataatcaccacaaactcctagtgcaaattggatgctgctttaaatgtgaaaacaattgttcaaaagctataaaacctgaatgaaagctgaagctgaatttataagccttgttgcatatgagccaaaagtgcaaaaagctctatataatgaactaacctgccactcgtataaatataaatatatataaatatattaaaatcagactgttctacaaaattgtgtatttgtatttttgtgtacgtacaattttctgctaagcagaaggaggatgtagtataggatgctgtgagaagagatttggtttaatcctatttctttgttacttatttttgttaacatcagatgcctgtctttgtcttatatgtgtatgacactgtttggaaagctgcagtatctctcttcctgaggtccagaggccattaaagaataaacatggggcttagaggtgtcttggccaccaaacacaggtaagccaacagagttcggctcccgtacgtggtgtggtgggacctggggcctggagccacttgtactcctggggtgggactgagggagggaaagggctcccccacttcaggctggtcactgtatgttgacttccctctggaaagcaaaattccacttgtaaaaatcagcttccaagacaaaagatgatccgatgtcacttctgggtcaccaggaagggacacaggatctctctgaactttggaacagaccctcatattctggggccagaagtttgcccagaaagcagcaggtggctctgcctggctgtagagcccagctcattggctgtccctgggcttcgtctccctcttccgagtagttgctgcctttcttcagatcaggttaccacaatgcctccccgctgctgacgcttcatcccccacacctccagccccagttacctggagcttctcagaacccactttgccggtgctaaaacacaagagggggtgaaagtggctgccagtaatggccagaaaccaaccaccagaggccaggctgaaagacaagctccgggtgtccaggggctgacgggccaaccatgtggcaggtcccaggccccacccactgcgccatccgcctctgagctccacagtggtcccactaatgggaacctcctctagggagagtgatactgcaccttcacccgtaggactcatatttataacaatgtgtaatggctgtagcaaaaagcccttgtttctagatgtaaatggtcaaagaaacaagcgctctattgttttgaataaaatagttcaaatgagtcctgtatcattgtatctcctattctggattagtgccttttggacagtagactgttctgtaattaaaatgtagtatactgcttttttgtacagttttgttttaataaaacttttttttaatttgtgtttattttagtattgtacctattagagaataaaatgtataactaaaaaaaaaaaaaaaaaaa

SEQ ID NO: 279 - DNA, 518 bp, Homo Sapiens
  BX641358
ggccttcttgagagcactctcactgccttggtgataggggtcattttgcagcatgttggctgcagagaaggcaacctaaagaaggcattcatgaaatgcagcctgcttcttgaacgaatctggatgaaaggcaggagaatgcatggcagctggaggaaagccaggatgcaggagggcattccttagggcagtaaagtggacgtacatgcggggttagagagcaacccagaagcaggaagcatgagccagagtccagggtgctttggaaagatttagatagggggtagggcccatccttctctgtcataggaagcaggatgtaaatggagtttctctggttggctggaggttgaggaagtttgcttcctatggcttctattctcatctactgaaatgtgagaagaggcagtgggaatggaaaagctaccatgggagtgagaggagaaactcaagataaatgaaggaatttctgcaagcagtgtggaaagctgaactgaggctggagccatgcatttggg

SEQ ID NO: 280 - DNA, 601 bp, Homo Sapiens
  BY796152
aacgttcacccaacttgtcagaaatggcacttacatggttcgatcttgctggagacaagtggacaattgggggtcactggcagagacggtattgcccaaaatgttcacagcaggaggccagcaggcctgaggcaacacgggcaactgcgaatgcctcttttggtttaaattatgccatcacaaccctctttcacccatgaggctccccatccctgacagccaggtgagcatttggagctggtttctcaacatgaggatgggttggttgttaaattaacaacctccacagtatcagattgagtgagctttgtctgctggaaaaacctgaaacgtcaactctgcttcaaggtgggcaagaagaacagaaggcggagacttggcagagagactcaagctgattgtcacaggctacagaggggccagctccagaacagtgaccagctacatcctgtccaagcagcccgagtgtggtcttggtccctgcagggcgatgtgggcatctggacctggggacgatgtggatgcacttcttggaaagctgttgtagcttgtgcctgtgggtggagaaagcacctgcccggtagactctcagctttctgac

SEQ ID NO: 281 - DNA, 643 bp, Homo Sapiens
  CA391675
cttttattcttccctctcagcccactctccacagtagagagagaattattttcatctccctttactggcttgtcatttatctgggaataaaatccaaactgcaccacggagccttggaaggcctggctgctcctcccctcgcagttctccatggctcactggactttagcagctctggcctcccttctgttccctaggaaccttggcctttgcacttgttctcctctctgcctagagggctctttttctcatctctttgcatagctgggtcatcctcatcctttaggtctcaactgaaaggtcaccttctcactgctactcccagctactcattctctttcccatgtttatctttgtcatagtccttcaaacaattggtaattaatttgcttattttaaaaaacttgtttgttagatgtgtttatcctgtttcctcctcccaactatgatctaagctctctgagaaggggcctcacttaccttcatgttcatcactgtagtgccacaatctagcaaattgcctggcatatggaggtgctcagcaaatacctgttaaataaatgaatgaatttttttgtaagtgtttgttgtataaaagaatgaagagagaaccaagtgccagatgtcatacaccatatatagt

SEQ ID NO: 282 - DNA, 488 bp, Homo Sapiens
  misc_feature (448)..(448): n is a, c, g or t.
  CA433440
ttttttttttttttttctccttgagccttttttaatttaaagaattacagggaggaaagatcacagagagattcccagtgataaagcaaaaaagacaaataacaagtgtccgcacatgttcctgttcaaaacatgatctcctgaggtgttaggaaagtcacacaggccccttctccactcgacatgatttccacaggtaggggtgggttgccttgtgaggctcagagaagggaaacatcaaagagccatcctcagtctcatctcttcttcctgggtcctctcagtgcggggagctgtgaaggttacccttggcactttttccagaagtggtacttcttccagacccagacaccattaagtaggcacagggtacggctcttttgtttgcttaatccccaacagtagagccttataagtcctaggtattctttcctatggggaacagtcnccaggatactttctgctgcattcagatgagagctaatagc

SEQ ID NO: 283 - DNA, 602 bp, Homo Sapiens
  CA847896
acacagataattgaggcagaacatgatttttggagaggtcaggaaccatacaaagacaggggaagagagtgctaaggaagccatcctgggaataaacttttcctgtcttatacccaactccttcaggggacgaatgtctgccacctcctcttttatctccccagccctcactgcactggattttacaaccctatcatggggttaccccctgtactagagcttcatgtaaatgataccgaatcaaaagaaaaagtcaagtggcaggtaatgtgtcctccagagcaaatgtttgtcttgtgttttacacagaactttttaaaatgtgctttaaaaacaaaagactgataaaatgaacattacagtttggtgaaaattatgtcccagcgcctctctctctcccaacaagaaacctgttttccaatcccctgtcctaagcaccaggcatatacaccaccgactgaaagtataaaaagacactctgcagtctcctaagaatggcatctgaattgtcttgtcagtttggtttctactctcagtgcaaatatctttaaataatttaaagtggaaccccaccaacgtttgccactacacttactctctga

SEQ ID NO: 284 - DNA, 631 bp, Homo Sapiens
  CB052724
cgaggccaagaattcggcacgaggaaaaaagtgatgttttagcatggacttggaggaattaaagactcatcaagtggagatctcaggaaacagtgttatcactcagagaaaacacacaggacaatgcaactgacagagcatcctgggtgtttgtggaacaccaagaagcctagtgcggctggaactgaatgtgcatggaagttggagagatagatggaaacaaattgtgtagtcttttatgccagcgtagagaggttgtaatatgttcctgtgtgttcaaaaatgtacctggggttttttgcagtatggtctgataagaaactcggacatgcaaatgattgccaggaaggaagaactttcaactcacggagttttagaaacagtaggcaaaacacatcctgcagggctatgtgagaagcaccagggtggtataagaagcagaagcagaggagaaagcagaggccagatcctttattgttttccacaggaaaagaaaggcagggctgggtaaccagaagaggatttgctggtttgaataaagttggtagactttggggtctaggagctgtccctgtctgcctagtacctggccctggagtcattagagcaaaaaaaaaaaaaaaaaacgatt

SEQ ID NO: 285 - DNA, 551 bp, Homo Sapiens
  CB159370
cgagactccgtctcaaaaaaaaaaaatagactatacataataacccaatcatacacacatatagaaagtcccatgaaacaatatacttactaatatgatgcattctgaaattttctattttttttttttttttttttggaatgctggttgtaactcactaaattgatttcacaacctgcccatggatctcagcctgcagtctgaaacacagtaacctagggaaaatgagtctagatggcttttaccaagggtagtggaagtggggcccacattgtgagaaatacaaccataagtaaaaagtgctaaatggcctctctttaaccagagaccacagtctgtaacttcccctgctttcagtggttacctctgggtttcccctgttgtgatttatagaaaatgactatcactttggaattgagctggtggatttctacaaagattcttggtatttcatggttattttctgatgtagagcaagacttcatgtgaatgaaagcagattcattttgcctttcttgcttgggtaccccaggctgatgtggaataaaaaa

SEQ ID NO: 286 - DNA, 728 bp, Homo Sapiens
  CB984746
ggcatctattctgtaagtttcagttgtgatatttcttaaagattcaaagatggatcctgggaatttgatttagcctccatttcatctgggagttaatcctcacagcaaccctgtgagataggttaataattaaaccctcctattcacacatatttcattaatccttacagcaacctgagagatagtttaataattaaacctactccacagatgaggaaactgaggcccaagaggttcagtgattcgcccaaggttataacagcaagaattggtggcgaaacaagaattcaaatccagattggtcttaatagtgagctctcatgtgtgatagaaattagataccactttgaggactttgggagccagtggtgaatgtacttactttaggctctaaatactctgtgtaatttcttggtcattttgttcttagagaggtggtgatcttaataaagttttgactttattaagtaattaaaagtttttacttatgttacaactaaaacaattctttaaaactttcataacttgaagttttaaatcctaaaattagttgaaaaagatgtaattgccagtgtatcataaatactggtattttaaaaataaagctgctttatcactttttaggaaagcccttgtaatttaatgcattgtaataagtgtattggagctgattgtccaccatgattccatgtaaacctaggtggaactatgcaaattacaagtttttc

SEQ ID NO: 287 - DNA, 865 bp, Homo Sapiens
  CB986720
ggtagaaaaattttgcccaatcccagataatagaggaatttactcatattctcttctagtacttgtatggagtcatgttttataattaaatatccagttttcgggataaatgatgggaggagtagactctgttgtttttccttatggctaaacagttgttctgacatcatttagttgaaagtcattcatttcctctcaggtttgtgatgttttctttatttatactaagcttatactaaatttatttatagcaaacatattagatttctaaatttctaaatgtaattgggtcttttttctcttcttttcccattggtttgtctgtctgtgcgtgggccctgctgcgctgtttggatagagaagccctggagttcacttgttctgcagtggggctcacaccccactagttctttttccaaagtttacctggctattccctgcttatttattcttttccaaatgaactttataattaacttgtctagctccagaaaaaaaaacctgataatatatttaacatgattgtgtagcacttacaagttaacttagggagaaatgacgtatttattaggattttgtgtctttttatcccagaatatggcatgtacatctttccattagttcagggcctcccttggggaccttttggaagcttccttattgttttcctcccaaaaggtttttagacgtttaattggtaaattgtggggtctagtattttaagaaggtttgcccttggaaattccacaaaatgaagacctttttttggggggggaagggttccagtctcttgttccagggttcctttgaaaaaaaccaaggggagacagggttcacaatttccacaaaaaaaaccacaacttga

SEQ ID NO: 288 - DNA, 883 bp, Homo Sapiens
  CD172175
tagagctccctcacctctttggcttaccagctcccatccttcaaagtttctgagttattctgtggggaatttgagctactctcttcctttaggtccaggccatctcagctaggtccagagagcctcactcacctccccaactaagcaagcatccctggaggtatgttcttcatgcaagggcagttcctgagagaatttatttggttagctcataaagggattatattgttttcccctgcacatgagagagagtagctgaagtctactgactttaatgaaattctctgtgaagagtctgggagggacggtttaggtaatccatctacaagggtgctcagagagtttggagcgaagcgattggtgtcgttatgatggcattctatggcacagtagttacagtgcaccaggcactcttttaaagacttctcaagtgttcattcatttaattcttaccacaaccctgtgagggacttcctgttattgtctccgttttactggtgaggaagctgaagcagagaagttaactactttgcccaagttcctttcctcctttgaggataaggagccaaaggttcaggaatgcccaaatcacatccctcttcttgtccaaccacccaacctctccacaggcaacctgatcagccacctttatacaaagtacagtattcagattgggataaaaatatatctccttgactccctgctctgagaggtatttcttctcagaactcccaaagctggaattgaggaacatggctttatttggtacagtatagcaaaatgtccctgccttgttggaaaacgaattttgtggaattatcttcctttttccctcaaggaaatcatttgaaggggctgttggtattcccctattaaaaaggga

SEQ ID NO: 289 - DNA, 866 bp, Homo Sapiens
  misc_feature (787)..(787): n is a, c, g or t.
  CD252464
ttatctttcaataatgaagccttaataaaagaaatcttagtcacaaatttgaggagactgcccaataataagtttacatgtatttgaactgaaaaattgttaaccatgcttttgctccaagatgtgtgaggccattcaggggctgtagggccctggatatacacacaaacaagtgtgtgtatatctggagccccacacattgtaataaacacagctgcatttatttgactatgtgatcccatgtacatgtaaaaacattcaaacaaacacactcagcggatttatttattgtgcaatggggcaattattcaaataaacatgctcaatgcaattatttgaatctcacattgcatgttcatcaatcatagcactaaaaaaagagggggaaaaaacaccaaagaattcacatggggaaaaaatatatatatgaaaaccaccttattatagattttatacggcagctgaggttaaggctcccttcttaactgtaactcaactattctgtattcaatgacatttgtttcaaatgataaaattgagccaacgtctctgatctaataatacgccaactttaaaaacacagtaattgattaataaaacactaaatcttttctactttcaaaaaaacatataaacatttataacaaacacacaaaagaaaaaaaccaaatacaaattttagattcaaaaaaatagaaaaaaccaatcatatattcaacacaaaaaaaaaaataatcaataaaaagaaacacgcacattcaataccaagaccaaccaaaacaaacantaaaatccatctcaaattaagaattacgaaactaacacatcctcaaaacgacacaatcaaatatataacaaatatataa

SEQ ID NO: 290 - DNA, 751 bp, Homo Sapiens
  misc_feature (603)..(603): n is a, c, g or t.
  misc_feature (751)..(751): n is a, c, g or t.
  CD299155
ggggcgatagcactgtttaaaatgtgcggcttcaaggcgtttcacgggtgtcccggacaggcgtggaggtggggcgcaggcgaggatgaagcttgagttggccaggagtcggaaaacgattgcaggcgggaccgcgtccgtcggggctgaggaaacttagcgtggcagaccctaaactgggataactttagggatatggccttcttttcccagttgcctcaaacttagagcagcgtcgtctttagccgaagattcattttcccagcattttccttctccaggcggagtagttggagacagagggcaagccagaaactgaccttcccatctcctcattcccttccatcaagaacttttcatcgttctttccccaccctggtttgtaaatggtatttggcttcataaaaacgtttgtccacaggtgccctgctccatcagttcgctccagcaatataggaagttaccaaaaaaaaaaatttttttttattgaccttggatgcagaaaggaaccgcgttggtgtgggatttgaattttggacttcttgtttcctgccttgggggccacgtccccccttactggtgacccctcaccactttagttgntggggccttttttctcctctgccccccgaacaattataaaagccagacctatttgaaccgccatctctaaaacagaaagggtgtaatgtaaagaaacatttgggtccggcccgggcccccttttgccctaccgccccggtaaatcccn

SEQ ID NO: 291 - DNA, 589 bp, Homo Sapiens
  CD359467
gcgatctcctgcataagaagaagactcagtcagaaggttggaggacgtcccgctttgtccaagctccttcaccacacagtcagcaatttaaactgtcagtagggtgcactttccacagctgaaagagacagactccctggggaaaactaaatataaagacccaggatcaaacagggacacaaaagcaagtatcatgggaggaacttgaaatctctgtggacagcagaagctgacttcaactctgataattgtggcatccataaattgcaaatatagccctgaatagatacacacaaatgtctataatgaaggcccagcagaatggaatgtgtgaccatcttcaggaagaaaataatgaatacatgagtacaagaaaataaattacaaataaaagccaaacttgaattctatatgtattaaaaatttcatttaaagagaaagtcaaatgaataccctgtaagacaattcgattctgagaaaatttattgccagtgcattcatccttcagtaggtcctttggcaaattttctgccagggtgagtagccatatgatatacatctgaaacatgaatctatccaaaaaaaaaag

SEQ ID NO: 292 - DNA, 784 bp, Homo Sapiens
  CD511705
ggggagtctgcaggtttcaaacctaaacagcgctcttcatcctggacgtgcgatgggggaggagtcggcctgctcagtccccacgacatagcaggactaggttgacaaacaaccgagatgggacacatcttgagaccctcacagtccttggaggaaggcagacgagaaaaagacaagaaaagtgttgattggctgcccttcttattaaacatcgacgcgttcactgacgaggacgtaaacaccgatctggcgtaccacgagcgtgtgtattttcgtttcacaaatactgcttcattttgagcatcaattctgaggtgggacgttatcaccactttttccactgagaggtgacaggttcagaggttgtttgtccacgtttgcacagcgtgtgaaggggaactgaaattgggatctactttccatacctttattctaagcaattatcaaatgcaaaaaagggaggagaggaggagaaacagaaaaaaatgaagataaacctcatcccctcctcaaggttatatataattcccccctttgaagataaaaaaagcaattttgttaacattcgcgcaaacacagagaataagaaggaaaagaaaaaccctggttgggcccggcccttcggggcccctcgaaagaaaaaccttttcttaaagaaacaattttccttttttgggcgcccccgcgggggccccccccaggttaagggttaaaaagtggtaaaaaaatcgggggcccccaagaaaccgcgggtggtgtttcccgcccaaggagaggaaaaaaa

SEQ ID NO: 293 - DNA, 715 bp, Homo Sapiens
  CD511953
ggctccacagatctgagtacttaacacttcccagatgattggagaatattctgggctgttggggatgacaggaaaatgtgagggggagtagcctaggtaagggtgatgatgaaattgttctatctgctgtcaaataatcttttcctgtttgcaatgtttttattttttctgagtccctttgggaaccaggtgctaacaagaagctgttatgtgtgggatttcggagccttactttaacgatagaggaaccaagtatcattttagatatcttttatttatgttctcggtgcatatgttgactttaatccctcttcccccacacctcgcccattaaggggaaggaggttaactctgcagatgatattcaggcccaaccagctcactctctggggtggctactgactaaaggcagagaatgtccatccaacatgcccttctgactatacagtcaccacttttttgggggaattctttagcagatcttattgttctttctgcagaagctatcattcctacctccccaaccccccaaatctctaatacaggccaagtcattttttatgatgggtctctgagatagggcagttttgttagaggagaggctagggtagagaggggagagaatggaggtatctgaaaataagtaagaaaaaagcattgattttttatttactccggaacggttcctcttgggcatccccagataaaggggaat

SEQ ID NO: 294 - DNA, 570 bp, Homo Sapiens
  misc_feature (540)..(540): n is a, c, g or t.
  CD522953
ggatctaagaaattttatgcactgttaatagaaggcagtatatgagtggttggaaaactctctcccagcaacagcagagagatgccccttcaaagatacttctctgtggaaaaagttttttgacttctgagaaaacctcagcgcttcctggagaaactcaaaggcgcttgtaagagatgttgagtcagcaggcctctgagcctcttctctgcctaaaaccatgtcagattcttgggaggactggaaggacttgcaggctgtccatgatttctagacaagtcatctgctcacagacaagaatgtgtctctgccttgctcctggagacgataggagagtccacagatgcagagatgtaagaaaaggagaagaaatgaaaagcagaaatggtttaagggaactggcgggaaagacaggaaactcatctgttgactttttccatcctcttcaactcagtggtgtgttggaaaaaagcatcttttttcccccaactattacactgtctgaaaaggtcctaattaaatattcattaaagataaaanaataaaaataataaaaaaaaaaaacatgtc

SEQ ID NO: 295 - DNA, 694 bp, Homo Sapiens
  misc_feature (629)..(629): n is a, c, g or t.
  CD642055
ggggttctcgaaatcagtgtggattcctgagacaatgtggtatgagggactcagaggaatgaaatctccattcaaattatgctctcttcatctcaaaaattacaaatttggaattaaaaaaggaagaccttcctttaagctgtaacctcctagaaagtttgccccgtggacttgtggttccctctgctactcttccctgactacctgctaatcctacttatcagtgctgccctctcccccttacatgctgctccctttggctggaacactattcttgaatggagagtccctcctgggcctggtgccacctcatcagccatctgatttcacttcctcaggaattcccccaattagacggcattcttctgattacgcattcacaacaccccatactgttctcttgtagaacttatcacagtttataacaatatttgtgtgattattttattcaaatcttcctcccacagtaaaatgcaacctctgtgattttatgcattctgtttgggaccattcctgtttggttctccattgtaccctcagaacttatgcagtcatctatgtaatgaataccttcgaatgaataaatgatgagagaagatacttttgtgaatcttttcagaaatactaanatgtgatttgtaaatgtattagtgatgaggataacaataaatccatttatgaaaaaaaaaaaaaa

SEQ ID NO: 296 - DNA, 740 bp, Homo Sapiens
  misc_feature (584)..(584): n is a, c, g or t.
  misc_feature (611)..(611): n is a, c, g or t.
  misc_feature (625)..(625): n is a, c, g or t.
  misc_feature (633)..(633): n is a, c, g or t.
  misc_feature (720)..(720): n is a, c, g or t.
  misc_feature (726)..(726): n is a, c, g or t.
  CD642056
ggggtgagaaacccctatggctgccagaggagagaagagacaacctgatgatagaagtaactcttataactggaggttgcaggtcaatgactgatcttaattgggaagaacaaggatgacatccattcgagctgtatttatattcctgtggctgcagctggacttggtgaatggagagaatgtggagcagcatccttcaaccctgagtgtccaggagggagacagcgctgttatcaagtgtacttattcagacagtgcctcaaactacttcccttggtataagcaagaacttggaaaaagacctcagcttattatagacattcgttcaaatgtgggcgaaaagaaagaccaacgaattgctgttacattgaacaagacagccaaacatttctccctgcacatcacagagacccaacctgaagactcggctgtctacttctgtgcagcaagtgaatttcggcggtagccagaaaacctcctacgacaaggtgatatttgggccagggacaagcttatcagtcattccaaatatccagaaccctgaccctgccgtgtaccagctgagagactctaaatccagtgancagtctgtctgcctatttcacgatttngatttctcaacaantgtgtcancaagtaaggattctgatgtgtatatcacagaacaaactgtgctagacatgaggtctatggactttcagagcacagtgctgtgcctgnagcacnatctgacttgcatg

SEQ ID NO: 297 - DNA, 451 bp, Homo Sapiens
  CD691191
ggtatcgatagctgatatcgaattcgtatcggccattatggccggggactgaactttgagcttcaggcagcacaactcacatttgtgcaaagagctacatgccacatgctgttctccagcctgctgtgtgtatttgtggccttcagctactctggtatggatggttccaagtgatcaagtgtggcccagaaggttactcaagcccagtcatcagtatccatgccagtgaggaaagcagtcaccctgaactgcctgtatgaaacaagttggtggtcatattatattttttggtacaagcaacttcccagcaaagagatgattttccttattcgccagggttctgatgaacagaatgcaaaaagtggtcgctattctgtcaacttcaagaaagcagcgaaatccgtcgccttaaccatttcagccttacagctagaagattcagcaaagtact

SEQ ID NO: 298 - DNA, 706 bp, Homo Sapiens
  CD693563
gtatcggccattatggccggggcccactggaaatggtgacctcacaggaagatgcatcttgtaggaggcagctgtgaggtctggttccccgacgtgctgcagcaagtgcctttgccctgcctgtgggctccctccatggccaactctgctatggacaccagagtactctgctgtgcggtcatctgtcttctgggggcaggtctctcaaatgccggcgtcatgcagaacccaagacacctggtcaggaggaggggacaggaggcaagactgagatgcagcccaatgaaaggacacagtcatgtttactggtatcggcagctcccagaggaaggtctgaaattcatggtttatctccagaaagaaaatatcatagatgagtcaggaatgccaaaggaacgattttctgctgaatttcccaaagagggccccagcatcctgaggatccagcaggtagtgcgaggagattcggcagcttatttctgtgccagctcctcgatttctggggccaacgtcctgactttcggggccggcagcaggctgaccgtgctggaggacctgaaaaacgtgttcccacccgaggtcgctgtgtttgagccatcagaagcagagatctcccacacccaaaaggccacactggtgtgcctggccacaggcttctaccccgaccacgtggagctgagctggtgggtgaatgggaaggaggtgc

SEQ ID NO: 299 - DNA, 710 bp, Homo Sapiens
  CD697230
atcggccattatggccgggggatgtttttcattcaaagctcgcaatgcaccgttctgaaaactctccagcgtagaattcaggaaccctgagttttctatctctgtctagttctggactgaaggggctcaagtcatctagttaacctctcgggatttcagtcttctgaaaagtgaagctaagagatctagcgttctgcagaaaagtactggagatgactcaggactgaaaatgatcatgaagccccttggcaaatatcaaagtggtgatgaagcagtcatgaacttggaccagaagccgggtttggtgggattgccactttaatcgctcctgttcatcattaggactgcagccagagtgtggaaggagtgacagcacagaggaagagatggtccaagaccaaagaggaaagaaatggcataagatgggacagtgttctatgatctctaactggccaaagaaaaatgagaaacaaatttaaaagaagacagttggatgacttaaacaccacccctgagaggcagctgtttccagaatatggcacaatttattgagttcatgagaatcgtgatcgttggcagcaccgaacttcacggagggaatcataggcactttaattccaatttgttgacttatggaggaagcaatttctcccagtggtgtcccttcatccaggaacaagagccatcaaagtgtcacagacttagagccg

SEQ ID NO: 300 - DNA, 583 bp, Homo Sapiens
  misc_feature (10)..(10): n is a, c, g or t.
  CF454561
aagcaaagcncctgggaccggtccggattcccgggattattgctattcagtataaattcctgccgcaactttcctcctctgaactgcctgtgttgtttctggtagagaccatgcttcccagcctgcaggctgcaaccctgtgtaagaaataaaggtctccttactagacattttttgacctttggtcagtgctggttagggtttcttggtggacactctgcagcatcctgaagcaatgtagcacatcattgtgagagcactgagtatgctgtttgctcaggtctctcttcttcctataaaaccaccacttctgctcccatgataacacagtccattaatctgtgcatggattgattcattcatgacagcagagctctcatgatccaatgacctcttaaaggccccacttctcaatatggccacaccggggatcaagtttccaaatgagttttgttggggatattcaaaccagaggagtattgtattttattttcaatttccatgtattaattgctagtatatagaaataaagtagtttttgtatgttaaaaaaaaaaaaaaaaaaaaaaaaaaaaaaaaaggg

SEQ ID NO: 301 - DNA, 1067 bp, Homo Sapiens
  misc_feature (837)..(837): n is a, c, g or t.
  CF455872
cccaggggctgggacggtccggattcccgggatgtgcctatcacatcagtgtccccatagtggccatttgcagttcctacctgttcaacatccatttgttgttctgctgataaaagcattcttgtttttcctttggggagccacccctcccgcgttgcagacagtctgaggggcagggggagtttaattcaaagtgccctcgtttctgccctggccaaggggaagcaggagacccgaggcaatcagaattggtaaatgccaagcactagatttttgctaaaaatatattaaaagacacgttctctctttcccctacagttattgttctgatagaatatcagcggggagctactgaggacctcctcactaccctcccttggaagagtttgtctgcaatggagccaacacagtggaaagcagagctgagaaatggacaaacaactcctgatgcctcatttgagcacctggatttagccatgtctgaagctattatatccttgaacttttgaatcatgtaggttaccataattccttttttgttaaagctaatttgagttgggtttctatcacttgcaatcaacaattgaccaggtgcttagtacataatgaatgagtgaatgaacaaattcaattctgtaagtatttatcatctccttacacggcaggcactgttttaagtcccaaagaaagaggcagaggagcgacagagatgacttcctcccttgaaaacgaagcatgtggcctgacaacctaaaattggggtcaatccatccaattatggtgactgcttagaaatatcccttttcctcccaacgttttcctttccttctcccatanacataataatgtctcctgccagtactaaggcatggcccatggacccactaacacctatgctcacgttagctcttgaggccgagtggctttggtctatctggttatcagatgcaaacttcatcacagcagggatttgggctagacattagaggaatagtgtggtaccagatggtgttttctgaaaaaggttgtcctatttttgcagttttaaggatttgaaaataaaatct

SEQ ID NO: 302 - DNA, 609 bp, Homo Sapiens
  CK905813
cacaggtggatggtggtgccttccgctgagataggacatctgggaggatgagcagagccgatttggggtggaaggcaatgattttaggcttgaagtaccgagtcgcgggtgcctggagtatatccagagggcagaaagcaagttacatcaaaggggtaacgaaggtgaatgcttcccgaggccgggtaggtgatgtcaacaggtcagactgaagcagacagatgatcattttacctgtgagtcaggtcaggctcctttctgaaacgcccggatggcttcccattgcacttacgtcaattccgcatttctttccatggcctgcaaggtctgatttgaattggccctgcttttttttcccacctcatttactacacatttttctctctgactgtgttccagccacagtgatcttagtgattttcaagcatatcaaatttgttcctgtgtcagagcccccttctccctggccaagccctcgccaccagatgttctcccactggttcctcatcaggtagctcgtagcttgcctggtatctcaaggaagccttcctgcctataccgccgcatctgaagaggttactgtgtccaccctgtcttgggtttttttcc

SEQ ID NO: 303 - DNA, 316 bp, Homo Sapiens
  CN283269
gcggagtcgccttggcaactgcggtcccggcagattcccagtgagagcctgcgctgtgcgggggagagtgtcgcgccggccgccgtcccaggacttttatttcaaatgtgacctgtgtagcaaccgcagttcccaaacccgggaagaagagagtatagatgagtcttaaaatctatgttgactgttttgtgtttccagacacccttgccttcctttttctggtctaccatttagatttagatctttcgtctcccttgtttccccagcctacgtatcctttaataaattcctgcattttgaaaacggaaaaaaaaaa

SEQ ID NO: 304 - DNA, 564 bp, Homo Sapiens
  CN304251
gtcgatacaagaggggcccctgtcatgtcagctgctgagtcccctggggcggccgggcactggggaatggtgaactcgccgtgccgcgcctctgccacagtctcccgtgggtccccactgccgggagttttacctacctcccaccctcagccacgagcacctgcaggatgcggtgccatcctcgccggtgcccgctccccttccggaggctctctccaccctcactgacgcctcctcgggaaagcccccgctccttccccgacctcacagcatgccaggtctggggcttccgctggggggcttacctgttttccacccctgctagactgggagctccagggcaaggccgtagctgccttgcggattgttacgttgtccagcttgtctccacacgtgatacccagcaggtgcctaataaacttgtgtagaaagagtggtggatgtttgctcttgtatttactcttcatagagcccagctctgcttgctagagtcctcgaagcaagtgcgcaatgtctgacggtcttgggttgcttctgactcatgggggctgcttgggggtcatg

SEQ ID NO: 305 - DNA, 597 bp, Homo Sapiens
  CN312986
gggattagtgtcattttaaaaaaaatcttagtactcatcatactaaaaacatgcttgacccttgcagccctttctttacctcctaatgcaaagggagccttaaatgcccacatgaaaggaaagcaaagctcttgagttttactcactaaactgtaagctccttaagggccgaaatgtatcttagtcatataaatatctgggcactcagttgatgtttgtggatagatggacagatgttgaaagaggcaggtattcgtactcctgttttagatatgaaaaatgtaagcaaaaaggattaattaccatggctgtggtatgaaacttgtttaaagttggcatttaaattcaagtctgcaacattaaagttctgtgtacagagccgttttcccactgtagcagcagcgcagcagcagcgctgctatgattgattaagcacttgctatgtgccagagttaataattgtgataatatattaactcatttaattttcaggaaactaagacatggaaaggttaggtaacttgcccaaggtcgcacagctagtaagtggcagacatccagagtctctgctctgctcttaactctcaccatactacc

SEQ ID NO: 306 - DNA, 652 bp, Homo Sapiens
  CN357235
cccagtattgtttacatgtggatacttggggataacaattattatggcactttaacagtgcactttaatatataccaccttgatatacatctttactgtctttataatttttaagttggttgtacttattcaatgaaaaagcaaaaaatacacataaatttgtaattcaaagaaatagaattttgtgtctaaccatttaacagttctcccttagtattttagaaagattttaagccattttagaaatgtgttgtcattagttaagtcctcttaaatagattattattattttcctatagaaaatgcagaggcctgaggtgaacgcaagggtcataggcatccattaagatacataactatatagatatcttaaaactctgtcacattgtttccttaatcccttagacctatttcctcccatgaaaactatcataagctatgcttttgttatggtctatagaattttcaaaggacaaattttttttttttaggataaagatcttgtgattgtccgtgggctcacatggtttcttttgttcaattttttcaaaagatttctttttcaatactgttgtcccaccatgatagttgacatggcatgtaattacagacagaagtgtgactggaacatattagtgtttctgttagtgtt

SEQ ID NO: 307 - DNA, 780 bp, Homo Sapiens
  CN357243
cgtccggcctgttgaatacatgggcactatagggatataaaggagtgttagctttctatggctgctgtaacaattcccacaaacctggcggcttaaaccaacatatacttgttctcttgcagttctggaggtcagaagtctgaaatcatttccacttggctgaaaccaaggtgttggcatggccatgctccctgaggagggtctaggaggaatccttttccagcctccagagctgtacttcttgcattctgtggctcatggccccttcttctgtcttcaaagccagcagtgtagcatcttcaaatctttctttactgtcgtatcatattctctgctgtctgtagtcagatctacttcagccttcgtcttgcaaggacacttgtagtaacatttagggcccaaccagataatccaggtaacccccatttcagggtgggttaatcacatctgcaaaatttattttgtgatataaggtaacatatatccagggattaggacatgtatctctctgagggccactgttcagctgaccacagaggtgactataatgtactcttgcactcatagaccttaccatgaattagacagacatccatgattcaagtgtgtgaaatttgctgtcacacaaagaaaggactgagggaacatggaagatgaatttaattttgttcgaagggattggggatgacatgcaaaatgaagaaaaatggcttgaataagtggggaagagtatatcaagtaaaatagcaaaaagcagaggcattgaaggatatgcccaaa

SEQ ID NO: 308 - DNA, 1570 bp, Homo Sapiens
  CR590573
taaggaagaggtttggaattagatatttgttgtatgaatgagtgagctaaagtgcaaaagaacgggcagaataactgagctggtacagagggaaaaaatcacatttaaaatctaaaaatatctgcttcttagttcaggctttcccacttagcagctttggcaccttaggaacacttaacttatctgagcctctattacttctaaaaagtgcataaagtgcagactaagacagtttttttggcaaaattcagtcagactacatcaagtaaactccctaagtctcctagtataattcatggcacaaaaaattggggaaaaaacagggaggatatgattataagttcagtttatgttttttgttgagtgaatgtctccagtcatagagatgcaagtgtagatacacagtaagagtagtatgaatgggagacaccttggaaggctatttcttccttccttcattcagttggtcactcagtgaactatcatgaattgagcaccgcctctgtttcttatcaacaaaggagactgcggaaaagaagagtgactaagatctctgaagaagggaaaagctagatgactgggccacaagaggaaaaaaagcagcaagacagttacaattgtttctggtcccacttttataaacacacacacacacacacacacacacacacacacacacaaaatcatttaatcatttttaagtatttaatcattttttaaaaatctgtgatgctttacctgggcatgtctaggcaggtcctcctttgctaggacgtgcccttttctgtcccggaatactctaaacttggcattttggcagcgtgaagttttcccgttgtgactttctccttgttcccttttctcctccttctttgcagacaatgagtagccactgctgtttgccctggcccatcaatgagaagatctgctcttagagccctgctttcctgctgaaggccctgaaatcacctgtgttccaggccacctgctaacaataaataatgctgccctgatgtggggaattagctcaagtggtagagcgcttgcttagcacgcaagaggtagtgggatcgatgcccacattctccaagctttattatttagacatcgtgtctccaaacactcaggtctccaaacccaagttagtgtctgagaacaggatgctgctttggttcaagacgtaggagcagcaataatagagggctggtgatggctccctcttggcattcagtatagtgtagatctaccatgtaattaattctctgtttctttgaggagctgtgaaaccaagggacatatacaactgctcttttctccctgtttctacctgcagctttgtcctaaatgtgagacaattatgaaaagtgcagcgcagagccacttgggtaaatacagccccggctttctgctcaggggacagagtttgaggcactgcagaggaaccggccaaagtatgagacccatatattgagagtaacagagtgtaaagttcaaaaaaatcaaaatatttaaagatttatcatgggtcttgatgacatgatggaatctctctactctctggacttattat

SEQ ID NO: 309 - DNA, 1000 bp, Homo Sapiens
  CR592039
tggcaacaaccgtaagctgatttggggattgggaacaagcctggcagtaaatccgaatatccagaaccctgaccctgccgtgtaccagctgagagactctaaatccagtgacaagtctgtctgcctattcaccgattttgattctcaaacaaatgtgtcacaaagtaaggattctgatgtgtatatcacagacaaaactgtgctagacatgaggtctatggacttcaagagcaacagtgctgtggcctggagcaacaaatctgactttgcatgtgcaaacgccttcaacaacagcattattccagaagacaccttcttccccagcccagaaagttcctgtgatgtcaagctggtcgagaaaagctttgaaacagatacgaacctaaactttcaaaacctgtcagtgattgggttccgaatcctcctcctgaaagtggccgggtttaatctgctcatgacgctgcggctgtggtccagctgagatctgcaagattgtaagacagcctgtgctccctcgctccttcctctgcattgcccctcttctccctctccaaacagagggaactctcctacccccaaggaggtgaaagctgctaccacctctgtgcccccccggcaatgcaccaactggatcctacccgaatttatgattaagattgctgaagagctgccaaacactgctgccaccccctctgttcccttattgctgcttgtcactgcctgacattcacggcagaggcaaggctgctgcagctccgctggctgtgcacattccctcctgctccccagagactgcctccgccatcccacagatgatggatcttcagtgggttctcttgggctctaggtcccggagaatgttgtgaggggtttatttttttttaatagtgttcataaagaaagacatagtattcttcttctcaagacgtggggggaaattatctcattatcgaggccctgctatgctgtgtgtctgggcgtgttgtatgtcctgctgccg

SEQ ID NO: 310 - DNA, 1284 bp, Homo Sapiens
  CR596519
atacgcagtattttggcccaggcacccggctgacagtgctcgaggacctgaaaaacgtgttcccacccgaggtcgctgtgtttgagccatcagaagcagagatctcccacacccaaaaggccacactggtatgcctggccacaggcttctaccccgaccacgtggagctgagctggtgggtgaatgggaaggaggtgcacagtggggtcagcacagacccgcagcccctcaaggagcagcccgccctcaatgactccagatactgcctgagcagccgcctgagggtctcggccaccttctggcagaacccccgcaaccacttccgctgtcaagtccagttctacgggctctcggagaatgacgagtggacccaggatagggccaaacccgtcacccagatcgtcagcgccgaggcctggggtagagcaggtgagtggggcctggggagatgcctggaggagattaggtgagaccagctaccagggaaaatggaaagatccaggtagcggacaagactagatccagaagaaagccagagtggacaaggtgggatgatcaaggttcacagggtcagcaaagcacggtgtgcacttcccccaccaagaagcatagaggctgaatggagcacctcaagctcattcttccttcagatcctgacaccttagagctaagctttcaagtctccctgaggaccagccatacagctcagcatctgagtggtgtgcatcccattctcttctggggtcctggtttcctaagatcatagtgaccacttcgctggcactggagcagcatgagggagacagaaccagggctatcaaaggaggctgactttgtactatctgatatgcatgtgtttgtggcctgtgagtctgtgatgtaaggctcaatgtccttacaaagcagcattctctcatccatttttcttcccctgttttctttcagactgtggcttcacctccgagtcttaccagcaaggggtcctgtctgccaccatcctctatgagatcttgctagggaaggccaccttgtatgccgtgctggtcagtgccctcgtgctgatggccatggtcaagagaaaggattccagaggctagctccaaaaccatcccaggtcattcttcatcctcacccaggattctcctgtacctgctcccaatctgtgttcctaaaagtgattctcactctgcttctcatctcctacttacatgaatacttctctcttttttctgtttccctgaagattgagctcccaacccccaagtacgaaataggctaaaccaa

SEQ ID NO: 311 - DNA, 1106 bp, Homo Sapiens
  CR603183
ccggcccgtagtggaggtgactttcctgcgcagcgccgcttctgagggcggagaacccacagggagtgcgacccctttgcacgctgtgagtgggcaactgtccgagggactcgagccgatcgaaggctggacgccctatagggctcttggcagtccacgaaagacctggagtccgcctccccatttctccggtcggtgagtggcaggaggaaatcgccaaacatgttttcccgctttgcctccccaactcggaaacttgcaacttgccgtgtcctggaggttgagacaatttggggtctcttggctgccgtccaacagatttatctctgagggcagtgtccttggtgagaggtccaagtaggtgtgggcgacattgtcctccatctcatgagggagcagccctgcacactagggcccaaaactctgcgaaggagcttggaagttcttcatccgttccacttgttttgctactccacacacccttctaggacatgttgattgccaactgctctgtgcagctttcccatagctgtctgttcccgtgcatttcggagcaccaagcaaatacgagcagagagacctggaaaaaaaaatgatgaagacagtattaatgataaaattaacatggctgagtgaattgtcaatgcaagttcctttactaactctttgttaagttttgctttgtactccttacatcctctttctcttaagccattgttttaatttcttctcgttatcatttttaaaagtaacagaaatacagctttcttcctaccttcacgattgacttggtggaggttgggttgcaaagaggaagcagtaagaaaaaataattattctatacattcacaagtccttcaaggcacaaaataaaagtaagaaatagaaaatatgtcctttctcctaataaaggtctttataataaaatttaaatgaagttttgtgtttcataacagcttcccaaatactgttgtagatactaaaatgtgcctgtatgtatttccttccacaataataatagtaataataaacttttttaggtccaaattaaacatttctcagcttaaatttctatcctcaatccaacatttattatatcaaaactt

SEQ ID NO: 312 - DNA, 1002 bp, Homo Sapiens
  CR603222
aattcaggatacagcaccctcacctttgggaaggggactatgcttctagtctctccagatatccagaaccctgaccctgccgtgtaccagctgagagactctaaatccagtgacaagtctgtctgcctattcaccgattttgattctcaaacaaatgtgtcacaaagtaaggattctgatgtgtatatcacagacaaaactgtgctagacatgaggtctatggacttcaagagcaacagtgctgtggcctggagcaacaaatctgactttgcatgtgcaaacgccttcaacaacagcattattccagaagacaccttcttccccagcccagaaagttcctgtgatgtcaagctggtcgagaaaagctttgaaacagatacgaacctaaactttcaaaacctgtcagtgattgggttccgaatcctcctcctgaaagtggccgggtttaatctgctcatgacgctgcggctgtggtccagctgagatctgcaagattgtaagacagcctgtgctccctcgctccttcctctgcattgcccctcttctccctctccaaacagagggaactctcctacccccaaggaggtgaaagctgctaccacctctgtgcccccccggcaatgcaccaactggatcctacccgaatttatgattaagattgctgaagagctgccaaacactgctgccaccccctctgttcccttattgctgcttgtcactgcctgacattcacggcagaggcaaggctgctgcagctccgctggctgtgcacattccctcctgctccccagagactgcctccgccatcccacagatgatggatcttcagtgggttctcttgggctctaggtcccggagaatgttgtgaggggtttatttttttttaatagtgttcataaagaaagacatagtattcttcttctcaagacgtggggggaaattatctcattatcgaggccctgctatgctgtgtgtctgggcgtgttgtatgtcctgctgccg

SEQ ID NO: 313 - DNA, 1195 bp, Homo Sapiens
  CR603450
atcttttattgctgttggttgagatgaatctactgatgaagaaaactgtactttgcttacattcagaataaggctttcaaaactgtgggtgtgctgttttcgtgagccttctacttgaccaccaaagacagtatttttgcagctgtatcaaatgaaccgagttggaggaaattgtataggagtatatcttaatggcactacagcaaactgtgttaaatttgggtttttggcaaagattgaagaaaactggtattcaagatgtactgcagctgtcaccaccaagcatgaactttcactgattacccataacctactggaaatcttcagccttgctgtcagcatagaccactgtgagaaacagtacattccattccagtttgccctgctttttgaagatctaaatgccattccatgttttctgttacatattgaagtttcttggttgccaaagaaaaacggattctgctgaacttgtggacagaacaaccccaaggttggaagaacaatgaaaaataatctatacttgaacatttcaaaagttaaaattttcaacagagttttaacacactgaagcttaaaatacattgacactgaaatgtcaatgggcaaacaccaatttcgccgttcattatgaaatacatcaaacaaaacttgccaaaaatacaaccataaaaatatagcaaatgtatgtatgagcaaactaatgctaaaaatgtctaattttcttggctagtctttcaaggaccagattcatgaagtgttatttgaagggaaaaagtgaaatacttggaattattttgagtgatgtgctcctgagcttgttcttaaaatctaccagtggtagcttttggaaagaatgtgtttcataccgatgtgcaggcctcactggaagagcttcaagaggagtttgtgaaactcaaagtctaatggttttgattagaaacttccaggcaaatactccagagaaacttgggtgtaaaatgactaaacagatgaaaaggctttatccactattccatttgctccttacaccttaaaaagcttttttattttttaatgttttgatatatctagctttggggagaaagcagtgcaagagtgttattaaaagcagcttgtgttttcttgcacctttcacaccacccaggaaagaaaagttcaggcttaacagtgacatggctatcacatcatctga

SEQ ID NO: 314 - DNA, 1553 bp, Homo Sapiens
  CR612552
cccaaacccaactaattctactaccaaataacctcaactaaaacatttacccaaataaagtataggcgatagaaatgatatctcggcacaatagacataataccgcgatggaaagatgaaaaaacataaccaagcataaagtagcaaggacaaacccctataccttctgcataatgaattaactagaaataactttacaaagagaaccaaagccaagacccccgaaaccagacgagctacctaagaacagctgaaagagcacacccatctatgtagcaaaatagtgggaagattcataggtagaggtgacaagcctaccgagcctggtgatagctggttgtccaagatagaatcttagttcaactttaaatttatctacagaaccagctaatgcctttgtaaatttaactgttagtctaaagagggacagctctttagacactaggaaaaaaccttgtagagagagtaaaaaatataacttccaaagttggcctagaagaagcgatcaattaagaaggcgttcaagctcaacacccaaccacccaaaaaattccaaacacataactgaactcctcacatcacattggaccaatctatcatttcatagaagaaataatgttagtataagtgacatgcaaacattctcctccgcataagcctacatcagaccaaaatacttcactgacaattaacagcccaatatctataaataatcaatgaaaccattattacccacactgttaacccaacacaggcatgcttacaaggaaaggttaaaaaaagtaaaaggaactcagcgaatcttacccctcctgtttatcaaaaacatcacctctagcattaccagtactagaggcaccacctgcccagtgacatatgtttaatggctgcggtaccctaaccgtgtaaaggtagcataatcacttgttccttaaatagggacttgtctgaatggctccacgagggttcagctgtctcttactttcaaccagtgaaattgacctgcccgtgaagaggcggacataatacaacaagacgagaagaccctaaggagctttaatttatgaatgcaaacaagaccaaataggcccgcaggccctaaactaccagacctgcgttaaacatttcggttggggcgacctcggagtataacctaacctccgagcaacatatgctgagactataccagtcaaggcgaatatccacatacaattgacccaataatttgaccaacggaacaagttaccctagtgataacagtacaatcctattctagggtccacatcgacagtagcattaacgacctcgatgttggatcaggacatcccaatggtgcagccgctattaaaggttcgtttgttcaacgattagagtcctatgtgatctgagttcagaccggagtaatccaggttggtttctatctattctacatttcttccagtacgaaaggataagagaaatggggcccacttcataaagtgcccctgccccatagatgatattatctcagcattttactgtacccacacccacccaagaacagggtttgttaa

SEQ ID NO: 315 - DNA, 2136 bp, Homo Sapiens
  CR613022
ggcttagccattatgtgttagaacctatagatgcagagaatagtttggcatgccctttctgcaagggtttgtcacattttatagggtatacatctgaagttattcatttattttactttttggtaatttttaaaattatttttcaataaacccttttggtcgcaattactctctccccaaaagcaccttttaaggaaaaatggattactggatttgtcaagaaagttgatattgaacgtgtaacctgtcaatatttaccattcacataaaagtcagaacagtatcactgaccagatttctaaaagaaagaaatctattgaagaaggcttcacaatttttaaaattttaaacatttcaaagatgagcatgtaagaaacacaatgcagcatttttgcatattgttttcaaagaatgacttttcatttaggtgagacaagtaactctcaagataatttcattctttctggagttcaggttttctcgcacacatgtaaaaatgtaggtatagcttttaatatcttggctcagttagcaaaagagctttacaaacagttaagtgatcctgccaattttatatcacagccatctcatcagatacttcaaatagaaaatcagttaattcgaatttttttttgtttttttccatgtgattcatgggataagaggaatgcttttggaagttcattttgtcaaaggtaacacacctgattgtgcgtgtgattgtaaatccattcaaaaagctcaatgtttatgatcaaattatttatttttgtagtgatgatatatgaaaacttttatggagaacaatgttttaataaaaacaacatcctcactaaattaagaaaagtgtagcagaaatatacctggattgatggtaagatacatgtgtatataattcataatttaaaaattaataaaatatataaaaatattttaagaaaatagtaaataaaagattttattaaaaatgggaagatgtaggtcaaaagacatgaagttgcagttatgaagtacaagtctagaaattacagcacaaggactgtggtcaataatattatatcatatactagaaattgctaagagtagattttaggtattcttaacacacacacacacacacacacacacacacacagagagagagagagagagagagagagagataactgtgtgagatgatggctatattaatttgcctggctgtagtaatcacttcactatacatttgtatattaaaacatcttattgcataccgcaagtacatatgattttaaaagaaaataaattaattaaaatatttaaataaaatatacaagtatataatatgaaatgtattttgtaaaatcattgagtatagaatgtacatataattgataattgtatccaaacgagttgtgatattgtactcttagaattagaagctgccattgtaaaaatgtacagatatttatatctttacacagaatgattgaactacagatttttttcaatactgaagttaaatacaaaaacacacctcactgtgggaagaacacacttgctctctttgcccccgtcattgatcagattttagaaatatgtcagcctttgaaaaacttctttgtatctcactgtaactatgctacactggtaatgagtgtatgaatcctttaaatcttgtctgcatttttgccccaaatcaagtggaaatcttaaaagtattcaattactggagtatcaggaaattcagcataggcaggttttagagacttgccattattaaaaccacagcctgccagctagaagatattgccgtatttcctcacaaaagcagagtagggagtgacaaattataggatgagggcccaatggtaggtacacaaaatttaatttcaaaattgtataatttttccttagaacaactacgttatggaaataattttttcatgagacttctgtattttactggataaatttttattctatatcacaatggaatgaagttgaaaaggcttataatattgcatcatccacatttggtcagatattcaaaagaatcataaagagagacaattaatatgagagcttgatcttgctaaagttttcattaaagacctatacactgagtggaagcagaaagatagttcctttaaaaat

SEQ ID NO: 316 - DNA, 1320 bp, Homo Sapiens
  CR622439
atgccacatatatgttgtaatgctgaagcatacaggtagaatttctggatcgtaactactagtgacttctgaggtttacagttagaaaatgttctcaaaggtttatcagttatgtattgatgattggtaatctagaccctctggaggctgtagaatgtgaaaagatacagctgagctgacaagttttagggcactatcttctggaatgaaatcggccaagaaaatggttcaagggcatgggggttagagaatgtttcttttacctaaaaatgttaagccaactatggaagattggggtcgtgggggcatgaaatacaaaattatgataatttatacagaactaggtttctttatgttctgcaagaaggtttttattagctaatttggggaggggggcatgctgcagtattttttttcctgggaacatgcatttctgatgggaagttattttgtttacaagagttggttttacacacaaccctgaatgaatgtgtctatggcctaaaaatggtagacctgtatttccttcccgaggcaggctgattcgtttcctgattccttctgtctgagattacctgatgctgaccagacttatttttcctttcctgaatcttcacagctgagtttatggcacccatccaagaccttcccatttgaatgactagatttctattctatccccgatcatccttttgaaatagttctagtgataaactcagagaaattcaatatattgattgaattttattttttcgctttgtatctacaacagaaattgatttgttcatttttatttcaaatctcttcatggcaagttgggctaatggactttgcactcaagaaaggtttgtttaccagttttgtagccatgtttggcaaatcttagcaactagaaaccccgtcctttcttttccttctttatatgttcttgcagttactcttgtattgcaagattttctgactttaagctttgagactactgcatcttaaaagaagaactaggctgactggcaaaaagtcttgccagtggccctgtcactcccatgatgctttggttttgagagttgggaaaactctgagaacttaagggaaccaaactcaggaatcccaaaattggtggcattgtgccattcgtttaggggctgaacataggacctgtctgaaactgagtgagctagatgcatttgggtttgaatttttgtcacatactgaaatgtaagtcagccctaaataatcaaaacactttattttatttttctttttttaaataggaactttctgaagaaaaagtggtgtgtaaaacatttgatatttaagaca

SEQ ID NO: 317 - DNA, 2256 bp, Homo Sapiens
  CR624151
gaagtcccttaccctcttctaccctagatctgatggacctcctgggatttcctggggaaatgaaatgagtctaacacctttgaccacctgctggatattatatcagcacttacttaagtaagctgtggaagagctgaaagcagtattcagagtctgacagttctctgcaattggcctagataaactcattgtgaaataagtaactaaatgggcaaaagatttgaacaagcacttcacaaaagaagaccaagaagagggcagggttttttgtttggggagttttatttagttttgttttggggttgttttgttttggcaggggacaggagtagtggatagattcattttgtaaagaaatattaaaatattctttttaatttgatagttaatataagcttaagaatcttttaaaactcagaatgttcagccgtattagtcatcaatgaactgctcattaaaactacaataagctaccctaacagtggtatgaacagcaagaattaaaatgttgacaataccaagtactggtgacagtgtgaagcaacaagaactgctgatgcaaattggctcaaccgcttgggaaaatgtttgacagtatctactaaagttgaacatatgtataccctcgactcagcaattccacttctaagcatatatccaacaaagatgtgtacatatatgtaccaaaagacacatacaaaaacattcttggtattattcatagtagccccaaagtggaaacaaccccaatgtccatgaacagaatgcatatgacactctatagcaaggaaatgagctaacttgctacacttataatgatttgaaggaatctcacaaacataatgttgaacaaaagcaaccagccaacaaaagatgtgctgtaggattcccagttacagagttcaaaaacaagcaaaacatatctttgagcagaatggaatgggggagttcacaaagggagttatggtgtgctggtggtcttgtttttcttgaccaggatggggataactgatcgtttttgagctgtactctatggagtatgcattttttatttatcttatacttcaattaaagtttttctttcttagtgaataaagcaaaaatcagcatgaggctggtgaaacagacagttctgcagaatgagagaagaacaatgtcctgaagcatttagaaagaaggactttgttcttccagtgcttatagaacaaaaaatattagaaaatatctgcttttgctccccctatggtgcagcagggtattatgatggcaagagggcaggaaaataagagtgagaaaagaaagggagaagctaaattaatatttgagtcagaaatagtaaatagtcatagcactaaagaaaattgaatccatgatgaacagtgaatactgaactacttttcagaatcctgtgggttctcatgagtccacaaagcgaagatggagggaagttcccccactttttgttcattatccagatcagaactgctttcatcaatgttatatattgtgctttaaaagctttcttttaaaggattctctgcagcttaaataagttaggatgaacaaaaagcaccagagcaaaagataaaaagcaccctccgacaaatatagtaagagaaaaggtgcagatcaaaaaggctgattacagagatttatcctttgactaatagatgttcccaataaacaataactcgttttaatagaagaaacatggttgatctaaaaaattttaaaagtcacaagactgaagatcctcttctacacattttaaatgccatctggaatggagcaatgtctgtagttttgtagcccaagattcctctactcatccaaattgtaaaggtaacaggcattctgtgatatacaatgtactgctcatttgccctttctggaaaaaaattaatcaccacactcccaaaatgaatcaaaattaagaataaaagaagaaggaaagaaaggccagtcggtgagtattgaaatcatcactgaaactattagaataatgaaggtaattgtaaatttcattttttaaaaaaagttttattatatgacttatctattccgaaatttttcagtgggatttataaccctaggttaagttaatgaaggccaagaaggaatggcagtttattttttgggggggatggaggtgggtgaggggtaaaatccttctcttttgtaaagaaatattaaaattcattctttttttactttgataattaaatgtaagattaagaatcttttgaagtctgttaa

SEQ ID NO: 318 - DNA, 4835 bp, Homo Sapiens
  CR626998
cagagggatcttcttgcacttggtgtttttcaaatatctttaacttaaataatcaatatgccagagtgatataattttaattcctttagtaattaatgttgaatccatattttacactcacgttttgaaacaatggtagtaaattttatctaattaaaaagcattttaatttaaatataatatacatacagaaaagtatacaagttacaagtgcgcagcttgatgaattatcacaaagtaagcacacctgattgatcaccacctagtcattatcaacattacagaagactcctcatattccttccagttactatctactccctcctattttgtatagactaatttggcctgttttgaacttttatcagtgtgattatccagtataaattatttttcaactggatttttttgctcaacattgtttatgagattcatccatgtagaaattgttacttattttcaatgttgcaaaaaaaaacaaactacaggttttaaaatctagattatcattgatggaatttaatggattagggctattttaatttttttgaccattacaaataatgctgctattcttgttcatgtgttttgctgcacaggtctttgatgaatatctgttggctgtataaggagtaggattagtgagttatggattatacatatattcaatccgtatattcaacccatatattcatggattatacatatattcaattaatgctcaaggatcttctaaagcggtcactccaacttccatttcctggtgtagggaagtttttgttgctttatgttattgctagaacttgataataatagtctttatagtgggtgcatggtggtatctaactgtagttctaattttcatttccctgatgaaaaatacagcattgagcatctttatttgtgtttattggccatttgaatttcctttgctaaattcctcttcaagtttatggcccaattttcctttaagttttctgtccttttcattgatttgtaagagctctttgtatattttgggtataatccctttgttttatatatatatgtatgttttgcaaatgtctcccactcaatagcctgcattttcactctcctctagtacctatactgtatttgtaatttcagtgcaacccaagttattatttcttttatagttagcttttttgtcctgtttaagtcctttcctactcccatgatgataaaaatcttcttaatgttattttctagaccttccattgttttagttttcacacttggaacttcaggacttcagtctacctggaattgatttttgtgtgtggtgtgaggtaggggatcatgttttactttttcccatttggctatcatatttttaatgacaggatatctcttgttcatgtgagataagattccatatagtaaagatgtcaaatatctcaaattcatttctagatttagtgcaatcccaaccaaaacaccagcaggtatcttggaggaaattggcagccttatccctaaattcattaggaaatgcataagactgaaaataatcaagacatccttaaagggaaacaatgtataaattatgttctactagatatcaagatttattgtaattaaggctaggtggtatagacataaggacaaacagaccagtagggtaaaaggaaagtccagaaataaacacatgtatatggtcaattgattcatgatgaagttgacattacagagcactaaagaagaaacagatttttttaaaactttaattttaattaagtataataattgaagttagaaaggtagtaaattgtacttagatattttatatatgtgccacattaaagtatgatgtcctggaatgttttgtgattttaataattatagagttaagggaaaggtctgcttaaggttcagataaatgtagtatattaaagcatgttaattagattaaagcatattgctctaaacatctgccatctggttgagtttctaccattattatagtagcttatcttgattagtgacaacatgtttaaccaaccaagcaaggacttgaaaacttattttgagactaacactgaacaaagactgtggggctactgaagatgtaaaatattatttatttttctaaggactatagaacttatatgtgataagcaaattggcatacagcaaataaggaggaaaaaaggtgctagaaaaaaggattgattagatgtgtgagcaaaaggatatagagcaaagttagcaaagaaatttcccgagatggggtatttttgttgagacttcaaatctgggtgggatttagagaaatgagtaggagattgtagagttatcaatagtataggggaacatgaaaaaatgaagcaacgcggaactgaatattatatttgtctatgtgaacatactggtgaggtatgcatgtatgtatgtgtggggacaaacagcagagtaggttaaaatacactgatgaatagtggaaaatagtttgggttgatagaatggggccacattatggaggaacttaaaaaaaaacaggaagggaatcaaatttatgtaaaagataggagagggctgagacttatctgtcctgtttatcaccttctcagtgtataacagaatgcatgtcacagaattcatactcaactgaatggaaaaaacagtagtgttcaaaaagggacaggaagtccatgccttggtttagggcatatgataactcctgatagagctatcgtctccttctacctgaaagcttttcagggcactggtaacactgttaagaataattgaaatcatactgctcaaataattattagcttcttaggagaaatgtttcattgagcaaaataccagtcattaatttccattttaaaaagcccaaaaggaaaagccccctctctaaatcctattctctggctccagttgtgtgttttaagagactatgaatagtttcaatctggggaaatattatgggattgacctctttttttttttaagaaagaaaagagaatcaatattaatatttttggcctttagggtttaggcttttgcctgtttgcacattcaaggttaagttaataaaatgttcgtgaaggtctaaggctccatctgttcattctcctcctgtagagaaggacaaagtaaatacctcaccctgcaggttccacctcatcatgtcttactaatcaccattcccctctagtcgccacctgtcttggctccaactcaaagaccctagtggaaaccttcagggaaaggtgaaatccttcattagagcctccccacgccccagcccctgttactgggagagggcagccactcctccttgcctgatatttctctatgggaggaagaatgtggtatatcaagtccagttaggccaaatagcactgttctcttgtcctgtatgcacagacactaacagggccccgcaactgcttgtggaatctccaagctggaagagacatgagaggtgatggttcaactccagcactttgcagatgaggagactgggtctgacagaatgaattacccaaggatatgcagccagttaggggcaagagtaggactagagcgaagacctgtgtttccagcctgctacctttgttcttcaccatcctgcctcattcctatcttactgcccatcactttgtagccatgacttttgccttaatttcaaatcaaagccacagatttgttataaaataagttgacaagcctgattaccatggcattacacattgtataatctctctgatggtggttcccctgtttgtcaggcaggcaaggcagcttcccaaaatgaatcaaagctggaatgacttgtgacttgaagcactcttggttgaaaatgactcctctccaagacatgtggcccccagacgacgtttatgctgagggtcgattctgaaacgtaaaggctgtttcttttctccaaacttcgttgccaatttagagtttatggaaagagctgtcaagccgacaggctatcaaagcgatgggctgcattgcagggagcaaggcagagcatctgggaaatcaaagaccaggaaatgcaaatgcacacacgttcatcaccttgattagtgtgagcaagtttgtctcaccctggccaacatttgatggaacattaaatctggaaaggatgtggagtccaagttctctttattcccaggcaaaccaaccaaagcccatagagggtaggtgacttttaatggttgagttgggactgctatcttttctcaggtctaatgctcttttcattgtatttgtgttaaaaataaaaagcttatatgaaagtgacactgagttgtttacaggctttgccatctgttataataaagtaagatccctcaaaaccttaactacttttaaaggtaaactcttgaatttttcctaaacagagtgtgactgacattactaaattcccggaacaaaggcatgtattatgttctctgtgctgtttttgagaatttttctgcctcaaacctcaaaagaaaaaacagagaacaaagaaaggaaatgtggttaaatgggattcctgggaaacaaagacggatggtacttggcatcattgtttattatctgcattaaaaaaaatgatctcatagcatatatgaggactctgtcaccagaaggaagtaaccccaatttctaaagaatgagtagcattgctagaagtgaactaattcattttctttctcctaaagagctctccatgtcaccattctggataaattcgtactttctatgttgttaaaacccttctgagaggagctatattttattggacaacacagatttctagattcccagatctacctcccacattgttaaaaaaaaaaaaaaaaaaa

SEQ ID NO: 319 - DNA, 5204 bp, Homo Sapiens
  CR627122
atgcacctgagctagtctggatatattccttaaaggagacaagaacttttttgtgcaaaatgaacttttgtgtagtttgacatctgcatgcagtgaactgtctcacttaactttttcaactttgggcaaagatatacataaaccatagataatagacctacagtacagctgttttcatgttgcgttaagcactggaagacattaacaatgacttaccttaaagtaaaaggttccgtgaggggtatttagggccactgtatttttggtgccacaattttctacattgttggcattttaaaagttgttttctaaatgaacttaaagaaagaaagctcaaagccctaaagttttgatcaaattcaatagagttttcagaaaaaaatacaattttaagatagcactctttaaactagatgtgcaatgacttattcaaattatctttattcaagaaaagagaaaagaagaaagataagtcattagactataaatttccatttaaaaagacaagtcacaaaactaatcagtgactctaaacaaaaatttactggatgaattgtatatataaaattctaatcacttatgattcttagttaacattttataagctttgtattttacaggggcctctatttatccaaatttattgtttttgtccatttttctcagccttttgcaaaaaatatgcaagagtgctgaaacttggataaaacgggtcatgtatacagagaaaataatctaaaagttatctttaagagggttttagtagtgtcaactttttaaaaaagtactatgtgaccataacatacgtatattttaaagagggattaagattaaattaaaataaatggattcataaaattgctatttaaatacagtatttacttttgtaattgaagcatgattccacaaccagctgtggcattttatttcacttttctagatcagaggctttaatttgtagttaatcatgatgtggaaagtcatcttctctctactccatcaatttttttcatccgtttttgaacatgctgaagcactttgatcttgccataagtgttgtcctataccactaggtggtgttcactaatgggagggcctcagctcaccggctctccaatttgggaaaaagcaagtacctcctccctaccatcagcagaaactgaatgaaattaatctttgcaacttgaatctgttttaagtagcattaccaataagcatagtggtatctgaataaggaatgacatttacattacattttattaaataagagagaaagttaatgtgctacttgaaatgttatttggttctttgtccccctcattgcagagtatagataaggatgctcttaggtaaaatgcagccacaagttttccgagttccttcagtctgtagggtaggctatgaggtacagaatgattagaaactgaaatcctcattatttttctctcaaatacatttcacatacattgaaacagaaataggcaaaatttatgagggaaatctgatttcccaattctgatgaatagatatactaagacagtagccttgtttaaccagtgcctgtagaaggcactagaataaatagcatgtccaagagtataacaactttttttgtaaatttagttactagcctaatcaaactgtaaatataactcactaattggtaccatattttcatttttcttattgttcatctttaaggtttcattttattgcttttttgtagctctaagtaactaatcaatttaatttcaaaggaaagttaaagaaagtttaagcttttactgcatggattctgcccgcctagctaggttctgaactgacactgaagtatgacaagatacagattatagtccaaaactatcctttacagttcacaatttaagaacaaatttaactttatatacaaataataattgttatctaattatatttagttgttgctttggcaacaaaattacaacatggctacctttagacatttgtgtatgtgaacattttacttgtaaactataggtgatttgtgacagtatgagcctgtagaaaatacagctcaaaactatgaaaacagacatggttgagttcttttttaatcccaaaggcccatatataaaagctgaatttgtgtccttgtgtgactttttgtgaaaaagtttataacacatggattctagaatcaggctttatagtttatagaatttgttgtgtggatagggttattccacagtatttagacttcaaaacgcaatcattgcatttttaatacattacctaactttttttataacttaattcaaaattaccccattcaagtggcatagctgtagctgcaaaaattctgttttctggaattacatgagcaaatatagctatatgaggattaatgtatgactaaagcctcttttgaaattaattcatatttttaaaactatacataaagatactgtggaatgaccccttaacagtgtttaagaaacatatgctgcagttaattgactgtctcagttagggtgcggatgtgtgagacacaccttttttgcacttatgtacatagtccatgaaagcaatccttggagctttttttaaatgtaagaagtctgtgataatagtggaaaagttagtaagagagagttatttctaaggctttgaaaaggagggtgtttttgctctaagacttaactaaagcataatgttgctttgctgttacggaggctttctagtttgctacaggtcaccaaaagagaaggctagtaacaggtaacaggtcagcctcagctaacagcactgaacaagagtagaataacttcatcttttaacaagatcattagcaaagattgtttgctttttaaattaatcccccctataaacacacacacacgtgtgcacacacacacacacacacacaccgggcagtttctagaacaagttttcctttttcagtggttgtaagcagtgaaatacctcatgtattacaagatagatattaccgttatgatagaataagatttcatctttcacagaaagtgatcagctgatatatgtgtcagttaaaatgtttatcaattaataggtatttaagtgacaaattgttaatgttgaccattgttcctcctttaagatccagtaaccaaaaccaaatcggtaaccattgaaagatgatatttaacagttaaggatggccagcatagggccgttcattcccttcaacaaagggaaaaaaaaatgctcctggcacaactttataactggcttcatttacattatacctgttcagtggaagctgttttttgacctacctttaccagattacaaagtagttaactgtgccacttcagcctcccactgttttgttttaactaaacagaagagaaccagccaaaatcttacgtaacacaggagctggaagacaatgtttcaatctgaccatctctgccaattttagctcccacgccacctatagatagccagttaactttctttttgcccccaggcaatgaggcctagaagaggtcaaggttagaaaggttaagcatttgatcactacaggtacttgtagtacctagagaaggaacccatcctggggttggtggagttggtattgctactcgttttgatagttctcatttacagagaaagaaaaataagccaaagccagaaagcaatccaagccttacagttgtccaatacctcagggccagttggctagaattttcttttccccagcccataatcacttagagttagccatacaacaaacagcctgacaatctgaccagcatttccattgatataaaatgtaagcattccttcattctgtagttaggaactccaacttcagccttatctccaacataatttcccaatttaacctatgtactgatatggacatttctttgtgaatatgccagattcaagaatgtatttttctaaggtcaatagagatacgacattttaagtcaggaaaaatcacctataaattagtaggaataactgtagaagcatcacaaaagataccccatgaatagatggcatggtgtgcatgctgacagccacggggtcatactctggagtttcaacatagaggctgtgtttcaataaataagacaaattggggaattaagtaaaacaaatggatgtaactgaggcccccccccaaaaaaagccctctattactaacctcaagaaaatatttagtttgactaatttgtgcagtttccagctcttctacttgttcttgcctgtaagagaatcactaatactcaaaagctggattattgaagagaaattttatctttaaatagaatccatccacaattatggtatatgtaaaaaaaatgtatgactatgaaataagtcgcagctctttgcagatattgcaaaatccttgctaggcatctacatcatattagttttttaaaaaatacctctgtaacaagacctaaaagtaacctaactattaagcagtgcttttttctctgaaaacacacaacctaaagatttatctgtcataaaactgcatggttccagagctttatttctgtgtagagatgctatttgttagtgatggaaacaaattactttgttgctatgtcttttgtgtctagcagttgagagaatgatatgaccatcatatcactggattatgggaatgaatgcccttttcaaaataaacttatttattaatattttaatattattttaatattataatattaataatattttaatattattgttgctgctttaacagaaaatgagccatttgtccccatgctcccaaattacaatgatttaaattaaaaaacttttgaaggattttcctaaatatattcttttttaaaggactaactttgtgcattcatataacaacaatttggaataatgtgaaaaatggaggcacataatttgggtggaaagtggcgattaaaaatatatataagaaaattattagccatgtgtaacatatttaaataatgaccagaatatttcatgagtaccaactcttcccatagtaattttcctccaaaatgcaatagctcattccctcaactgcagacgctttgattttttttcaagttatagtgctgtagtgcttgtttatgtttaaaagtgcacattatgcagctcattttagtatgctacttctatgtttattttttgttcttctaataaaacgcataaacttcaaaaaaaaaaaaaaaaaa

SEQ ID NO: 320 - DNA, 504 bp, Homo Sapiens
  misc_feature (492)..(492): n is a, c, g or t.
  CR738732
tgaaattattagtgttggctcgttgcctgtgggtgtctggagaaaaccattggttccagttcctggaaacagaccaagccagtgcaaaggtttcttgatgtaagaacacagtgaatctggtcctgcaagtaggcagatgccctggactaccattatggtatgtggccttgtcatctggggtcttgaattagggttttcatctctctgggttcacctcgcacgctgcttggtctttagaataaagattgaggttatcaagacctagaaaaatgacttttctgaacttgaaatatttcctttgaatgctcaggagtcaatatacttttgttattcagaacacggattccaagttagatatactcaatttgaatctcacctgtcattgatagaattatccgtgtaactttgtgaaaaccacctaacttccctgtaccttagtttcattgtcaggaaaaactatggtaataattataactaccttgtattgttgtntcaaggattaaa

SEQ ID NO: 321 - DNA, 448 bp, Homo Sapiens
  misc_feature (113)..(113): n is a, c, g or t.
  misc_feature (128)..(128): n is a, c, g or t.
  misc_feature (196)..(196): n is a, c, g or t.
  misc_feature (239)..(239): n is a, c, g or t.
  misc_feature (431)..(431): n is a, c, g or t.
  misc_feature (433)..(433): n is a, c, g or t.
  CR739603
ttttttttttttttccaggacattattttattgcttgtcacatagtaaaggcatacaagacgttagctgctaataaaaagggaatgaaagttttaaagggtactgtctccagnaatgttctccatcanaaaaaattgtaacttgttctccacccagccccttgaactagtcccattgtatgctacctaaacaatgngttgttcaaggtcagtaaatgacatcctaactataattctacnaatttgaatttcttaaggtccaagaactctgctttgaagttcaggatctaggttaccagagctagacaacatcttgacctataattctaacaggtacttatcagatacatgaaaacaaatgccaactgagtataggagatctcattttctacataaaggaaacatatatggctaaaaatgtcttttgatggngnaaaaattttatgaat

SEQ ID NO: 322 - DNA, 592 bp, Homo Sapiens
  CR740121
agagcatccagataagaactcagtccactcaacatcttcagctttgtgatattccaggcatattgtgctgaacttctgacttacagaactactgtacgcattgggcaaactagtttctgcggttagcgctgtgcccacaaaggccttgtctccactcaagctaaaaaaaaaagaatccagaaagcctggaagatacttttccaagaatttattttctgtttagattctacccctgaaagtcagtcctgaaaggattataaaagcaagaaagaaacatggactctaagaattaacaacagtgtgggaagccacggaggagatttatgactaccctaaattggtttgtgtttggatggatgactatttcctgctctttattactagaaattggcagcaacatctcagattggataatggtactggtggaataattaccagaaagaaaaaaacatccccactaaagtgatgaaaacatgtacagattgtccaaccttttgcttttgtaccacttccccttccagatgtcagggttgtgatttatttctccctaagagtttaaaaataaaactctcatcataaaaaaaaaaaaaaa

SEQ ID NO: 323 - DNA, 666 bp, Homo Sapiens
  misc_feature (580)..(580): n is a, c, g or t.
  CR740207
aaaaaatatgcctttgttttatggaagagtccagagacaccatcattatactgtgtgtctttataaaacccatataccttattcttttgttttatctagctattatattgtctataacttacttttaaatattctagtatagacaggtgtgtgtgtgtgtgcgtgtgtgtgtattcttaatcctctataaggttgtagctaaaatttaaaatactttaactggacacacatcttttaggagtggttggtagtgtttgaaggactactataaggccttaatgatctttatctctagagagttctagaaggttccctaattagcctaataaataaaagaagttattttgcactggaaaattaaggagtgttggagatatgtgatttggctagtgctatttaaagacacccctgtccttgcataaatagggtttaggaatctagtaatcctggattacaaactttgtttggagtgatgcctaaaccaggtatgccaatctgtcttgtgtccacatactaacagagggttctagcaacttaatcccattagcatgttagctgaagactactgctagaatgctgntatgtttgtttagagttaatatttcatggaaatgtctgaaccctggtactgtattaaactcatagaaatggaaaaaaaaaaaaaaa

SEQ ID NO: 324 - DNA, 730 bp, Homo Sapiens
  misc_feature (728)..(728): n is a, c, g or t.
  CR743148
attttaacagcaatgagatgacatgagaatatcttcaattcatcaaggatctgtaaagaaggagaggtacaagatatatgaaacccaaatctcaaaacaatgatttagtgaatttcccatgaactttaaacagtgattgcttcaaaatttccaagagccatactctccctccagctgctgtgtgtgtgtgtgtgtataaatgcacactattttaacctaaaatggtgccctgtggctgccattctctaactcttgcatacttaaacatttattcttggtcaaattaaaacctcatgcatttccaaagatataaatgccttgcctggagaagttagatcttgcaagtctcaggagggccgagatggtttgtcttatgcctatagctgtttatgtcccaccagtgggtgtttgtttcattaggtgccgtttccagccaaatgttctcattcttcacatcttcaatgttgagtagcaaacagaagaacatccttcttagcataatattgcttcactggactgattgtgaactcaaaatacctcttgtttcttgtgaagggtttgccttttgtaaacaatataagatcacttttggtcaaccaccctgtctgaatttatctgggctgctataataaagtatcataaactgggaggcttgtaaataaatttatttcttacagttttggaaagctgggaaccccaaaatcaaggccaatttggtgtctggtgangg

SEQ ID NO: 325 - DNA, 491 bp, Homo Sapiens
  CR748318
ctttggaaccacattaaatcagggtagagactagaggtgataaacggttctttcaagatgggctttagaagaggtctgaaggagcctgtcagccaacacacacagaagatcttcatgctctccaggcagatggaaacgatgtaggcatcatttcagacgcaataatggacagtgaaagagggaaaaaaggagagttttagaccttgaacaattgtgggagctttgcagtcgctttcacgtcacatctggtatggagctaaagtcatcataggttagcagagctggcaactgggaagaaaacctagatttgaagtagagctgagcaagggagaacctgcaggagaaaatgaaacccataaagataaactggaacttgtatttgactcatacttctccagcctcaatgaccctgacttgaacagcccgaaagggactggcactcttcactgcaaagccattcgtgcacctggcccagaaaccaaaagaggaga

SEQ ID NO: 326 - DNA, 548 bp, Homo Sapiens
  CR978491
ggtgcgcgcagaggctgcgtggagagagggcaaccagcaacttggtgccaccctagagagcgctgcccgggccgccttccttcctgcccgcagccctgggaggtacgtactactggccccctttcaacggctgggaaaactgagacccagaaaggggaagggacttgctcagagtcatactgtgaatgtggacgaggaccagctctcaactccaaggtgcagccacccacgtcttaaccagagcaggaaggcgtcagtaacctcggtggcccaacctcagaacctgactctgctgtcaagggggaagataatcccaaaccccgacaagtagctggagaatcataactgacctccaaccaagtgtgactttgggcaaagcgctaacactctgagcctcagtttcaacgtctattaaatggggataattgtagttccgccttttagggaatccctgagaggatgaacctcagaaggcatttagcagaaagcctggctgattttgccatgcctccttattaaatgggatgcgctataaaaaaaaaaaaaaa

SEQ ID NO: 327 - DNA, 940 bp, Homo Sapiens
  misc_feature (25)..(25): n is a, c, g or t.
  misc_feature (30)..(30): n is a, c, g or t.
  misc_feature (914)..(914): n is a, c, g or t.
  misc_feature (939)..(940): n is a, c, g or t.
  CR992331
tccgggagaggattctccctactancatgnaaaaaaaaaaaaggtggagagactttgaaaacttttttctcgaaaagtctgaggaggcagaggacggcccggagtctcgtagcgcaccgccctggtcccacaccccccgcagccctaggaggatcggtgtgctgagcttgtggccaggagctccccgagccactttcgcgcgagcagcagaaaacctgagccgcggcccggcgagtgtccgcggcgctctggggaggagaggctgggaaggggctgcgagaggtacggaggagacaagcagcccgggagggagaatgaaccgggaggttcctgtactccccccgccaccccagatcctcgtgctactcgcaactgcggtctgaggggcagtggctttcccagagtgcacagagaaatgaaccagcgccggttttggtgttgggcgaggggtttccctcagctgagcacaaagtcaggctgtgtgtcccagattctggccaatggagaggtcgttgagggggtgggctgctgctgagtcctgagagattcaaaacgcctgggcagctcaggaatttccaaagggggagattctcggccaggagctgcggagcaactgcagctgcccagcaggagccggcacccttctctcacattctgcttgggagtcgactcagaggcctcgaatctcattactagcactttgcccacccttttcttttgcttagatgctacttaagaacgtgaggctgagaggcggacttggtcagatctgcctgcgtgacaagctcaggacaggacgcttctgcccttgcattactgttgtaaagtttccacccagtccctggtcgcactgcgttcccatcccggcagatgtgaactcaaaaacttcctccgctgtgcagtttcattggcanacacaccctgtacctgaatgactcnn

SEQ ID NO: 328 - DNA, 108 bp, Homo Sapiens
  D13080
gcccccagctggcagagggcaggattttgtactgtgatgtaccagggtgtggacacgggcaggagagcacttacttttgggagtggaacaagactccaagtgcaacca

SEQ ID NO: 329 - DNA, 562 bp, Homo Sapiens
  DA102929
gtcaagacttccccgtggccctatgtttaccatgcattcgattctcggtgtggtccgggcctttctcacctcatccatttcacctaccaagaaaggaaatgacattcatccgggctggggcactattgcgcaacaaaacaagccaacctgtaattaaggagaactgaacgctgatgctgagcccagcatcttggggaaagactgctgagagtttcgcttggctttggaattcatttatcagataacatgcgctggattgacctaaactgcaacatggcccttgtaattataccgtgcttttgctttggagcctgagggaaatgtggaaggcgctggagtctgagctctgggtcacctgaacgtcctgtgattatgcccggtctcacattcaaaaggagagatgggagtgtttgtattttacccacagcagcagactcagctctaggatatgtggggtgcatgtgtcttctgtctctcctggaactcagtatctgttcattcattcattgagtacctactgtgatcaaggcactggatggggcactatgacaatttctctttt

SEQ ID NO: 330 - DNA, 552 bp, Homo Sapiens
  DA188950
agatgtctggactgaattgagcttacacgacaattgcagtcaagattctgcaactcagaacgggcaaaccagcacctaagcatcaagggtggaaagggagactggaagtgcaagtctgaaaggagaaaaaagaaggtgaaaccagtctgcaggagaaatgactgggaatttagaaggagtgggcacccacaagagaagagaagacacgaagtgagaaaaggctgctgcttgccaaggcacttttaagaacgggacatcttatcacttttcagttgtttgagcttcttgctccccagactttcagctaaaattgtggctgttttgttggcggaaatcagtgaaaagaaaatgagttctgtgtctagttcagtttacagcagaggcaagacgatgcctgaagcaggtggcaaggagtgaaaggggagtgtgcatggaagcagcaggtcagagccagagtttatcatgaaagtctgagccctcgcaaacatggttcatgcacaacccataaaatttcatcaaactctcagtctcaaaaatttgtgtaggaagagc

SEQ ID NO: 331 - DNA, 542 bp, Homo Sapiens
  DA266249
acctcttcgaggccccgctgcgggcgtccagagctggggactgtgggtctgactcctgcgttccagccgtgggtgccacctcttgcgggaagcagggcaaaaccactttggtcaggcgctcctcgtgcctttctcccttcgtaggtgaccagcatctcgtaagaatgataaccatcagtaaccgggaccccaaaccttctcatcaaggcacctctcgggtcaccattactttaactttgaatttgggtctccttcatttttccgctggatgcgttaatgtgcgcgacccacagctccaggcggcggtttcctggcggaactggaccaccgccacaggctgggggtctgcagtgggggatgggaccggccgcggccgccggccccttccgcgtccactgagccggcgctggttcggcactgggatcctgcaccgggcctctctgcttggtgctgcgcgtctgcctgagagtaggaggttgctcccagctgtgccggccccagcagaaggctgctggtggtggtgctggggcaggtcggccttg

SEQ ID NO: 332 - DNA, 562 bp, Homo Sapiens
  DA371742
ctggctttgtagattggccctggttctgaccaggaatgtgggcaagtcacaatctttaggtacctctcttttcttatttgtgaaaatagggatcatacctgaacatctcaggaagctggggtcagaatcaaataagaccatatgtgaagatgccttgtaaaactttgtgtttatgactccccagatggttccaaatattccttacctcgtttggttcccaagtcacagagttgtagtttacagattataaaggaaaaaaaaaacagacaaaaacaaaaaaacctctactaccattaagtaaaattatccaaagtgtagaaataaagcaaaaaggtttgtcccatttaaagacatactagggcatggtctgcaaaaccacaaggttatttgactttctagaggggtgtgattttgtttgacatgctattattctgttagggcccagactctgggaaggtggataatgctgagtagaatatcagtaagttgcaaatgatttctgccctatagtagagacagctccaaaaattacagttttattgccctatttattaccaggcgt

SEQ ID NO: 333 - DNA, 536 bp, Homo Sapiens
  DA380412
atgtttgtttcattagaagtcaactaaaaaatatagaagaaatgacgaaggtaggaaatgaccatttgacagtcatcatcacaataattttattccagcaaggaaacatcggtggctgctaaaattactgatgaacatttaaggaaaagcaatatgcagtaccttacattgtctcaaagtagcttcttataagatacttattaatttcaaaaaataaaatagtgagtaactttacatttactgcatgatacaattcagctgagctgcctgccatgatatgaaaaagatctccattcctccagtttccaataacaagtttttttccactcatctgaaccttcacctggagtgcatttaattctgtatttctaccatcggtctcttcatgttgatgtaaatcttctctaagatgatcaacattttcttagagaaaatacataccatgctcctcacttccttttgtatacttatcagtcattaacatccatatctcttcagtcttgtcttagttggcacaggctgttacaacaaaatat

SEQ ID NO: 334 - DNA, 802 bp, Homo Sapiens
  misc_feature (599)..(601): n is a, c, g or t.
  misc_feature (782)..(782): n is a, c, g or t.
  misc_feature (792)..(792): n is a, c, g or t.
  misc_feature (795)..(795): n is a, c, g or t.
  DA572426
taggactttcacaacacaataaaccaactagatctaacaaccatatacagaacactctacccaacaatgaaatacacattcttctcaagtatacataggataaattccaagataggtcataaattaagtctgaattgattttaaaagacagcaaaatatcttccctgaccacaatgggatgaacttagaaatcaaaaacaaaaagaaaactggaaaatttaaaaatcatagaaattaacacactcttaaccattagatcaaaaaagaaaccacccggcattggttgaaaatcaccccccggctttggccatggcagcgggtgagattcggcgcccagagcctccaggggcctcagctcaccgcgcgctgacacatgtgcggcggcgaaacccagccccaacaggccccgcggcctctccctgggtgcggccgctcgcgtggtctggctcctgacccaggctgccgacccctaaccctgttttctctccacaggacactggtcttcccacacgtgagaccgatgtcgccaggaccacggggtcggggggactcggctgtcctccgtctttcaaataaagctgtttgtctaaaaaaaaaannnaaaaaagaaaccacaagacaaataataaaatacttataaagacaagtgaaaatgaaaacacagcataccaaaacttatgagacacaacaaaagcagtgccaaggggggaagtttctagctataaattcttacattaaaaaataagaagtctgggcttgaagaaagccaaattaaaaattantttaaaaaanttnggaaaaa

SEQ ID NO: 335 - DNA, 558 bp, Homo Sapiens
  DA608330
aaatcctactgctcctctccagcagtgtaggccttctcaagtctccctgcacatgggtaggtgggtaaagcttggctgatcggcagggggatgaggagatggtgaacatcacgttgggaatcaacagacctgtgttcacatgttaaaacttgtgtgaccttgcggcctctgagcaagttcctgtgcctgtttctttcaacgaggataactacttccacctgcctttgtaatttgttcctgggacaaagaaagcctcttgaggaggctggcctgccctgcatatgttggataaacgcttgaaatatggacctgtccccatctctcgcctttccccggaattcaggactgaatggatgctgcctgcattttggggagtgggagttttgcttttcctttgctttgctacttactcactctgatgaacaaggaggagactgacagcttcacagtcctggatcatttcctgccctgttctcccatccagctcatggaagtcagcaactccatccactcattgcacagagaccagaaaggggaagggattttctcactgtctca

SEQ ID NO: 336 - DNA, 601 bp, Homo Sapiens
  DA674107
aagttacttattcttcctcttctgccttctattgtcttcaactaccccaaaaaaatctcctggaaactactctctgaaagaagttggagaaaaattattaatgcacttgaagaagatcaagaaaaaagaaagctgtgagtaatgttttggctccattatagttttatgagagcaccatcacatatgcggttcgttgctgaccaaaacattgcctcatgctggagaagagtatccgagcatagttgctgcttcgagtcactccagggagatctaaaattccaggtgaaccatttgctgctatagtcaagatgaaaaggagtgaagaacagctaaataaaatcaagtataatggagggaatcaccaccaaaagagggaaaaaagaaagccctgagactcctttgtagaccaggttcctttctcacctcctggctgctgtgctgacccccaaggtcctgaggatgaggaggctgagcaagggacaaggccactggttgtcatctgtctgggcattgggtgtgacctcacaaggcaacttgcattcttaactctgtctcagcccctgagaaccctgagcttgttggataacccaacctgcaaaac

SEQ ID NO: 337 - DNA, 584 bp, Homo Sapiens
  DA675095
aaaataacactagcattttgacatatttggagctgctactgggccagctctgtttccaggcctgcctttcaatcttttccttgcttctggcatgagttaccatctcttttaagaaattggttatgcatttgaaaatacactgtagctatacatactttaaacatatcatttagcaaggatgctccttatcggaccgttgctgggaacagagaacacgacagttccaggttcctgccaattatagaggcagtcctatttcaaaatgccattaagcatccttctgagctgcggaaagtcataggaccagtcttcagccgtgcccattacagtagcagtgacagcacaccactttgctcatgatacggatcagggttaattttcaagttttggatggttctccctctttgagttaccatttgtttctgcttataacctactgatcatgcctttagtactaagtaaatattgaaaagggaaagccttaggtggcttgcgaaggctctgatgtaaatatgtgttgctgagacggggaagtgaaggtgttggattatgcatgactttcacatatgttcttataccacatt

SEQ ID NO: 338 - DNA, 826 bp, Homo Sapiens
  misc_feature (547)..(547): n is a, c, g or t.
  misc_feature (728)..(728): n is a, c, g or t.
  misc_feature (770)..(770): n is a, c, g or t.
  misc_feature (779)..(779): n is a, c, g or t.
  misc_feature (811)..(811): n is a, c, g or t.
  misc_feature (821)..(821): n is a, c, g or t.
  DA830074
gagaaatagaataacaaaaagtaatagcataggctttgaatttttgcagaaatcttcctgtacaaaacacctttaaaaataattttttgaatggtgtgaatccagtagtcccatttctctgacttagttttcttgagtgatttttatcaaggccaagtccccaaacaattccctaccagctctttagagtactgttcaatctggactaaaatggttttaagtttatggagagcttagtccacagaatatagggcggcgagtccagaaatgcttatacaatttttttttcataataagatatgtgctggcatcaagaaacttaaagtggaagcaaaaagacatccaactagttgctggtctctatcatcttatctgatggtatttctattttccttatataatactccattttagtaagaactcctagaaatttcaagagcatattgccaaaatataaagtatatttcatagtttcttctggctgaaccagtgaaattttattattgcatattaatgatatttgtaaaacttttataaaaattgtcanaattttaaatactcacattttaaaaatacttctttaatgactcttcctctaaatttcctggaaatacagataaaggattagctagatacaagatacagctaagtatttagacattttgaggctagtaatttttcattttattaaagggctaaaaaacaaattccaccaataaatcatcaancaaaaccgtacaaaaggtaattccccccctttggggaaggcncctttccgngaaaaaagggggacatggggtgggaaattgancaattgaaancttta

SEQ ID NO: 339 - DNA, 460 bp, Homo Sapiens
  misc_feature (378)..(378): n is a, c, g or t.
  DA853689
ggaagtggcccaccaccatcttgggagctctgtgagcaaggaccccccagtaacattttggcgaccacgaagggacctccaaagcgcctccatcagagagctccatccagacctagacttggacaataggcagttgtttgcttgcctctggctctgctcactctccatgggggtctatagctggtgatcatcttgtatacctaattctggcttcatcttcagactcgggcagaaccagagtcagacagtctgttcttctctgatggtgtcacatctggatagagtggctggagctgctgcatccagcttgctacaagcacaggggatggcagagctcagagatgggatgaccctgtgttcttgatggaatcaaccagncatgcggatcctgctatttctggactggctgttagacatctgactcatgaaaagaaaaatagaagtgaaaattgccattttt

SEQ ID NO: 340 - DNA, 595 bp, Homo Sapiens
  DB027866
atttatacttttcagcattggatttaaacctgtcatccttgacatttggggcagaaactgctgaaatgaaggaggacttgccatcaaagaactggctgaaaggagttagcacaccacctcctctgccctgaacagttctaagcaagaggaggagcctgtggcagggcgtgatatgaagtcctcagagatagagtgccaagagtagagggagtatcctggaacttcagtgtttgcagaaaaattcttctggggaataaagcatagagaaatgaagagctaagatacagaggagcttcccaagaccatgtttgaacatttgtaaacagccatgcctggacttctgagttaaacgagtcagtatatttcctttattgctcaaatcactttttgtgttgggtcctttttgaaaggtggccagatctgcccaatcatattatgctcctcaaggacacaccctgtgtgaggaataagcagggtttctaccaagtcaactgtcagagtgatttaccttccatgatatttctgaatgatggtagactcaagttaatgtgagttatgtgatgcctgtctgtcattggatgaagatctacactgg

SEQ ID NO: 341 - DNA, 571 bp, Homo Sapiens
  misc_feature (298)..(298): n is a, c, g or t.
  DB049595
gaactactagctacacctcaaagcgaaagaatttggagtgtttcaggagatctttatatattctggatctgggtcctttgttggaagagcagctatatgagcaacatctcatgactgaaatacatcccagcattatgtatgcagcaatattagatgatgctcctcctagagttgtatcccataggaggtagccaggcaatcagtaccctcagcaaatcagtgatgacggcatcaaaattccaatattcaaacagattttcaagacggctgactagaggcacccagcacttggtttctncataaagaagaaccaaaacaacgtccccaaatgcatttattggttttctgtaaggcagtcctggtgcctggatctgaaggcatggacctcatcctgagtccatggaccctgtcctgctactggggtccactgaggaagtcttggcatttgggttcacaaggcagatctggtgcctgtcactatggggacaggcctagagtctggatatatagagaactcctttatgttcttaaaaattattgaaaatccgaagcaagaagggaagtttagaga

SEQ ID NO: 342 - DNA, 575 bp, Homo Sapiens
  DB050272
acctctaaagctgcatgtttctccaagtcagtagtgccttcattttatgagggaaatgaaatcaatcatccctggataatcaagaattaggacagaattgctcctgacaaccctgacatggtaacaccaaaacagctcctccctgacacctggctaaatagtgaggggggtcagcctgggtctgtgtcccttggctggggaatatttcctgtgctatggggtcttggattcctgctcattcttcacaactgctttacccacactgctgtggccactgtctgccattggttactcccctccttcctctgtggaacggctgcctccactactgctgagctgtgaataagtcccaggtgtttgcccgcttgtttgtcttcatctaacctagactttaggttgcatgaaggcaaaagaggtgtctctcctattcatctttgtatacccagcaccagtaccaagcaggtgctcaataaatgattgttgactgatgagggaataactcaccataaattagcagcaagcagtcatgtatttttttctcacaataaaatgcacttttaaaaaaatcagcacca

SEQ ID NO: 343 - DNA, 582 bp, Homo Sapiens
  misc_feature (183)..(183): n is a, c, g or t.
  DB113199
gtcagatagtctctgagatcttaggaaccctgttttgttgtatatcctctgccctgatatgaagaaaagatgattcttactgtgggctttagctttttgtttttctacaggggcactgctgtgtgacaaagtaacccagagttccccggaccagacggtggcgagtggcagtgaggtggtacntgctctgcacttacgacactgtatattcaaatccagatttattctggtaccggataaggccagattattcctttcagtttgtcttttatggggataacagcagatcagaaggtgcagattttactcaaggacggttttctgtgaaacacattctgacccagaaagcctttcacttggtgatctctccagtaaggactgaagacagtgccacttactactgtgccttttccctccggacccccgtactggtcaccgataaactcatctttggaaaaggaacccgtgtgactgtggaaccaagaagtcagcctcataccaaaccatccgtttttgtcatgaaaaatggaacaaatgtcgcttgtctggtgaaggaattctaccccaaggatataagaataa

SEQ ID NO: 344 - DNA, 471 bp, Homo Sapiens
  DB148555
aagcatgcataggagtttcacatggctagatgcaatgaacctggagattttcccaagaatgagcctttcaatcatagagagactgaaagactgagactgcatttatttcagaaagtgattggtgcagaggtatgatgatatattttcagtgtgtctatcaagaaggtggtgttgaaatatctgtggcaatattggcaaggagtcagtctcttgctatttcacaatggccttaatcctagtgatggcaatttcttcttgcaacaaagaaagacagtgacaccaaaggagaaatattcaaagtgggatgaaaggggttgacattagaaaagacttcatggtgattggaaaaaaatggaaaaagattttgaaagcactccatcacagggcacactacaatcacaaacttcatgccttacacagtttcctttcctgtcatactaactgtgcttcttcaacatctcctgggaacca

SEQ ID NO: 345 - DNA, 563 bp, Homo Sapiens
  misc_feature (488)..(488): n is a, c, g or t.
  misc_feature (553)..(553): n is a, c, g or t.
  DB336898
gtatttaattcaacctgtttatttaacggacaggggaactgaggcccagaaacataaattaaatggccagtgctcacacagaaattaggaagaggattgaaggaggtgattttggagggctcctctaacccatgattcagtgattcttgtggttcttgctttctctccaagggttctttcccccaaactgcaaccatggtgtgaaccccattgaacatccgttgctgagtgcttccagaatatagagctctcctcagctcatgatcacaaccaagacccacctaatatgatgccagtttttcacctactgtgtattcccaatactattttaaaacactggttctcagtcttggtggcacaagagaattaccttaggaactgtaaacaaaaattctgatgctcagatcttacttcatatcaattgaatcagaatctttcgggatggggcctaagaattggtagttaaaagaaaaattcccagttgattncaatatacaatcaggatgggtaaaatagttttaaaactgctaagtttggctttagtcatgactantggtaatatt

SEQ ID NO: 346 - DNA, 527 bp, Homo Sapiens
  DB337375
agctgtgggaggtttcaggtgctttcattttcaaaagaagtcaagcacatattatgcttggaacaagcctagctttctaatgaaaagagactgcaactgaatcatcaaacaaatataaacaaatagatcaataaatgtgcatgcatacacgtgttcacagaggacaatttgaaggtgaaacatgaaatgagagcgcgcacggaggtgccagccatgagatgtgcagaggccaagagcgcagggccagggtcaggaggatgtgcagtggagccgggtaaatgttactgccgcgccctaagaaacggggaggggagggggcaggtctggaaccacctaggaggcagatttggctgatttgtttcaggaatcctttctgccttgtgatttaggagttaacgtttccttctcctctttctgctcctccttcctccaataaagtgcgtgaccttcatcagtgcacacacaggtggcactggctcagggcccatcgagggccagtgtcctgggccctgccagggcatgtctgt

SEQ ID NO: 347 - DNA, 601 bp, Homo Sapiens
  DN997246
gcacgaggcgccagcggccttgaaggggtggtggtcgacgggcaagtagagaccgagaggttctggaggggcgaccggcctggcacagaggggaaggaagagagcgggatgctaagtgccgtctggggagccggagggcccggggcgggcggggctgctcgaggacagccgagcagaaaagagttgctgctgaggtaccacctttggagccgccctcgctgcctgtccttcccgctgggctcactccccgcgtctctcctggggcttcctggagccacttcccacaggagctgcttgtccccaaatcttgcctcaggacttgctgccaggggaacgcagactcagagcgtcctctttggagaagtaaggctgcctctggacggaggagtgaggggggcgaggaaacgcagaaaatgaaagcacaaccagtaccttctcaggagcgtggggaggccaaccacccgggcagagcaaggagagaatgaggagtgacatgggtgttgccgtgagtggcgaaggggatggaagatttcagcacgatgctatttctaacaagtttcagcattccagtatctcttttcacaaataaaacatttactaa

SEQ ID NO: 348 - DNA, 813 bp, Homo Sapiens
  DQ286431
atgaaatccttgagagttttactagtgatcctgtggcttcagttgagctgggtttggagccaacagaaggaggtggagcagaattctggacccctcagtgttccagagggagccattgcctctctcaactgcacttacagtgaccgaggttcccagtccttcttctggtacagacaatattctgggaaaagccctgagttgataatgtccatatactccaatggtgacaaagaagatggaaggtttacagcacagctcaataaagccagccagtatgtttctctgctcatcagagactcccagcccagtgattcagccacctacctctgtgccgtgaacgatgccagactcatgtttggagatggaactcagctggtggtgaagcccaatatccagaaccctgaccctgccgtgtaccagctgagagactctaaatccagtgacaagtctgtctgcctattcaccgattttgattctcaaacaaatgtgtcacaaagtaaggattctgatgtgtatatcacagacaaaactgtgctagacatgaggtctatggacttcaagagcaacagtgctgtggcctggagcaacaaatctgactttgcatgtgcaaacgccttcaacaacagcattattccagaagacaccttcttccccagcccagaaagttcctgtgatgtcaagctggtcgagaaaagctttgaaacagatacgaacctaaactttcaaaacctgtcagtgattgggttccgaatcctcctcctgaaagtggccgggtttaatctgctcatgacgctgcggctgtggtccagctga

SEQ ID NO: 349 - DNA, 243 bp, Homo Sapiens
  DR731427
aacagaggcaaagatatacaaaccaaaagcggaagaacttctttctcctctggatgtctgggagtaaccaggtaggtcaactcaagccagatgacaagtggagagaggtgacaagaggtgtgttggacagctcggagaggactgaagcatccaacctccttccaaagctacctgtactgatgcagccatacacttgcccttgggcaagagaagttcattacagcctgctccacaaaaagggga

SEQ ID NO: 350 - DNA, 206 bp, Homo Sapiens
  DR977977
catgctaatgcggggaaactcccagtaggcgctgctgtccagggaaaatgatgggctttttcctctctccagttttggttaatgagaaaagaaagattagaaacttcaagtaggactgtgaacaggcttagggatcctggacagagcctagaaatctcaggagaactgagagctcttgaaatatgaagtgatgcttaaaaaaaaaa

SEQ ID NO: 351 - DNA, 513 bp, Homo Sapiens
  M64350
ttcaaatgcacacatctactttccaaatagaccgcaactatttctattgatctggaagaagcttgtaccaggcaacccatttaggagaagttggatgaagagggagagggagatgctactcatcacatcaatgttggtcttatggatgcaattgtcacaggtgaatggacaacaggtaatgcaaattcctcagtaccagcatgtacaagaaggagaggacttcaccacgtactgcaattcctcaactactttaagcaatatacagtggtataagcaaaggcctggtggacatcccgtttttttgatacagttagtgaagagtggagaagtgaagaagcagaaaagactgacatttcagtttggagaagcaaaaaagaacagctccctgcacatcacagccacccagactacagatgtaggaacctacttctgtgcaggggaccctggcaacaaccgtaagctgatttggggattgggaacaagcctggcagtaaatccgaatatccagaaccc

SEQ ID NO: 352 - DNA, 485 bp, Homo Sapiens
  M97723
gaaggaaagatgaacttgagtttcacttcttagtgccttttctcaggggagaggccatcacttgaagatgctgagtcttctgctccttctcctgggactaggctctgtgttcagtgctgtcatctctcaaaagccaagcagggatatctgtcaacgtggaacctccctgacgatccagtgtcaagtcgatagccaagtcaccatgatgttctggtaccgtcagcaacctggacagagcctgacactgatcgcaactgcaaatcagggctctgaggccacatatgagagtggatttgtcattgacaagtttcccatcagccgcccaaacctaacattctcaactctgactgtgagcaacatgagccctgaagacagcagcatatatctctgcagcgttgaagatagggacagagtctacaatgagcagttcttcgggccagggacacggctcaccgtgctagaggacctgaaaaacgtgttcccac

SEQ ID NO: 353 - DNA, 457 bp, Homo Sapiens
  misc_feature (49)..(49): n is a, c, g or t.
  misc_feature (51)..(51): n is a, c, g or t.
  misc_feature (53)..(53): n is a, c, g or t.
  N29049
cttagatcttaagccactgctgatcttcttagaaccacacaccgcagcntntnccctgtggaaactgcaaatgtttactctgtcttccacctttgaatgacttagaacatgttgtggctaaggttcattcgttatcaacattcagaaactgccatttccttttctacctgcaaagcctaataataactttttaaactattgcttcctttgcatattcaccatacatcctgctttcagatgtggaatctaaaaccttgctgagaaactgcctccaatgttgctcccttaactttcactgtggaaaactctgaaggaagttggccgcaccatttaatggaagcatgaggaactagtctctttcctttagatatgtatgaaaatggctccactgtgactcagcagatggctccactgtgactcagcagatctccaggattttcctgtgtagtttctgttt

SEQ ID NO: 354 - DNA, 497 bp, Homo Sapiens
  misc_feature (394)..(394): n is a, c, g or t.
  misc_feature (455)..(455): n is a, c, g or t.
  N79179
taaagaacaacaatctttaggtcatgcagacctccctgatggcatccagaagtttcaccgaggggtgcagacagtgttgatcattggggatgtcacctcccggatacccacctcactcatgaaagcccccagttatgtgagagttcaagtcagtcggttgtgagagttcaggtctcccgccttcttgctttggccaaattgaatgtatctttctctgctcctaagcgctgatgtgtcaatgtttgccttactgtgaatcgggtacacggacctaaatactggggttctacaatgctgagacctgccgccacctgcttcttaaagcaggttgatccagcactgtattagggggttatgggcaacattatttgaattttttatggtacataaaagncaatatggtttagggtggggttccggtcctggttttttgaccttatataacactggtgganttctaaaagagagaggaataaaagaaggctgaatggaaagaa

SEQ ID NO: 355 - DNA, 1566 bp, Homo Sapiens
  NM_000022
ggcccgttaagaagagcgtggccggccgcggccaccgctggccccagggaaagccgagcggccaccgagccggcagagacccaccgagcggcggcggagggagcagcgccggggcgcacgagggcaccatggcccagacgcccgccttcgacaagcccaaagtagaactgcatgtccacctagacggatccatcaagcctgaaaccatcttatactatggcaggaggagagggatcgccctcccagctaacacagcagaggggctgctgaacgtcattggcatggacaagccgctcacccttccagacttcctggccaagtttgactactacatgcctgctatcgcgggctgccgggaggctatcaaaaggatcgcctatgagtttgtagagatgaaggccaaagagggcgtggtgtatgtggaggtgcggtacagtccgcacctgctggccaactccaaagtggagccaatcccctggaaccaggctgaaggggacctcaccccagacgaggtggtggccctagtgggccagggcctgcaggagggggagcgagacttcggggtcaaggcccggtccatcctgtgctgcatgcgccaccagcccaactggtcccccaaggtggtggagctgtgtaagaagtaccagcagcagaccgtggtagccattgacctggctggagatgagaccatcccaggaagcagcctcttgcctggacatgtccaggcctaccaggaggctgtgaagagcggcattcaccgtactgtccacgccggggaggtgggctcggccgaagtagtaaaagaggctgtggacatactcaagacagagcggctgggacacggctaccacaccctggaagaccaggccctttataacaggctgcggcaggaaaacatgcacttcgagatctgcccctggtccagctacctcactggtgcctggaagccggacacggagcatgcagtcattcggctcaaaaatgaccaggctaactactcgctcaacacagatgacccgctcatcttcaagtccaccctggacactgattaccagatgaccaaacgggacatgggctttactgaagaggagtttaaaaggctgaacatcaatgcggccaaatctagtttcctcccagaagatgaaaagagggagcttctcgacctgctctataaagcctatgggatgccaccttcagcctctgcagggcagaacctctgaagacgccactcctccaagccttcaccctgtggagtcaccccaactctgtggggctgagcaacatttttacatttattccttccaagaagaccatgatctcaatagtcagttactgatgctcctgaaccctatgtgtccatttctgcacacacgtatacctcggcatggccgcgtcacttctctgattatgtgccctggccagggaccagcgcccttgcacatgggcatggttgaatctgaaaccctccttctgtggcaacttgtactgaaaatctggtgctcaataaagaagcccatggctggtggcatgcaaaaaaaaaaaaaaaaaaaaaaaaaaaaaaaaaaa

SEQ ID NO: 356 - DNA, 2058 bp, Homo Sapiens
  NM_000024
gcacataacgggcagaacgcactgcgaagcggcttcttcagagcacgggctggaactggcaggcaccgcgagcccctagcacccgacaagctgagtgtgcaggacgagtccccaccacacccacaccacagccgctgaatgaggcttccaggcgtccgctcgcggcccgcagagccccgccgtgggtccgcccgctgaggcgcccccagccagtgcgctcacctgccagactgcgcgccatggggcaacccgggaacggcagcgccttcttgctggcacccaatagaagccatgcgccggaccacgacgtcacgcagcaaagggacgaggtgtgggtggtgggcatgggcatcgtcatgtctctcatcgtcctggccatcgtgtttggcaatgtgctggtcatcacagccattgccaagttcgagcgtctgcagacggtcaccaactacttcatcacttcactggcctgtgctgatctggtcatgggcctggcagtggtgccctttggggccgcccatattcttatgaaaatgtggacttttggcaacttctggtgcgagttttggacttccattgatgtgctgtgcgtcacggccagcattgagaccctgtgcgtgatcgcagtggatcgctactttgccattacttcacctttcaagtaccagagcctgctgaccaagaataaggcccgggtgatcattctgatggtgtggattgtgtcaggccttacctccttcttgcccattcagatgcactggtaccgggccacccaccaggaagccatcaactgctatgccaatgagacctgctgtgacttcttcacgaaccaagcctatgccattgcctcttccatcgtgtccttctacgttcccctggtgatcatggtcttcgtctactccagggtctttcaggaggccaaaaggcagctccagaagattgacaaatctgagggccgcttccatgtccagaaccttagccaggtggagcaggatgggcggacggggcatggactccgcagatcttccaagttctgcttgaaggagcacaaagccctcaagacgttaggcatcatcatgggcactttcaccctctgctggctgcccttcttcatcgttaacattgtgcatgtgatccaggataacctcatccgtaaggaagtttacatcctcctaaattggataggctatgtcaattctggtttcaatccccttatctactgccggagcccagatttcaggattgccttccaggagcttctgtgcctgcgcaggtcttctttgaaggcctatgggaatggctactccagcaacggcaacacaggggagcagagtggatatcacgtggaacaggagaaagaaaataaactgctgtgtgaagacctcccaggcacggaagactttgtgggccatcaaggtactgtgcctagcgataacattgattcacaagggaggaattgtagtacaaatgactcactgctgtaaagcagtttttctacttttaaagacccccccccccaacagaacactaaacagactatttaacttgagggtaataaacttagaataaaattgtaaaattgtatagagatatgcagaaggaagggcatccttctgccttttttatttttttaagctgtaaaaagagagaaaacttatttgagtgattatttgttatttgtacagttcagttcctctttgcatggaatttgtaagtttatgtctaaagagctttagtcctagaggacctgagtctgctatattttcatgacttttccatgtatctacctcactattcaagtattaggggtaatatattgctgctggtaatttgtatctgaaggagattttccttcctacacccttggacttgaggattttgagtatctcggacctttcagctgtgaacatggactcttcccccactcctcttatttgctcacacggggtattttaggcagggatttgaggagcagcttcagttgttttcccgagcaaagtctaaagtttacagtaaataaattgtttgaccatgccttcattgcaaaaaaaaaaaaaaaaa

SEQ ID NO: 357 - DNA, 1565 bp, Homo Sapiens
  NM_000026
aggtttccgcttccgctcttccctggtccagtccaccctggcggggtcgcagggttgggatggcggctggaggcgatcatggttcgcccgacagctaccgctcacctcttgcctcccgctatgccagcccggagatgtgcttcgtgtttagcgacaggtataaattccggacatggcggcagctgtggctgtggctggcggaggccgagcagacattgggtttgcctatcacagatgaacaaatccaggagatgaaatcaaacctggagaacatcgacttcaagatggcagctgaggaagagaaacgtttacgacatgatgtgatggctcacgtgcacacatttggccactgctgtccaaaagctgcaggcattattcaccttggtgctacttcttgctatgttggagacaatactgacttgattattcttagaaatgcacttgacctgcttttgccaaagcttgccagagtgatctctcggcttgccgactttgctaaggaacgagccagtctacccacattaggtttcacacatttccagcctgcacagctgaccacagttgggaaacgttgctgtctttggattcaggatctttgcatggatctccagaacttgaagcgtgtccgagatgacctgcgcttccggggagtaaagggtaccactggcactcaggccagtttcctgcagctctttgagggagatgaccataaggtagagcagcttgacaagatggtgacagaaaaggcaggatttaagagagctttcatcatcacagggcagacatatacacgaaaagtggatattgaagtactgtctgtgctggctagcttgggggcatcagtgcacaagatttgcaccgacatacgcctcctggcaaacctcaaggagatggaggaaccctttgaaaaacagcagattggctcaagtgcgatgccatataagcggaatcccatgcgttcagaacgttgctgcagtcttgcccgccacctgatgacccttgtcatggacccgctacagacagcatctgtccagtggtttgaacgcacactggatgatagtgccaaccgacggatctgtttggccgaggcatttcttaccgcagatactatattgaatacgctgcagaacatttctgaaggattggtcgtgtaccccaaagtaattgaacggcgcattcggcaagagctgcctttcatggccacagagaacatcatcatggccatggtcaaagctggaggtagccgccaggattgccatgagaaaatcagagtgctttctcagcaggcagcttctgtggttaagcaggaagggggtgacaatgacctcatagagcgtatccaggttgatgcctacttcagtcccattcactcccagttggatcatttactggatccttcttctttcactggtcgtgcctcccagcaggtgcagagattcttagaagaggaggtgtatcccctgttaaaaccatatgaaagcgtgatgaaggtgaaagcagaattatgtctgtagagttggaagagaattaaacgaaaatcattgttaattgctgaggcatgaaaa

SEQ ID NO: 358 - DNA, 2426 bp, Homo Sapiens
  NM_000035
atctgtcttatttggcagctgctgcctcacccacagcttttgatatctaggaggactcttctctcccaaactacctgtcaccatggcccaccgatttccagccctcacccaggagcagaagaaggagctctcagaaattgcccagagcattgttgccaatggaaaggggatcctggctgcagatgaatctgtaggtaccatggggaaccgcctgcagaggatcaaggtggaaaacactgaagagaaccgccggcagttccgagaaatcctcttctctgtggacagttccatcaaccagagcatcgggggtgtgatccttttccacgagaccctctaccagaaggacagccagggaaagctgttcagaaacatcctcaaggaaaaggggatcgtggtgggaatcaagttagaccaaggaggtgctcctcttgcaggaacaaacaaagaaaccaccattcaagggcttgatggcctctcagagcgctgtgctcagtacaagaaagatggtgttgactttgggaagtggcgtgctgtgctgaggattgccgaccagtgtccatccagcctcgctatccaggaaaacgccaacgccctggctcgctacgccagcatctgtcagcagaatggactggtacctattgttgaaccagaggtaattcctgatggagaccatgacctggaacactgccagtatgttactgagaaggtcctggctgctgtctacaaggccctgaatgaccatcatgtttacctggagggcaccctgctaaagcccaacatggtgactgctggacatgcctgcaccaagaagtatactccagaacaagtagctatggccaccgtaacagctctccaccgtactgttcctgcagctgttcctggcatctgctttttgtctggtggcatgagtgaagaggatgccactctcaacctcaatgctatcaacctttgccctctaccaaagccctggaaactaagtttctcttatggacgggccctgcaggccagtgcactggctgcctggggtggcaaggctgcaaacaaggaggcaacccaggaggcttttatgaagcgggccatggctaactgccaggcggccaaaggacagtatgttcacacgggttcttctggggctgcttccacccagtcgctcttcacagcctgctatacctactagggtccaatgcccgccagcctagctccagtgcttctagtaggagggctgaaagggagcaacttttcctccaatcctggaaattcgacacaattagatttgaactgctggaaatacaacacatgttaaatcttaagtacaagggggaaaaaataaatcagttattgaaacataaaaatgaataccaaggacctgatcaaatttcacacagcagtttccttgcaacactttcagctccccatgctccagaatacccacccaagaaaataataggctttaaaacaatatcggctcctcatccaaagaacaactgctgattgaaacacctcattagctgagtgtagagaagtgcatcttatgaaacagtcttagcagtggtaggttgggaaggagatagctgcaaccaaaaaagaaataaatattctataaaccttcagctgctatcgggtttcacttttctgctcttgctgtccaaagactcagtgtatttcattacttttgactctactagacatgactgggtttcaacagtaaaggtcttcaactcttgctagtcattggaatcaagccgcaaaattttaaaaactgagatgctcaggccacaccccagctcaattaaatcagaaaccctagacttgggatcctctaactattagatttcttaaagctccctcagtaattccaatgtacagtcaagtttgagaactaccaatctaaatttcaagtttgagggtatttgaaaattaaagccattcacaatacgaagccagctaaaaatgtagaatgattttgagcaacttgtggagtataataagagaattaatgtgacttcaatgcttggagcattcttgttcaagtggcccaggtttggtgaaacaggactaccttgtcatctgcacgtccaggcatatttcgtagttttgcagtaaataatattcacataatgatactgtattgactttcaattttcagaattaacctatagttacagcacttaagacaaccagagttataaaagagaatttaaatattataactttggacaatataaaagtgatgatttaactgacagaagctaggaaatataagggggaggagaagtggaagaaagcaaagagagtcaggaatactacttaaaactgatgggttaagaaatagtgctttaattctatttaagtaataaaagaaatggatgtaaatcataaaaatatatatctaaaattaaaatattgatggtagtatgctaaatttc

SEQ ID NO: 359 - DNA, 1447 bp, Homo Sapiens
  NM_000045
tgtcactgagggttgactgactggagagctcaagtgcagcaaagagaagtgtcagagcatgagcgccaagtccagaaccatagggattattggagctcctttctcaaagggacagccacgaggaggggtggaagaaggccctacagtattgagaaaggctggtctgcttgagaaacttaaagaacaagagtgtgatgtgaaggattatggggacctgccctttgctgacatccctaatgacagtccctttcaaattgtgaagaatccaaggtctgtgggaaaagcaagcgagcagctggctggcaaggtggcagaagtcaagaagaacggaagaatcagcctggtgctgggcggagaccacagtttggcaattggaagcatctctggccatgccagggtccaccctgatcttggagtcatctgggtggatgctcacactgatatcaacactccactgacaaccacaagtggaaacttgcatggacaacctgtatctttcctcctgaaggaactaaaaggaaagattcccgatgtgccaggattctcctgggtgactccctgtatatctgccaaggatattgtgtatattggcttgagagacgtggaccctggggaacactacattttgaaaactctaggcattaaatacttttcaatgactgaagtggacagactaggaattggcaaggtgatggaagaaacactcagctatctactaggaagaaagaaaaggccaattcatctaagttttgatgttgacggactggacccatctttcacaccagctactggcacaccagtcgtgggaggtctgacatacagagaaggtctctacatcacagaagaaatctacaaaacagggctactctcaggattagatataatggaagtgaacccatccctggggaagacaccagaagaagtaactcgaacagtgaacacagcagttgcaataaccttggcttgtttcggacttgctcgggagggtaatcacaagcctattgactaccttaacccacctaagtaaatgtggaaacatccgatataaatctcatagttaatggcataattagaaagctaatcattttcttaagcatagagttatccttctaaagacttgttctttcagaaaaatgtttttccaattagtataaactctacaaattccctcttggtgtaaaattcaagatgtggaaattctaacttttttgaaatttaaaagcttatattttctaacttggcaaaagacttatccttagaaagagaagtgtacattgatttccaattaaaaatttgctggcattaaaaataagcacacttacataagcccccatacatagagtgggactcttggaatcaggagacaaagctaccacatgtggaaaggtactatgtgtccatgtcattcaaaaaatgtgattttttataataaactctttataacaag

SEQ ID NO: 360 - DNA, 6076 bp, Homo Sapiens
  NM_000046
aaaagtgaatacatgattttatttaactcattaataaggaaattggtaaggtgttaaaaccaattcaaaggacaatccaaagaacagatcaggaatactaaaataaatatgcaagcggaggtgaaactgttttccttggtagtggtggaggggaaggattgctactccgctggataaagttcatttgtgtatatataaataagaattattttccattgttatttatctataacttataaagttgtaaacaacttccacggaatcagactcaacctggaagggtatggtctctaggcaatgcaaaaattttcccctacacctgttaacaactataatatctccagacagagtagacagaaagtctggatggcaacgggaatctactggtcatacggctaacttcctaattcaataagcacgtgactaaaggattttttccttccactcagatatttcaggctaactagatactgtgtgcttcttagtgtcactgcttagtgggggagccagctctgagtggggtcatatccggacaagcgaatgagctatttattcaatgaccacgcaacactccaaatcctcccagggcaacttgaaagtaaccgcaccttccaaagggcaccgtgcaatcagactgtgtgtttggcctcctgtttgctagtggggaggaagcggcttcatgggtgtacactacgcataaatgaatgtgaaaggctatttagacctctgccttttcaccgtcctcccacctgccacaggctgggctcttgtgctagaaatgacttgctagctagacatcatggttcaggatctgagtcagaggtttaaccatttataagcttttttcttatgaaaaattggcactaattataatgtctaactgtcagagttgttgcaggctttacaggagacgcgggctgtgaagatgctttgtaaattgtgaagcgttattaaagaacacatcttttttttttaggaaaccacagtgcaaatttaattgccggggaagataacgggccttggtgccctccaagcgtcagctgagtttccaagaagccgggcagcgggcgcccgcgggttcgtctctggctcctcctccgccacagcagccgggggcccgggtcggaggcggcgggggccgagcgcccggcctcgcaagcccacggcccgctgggggtgccgtcccgcgccggggcggagcaggccccggcagcccagttcctcattctatcagcggtacaaggggctggtggcgccacaggcgctgggaccgcgggcggacaaggatgggtccgcgcggcgcggcgagcttgccccgaggccccggacctcggcggctgctcctccccgtcgtcctcccgctgctgctgctgctgttgttggcgccgccgggctcgggcgccggggccagccggccgccccacctggtcttcttgctggcagacgacctaggctggaacgacgtcggcttccacggctcccgcatccgcacgccgcacctggacgcgctggcggccggcggggtgctcctggacaactactacacgcagccgctgtgcacgccgtcgcggagccagctgctcactggccgctaccagatccgtacaggtttacagcaccaaataatctggccctgtcagcccagctgtgttcctctggatgaaaaactcctgccccagctcctaaaagaagcaggttatactacccatatggtcggaaaatggcacctgggaatgtaccggaaagaatgccttccaacccgccgaggatttgatacctactttggatatctcctgggtagtgaagattattattcccatgaacgctgtacattaattgacgctctgaatgtcacacgatgtgctcttgattttcgagatggcgaagaagttgcaacaggatataaaaatatgtattcaacaaacatattcaccaaaagggctatagccctcataactaaccatccaccagagaagcctctgtttctctaccttgctctccagtctgtgcatgagccccttcaggtccctgaggaatacttgaagccatatgactttatccaagacaagaacaggcatcactatgcaggaatggtgtcccttatggatgaagcagtaggaaatgtcactgcagctttaaaaagcagtgggctctggaacaacacggtgttcatcttttctacagataacggagggcagactttggcagggggtaataactggccccttcgaggaagaaaatggagcctgtgggaaggaggcgtccgaggggtgggctttgtggcaagccccttgctgaagcagaagggcgtgaagaaccgggagctcatccacatctctgactggctgccaacactcgtgaagctggccaggggacacaccaatggcacaaagcctctggatggcttcgacgtgtggaaaaccatcagtgaaggaagcccatcccccagaattgagctgctgcataatattgacccgaacttcgtggactcttcaccgtgtcccaggaacagcatggctccagcaaaggatgactcttctcttccagaatattcagcctttaacacatctgtccatgctgcaattagacatggaaattggaaactcctcacgggctacccaggctgtggttactggttccctccaccgtctcaatacaatgtttctgagataccctcatcagacccaccaaccaagaccctctggctctttgatattgatcgggaccctgaagaaagacatgacctgtccagagaatatcctcacatcgtcacaaagctcctgtcccgcctacagttctaccataaacactcagtccccgtgtacttccctgcacaggacccccgctgtgatcccaaggccactggggtgtggggcccttggatgtaggatttcagggaggctagaaaacctttcaattggaagttggacctcaggccttttctcacgactcttgtctcatttgttatcccaacctgggttcacttggcccttctcttgctcttaaaccacaccgaggtgtctaatttcaacccctaatgcatttaagaagctgataaaatctgcaacactcctgctgttggctggagcatgtgtctagaggtgggggtggctgggtttatccccctttcctaagccttgggacagctgggaacttaacttgaaataggaagttctcactgaatcctggaggctggaacagctggctcttttagactcacaagtcagacgttcgattcccctctgccaatagccagttttattggagtgaatcacatttcttacgcaaatgaagggagcagacagtgattaatggttctgttggccaaggcttctccctgtcggtgaaggatcatgttcaggcactccaagtgaaccacccctcttggttcaccccttactcacttatctcatcacagagcataaggcccattttgttgttcaggtcaacagcaaaatgcctgcaccatgactgtggcttttaaaataaagaaatgtgtttttatcgtaatttatttccccccagccattgctcactctgtctagacttcctgccacttccaattcttctgtggcttttcctgcctttccttttgacctcagtagtcctatccctgggaaggccactttgcttctctacctgagcacccctgatttctggaacgctgctgagccctgccttacttttgcccctagggctgaagctagaggcctccccgtaataggcggtggagttgctctgtgaggatgttcatggtagacactaagagggctgggtgggagatgcttggctctgtggcatctgttcagcgaggcttttcctatattgcatggagttagtcattgtgattgtagctttatttcataatatattaagacttgcactgctatttactagcagtgagaagaaacctcaggaaaggatatgaaaaagcaagtggccagtgtctgggatactgggccttggtaaagcagaggagggcacacccacagtcctcttattctctgttttactgcttgttttgaggttctggggtctggcaaagaggatgcagtttgacacctgcagccctttctcaatcccactaatgtcttactaatgtggaacagtccatattagctccagagagtgtcaaacccagagaaatgtgtgcaaaaatgatactcttttctgcattagccccaccattgtgttcaccaatgcttggaacactgcctgaaggcactcattttttaatttttattttatttttaattttttatatctttatgagacgatctcactctgtcaccaggttggagtacagtggtacaatcacaactcaccgtagcctcaaactcctgggctcaagtgattctcccacctcaggcacccaaatagctggaactacaggcatataccgccacacccagctaattttattttttgaaaagacaaggttccctatgttgcccagctggtcttaaactcctgggctccagcaattatcccagcttgggctccaaaagtgctgggattacaggcatgagtcaccatgcctggcctcattttttaaaacaaatgaataaatggacaaatgagtaaatgagaaagtctcacaccatgaaagatgctagtccaatgagctgaatacagaggtaatataaatgtcttccagctgttgcttttctgttctcaagctgcccctcctggggtaggagcataatctacatcactgggcagtcacaggacactctatagcaaggttgtagcgtcctctccagtggggggagaaaaggaactgtgcctaccaaaggtactctcttgtcagcaatttccatttctatactttatgggacactagaaactaaaagcaacaaataatctgatataagtccttgtatagtcatccttcaattcagtagcaatattttctggtcactactaacctgtattgtattaaaatgagactattggaaggaaatggtgctaaaactaataacatctcttaccaacctttacccaactcctgggttggcaaacagctgaccaaactgccatcacctcccacttggaagtgtatggccgacagcatgaaatagctgagcccagatgttccttctgcatcctccgaatcccagggctgggtgtaggtagccgttggaggccatcgctacagggcacctatctgttatcgctgctgtcctcccaacagctgtctccagttctagttccttggttttcaggcacagtgggggatgttctgcacccagtggacttcaaaagagttttgaagacttaattttttgtaaaacaagtacttgagattttggtttatccataatagaatgtatttcattagattctctgattctatataagaatgtgaaaagattgatatattgttgttagaaataatgttatttctttccaattttttttttttttttttttgagatggagtctcgctctgtcacccaggctggagtgcagtggtgtgatctcggctcactgcagcctctaactcccaggttcaagctattctcctgcctcagcctcccaagtagctggattacaggcatacaccaccacgcctggctatgttttgtatttttcgtagagatagggtttcaccatgttggccaggctggtctcaaactcctgacctcaagtgatccacccacttcagcttcccaaagcactgggattacaggtgtgagccactgtgcccggcaaatttttttacctttacagaaggttttgcttatttaattgtgagctcatttttctttgttacttttgtccccccagatttgggggacaaaataaaattaatcttttaaaatgtgtcagccatatgtatggggcttccatttggggtgaggagaaagttctggaactagatagtggtcatggttatacaacatcataaatgcaattactgccactgaattgtatgttttaaagtggttaaaatgttaagttttatgttttattacaatttttaaatgtgtcaaccaactttatagtacataaattatatctcagtaaagctgttaaataaataaatatagtaaaaattttagaactaaaaaaa

SEQ ID NO: 361 - DNA, 13147 bp, Homo Sapiens
  NM_000051
ccggagcccgagccgaagggcgagccgcaaacgctaagtcgctggccattggtggacatggcgcaggcgcgtttgctccgacgggccgaatgttttggggcagtgttttgagcgcggagaccgcgtgatactggatgcgcatgggcataccgtgctctgcggctgcttggcgttgcttcttcctccagaagtgggcgctgggcagtcacgcagggtttgaaccggaagcgggagtaggtagctgcgtggctaacggagaaaagaagccgtggccgcgggaggaggcgagaggagtcgggatctgcgctgcagccaccgccgcggttgatactactttgaccttccgagtgcagtgacagtgatgtgtgttctgaaattgtgaaccatgagtctagtacttaatgatctgcttatctgctgccgtcaactagaacatgatagagctacagaacgaaagaaagaagttgagaaatttaagcgcctgattcgagatcctgaaacaattaaacatctagatcggcattcagattccaaacaaggaaaatatttgaattgggatgctgtttttagatttttacagaaatatattcagaaagaaacagaatgtctgagaatagcaaaaccaaatgtatcagcctcaacacaagcctccaggcagaaaaagatgcaggaaatcagtagtttggtcaaatacttcatcaaatgtgcaaacagaagagcacctaggctaaaatgtcaagaactcttaaattatatcatggatacagtgaaagattcatctaatggtgctatttacggagctgattgtagcaacatactactcaaagacattctttctgtgagaaaatactggtgtgaaatatctcagcaacagtggttagaattgttctctgtgtacttcaggctctatctgaaaccttcacaagatgttcatagagttttagtggctagaataattcatgctgttaccaaaggatgctgttctcagactgacggattaaattccaaatttttggactttttttccaaggctattcagtgtgcgagacaagaaaagagctcttcaggtctaaatcatatcttagcagctcttactatcttcctcaagactttggctgtcaactttcgaattcgagtgtgtgaattaggagatgaaattcttcccactttgctttatatttggactcaacataggcttaatgattctttaaaagaagtcattattgaattatttcaactgcaaatttatatccatcatccgaaaggagccaaaacccaagaaaaaggtgcttatgaatcaacaaaatggagaagtattttatacaacttatatgatctgctagtgaatgagataagtcatataggaagtagaggaaagtattcttcaggatttcgtaatattgccgtcaaagaaaatttgattgaattgatggcagatatctgtcaccaggtttttaatgaagataccagatccttggagatttctcaatcttacactactacacaaagagaatctagtgattacagtgtcccttgcaaaaggaagaaaatagaactaggctgggaagtaataaaagatcaccttcagaagtcacagaatgattttgatcttgtgccttggctacagattgcaacccaattaatatcaaagtatcctgcaagtttacctaactgtgagctgtctccattactgatgatactatctcagcttctaccccaacagcgacatggggaacgtacaccatatgtgttacgatgccttacggaagttgcattgtgtcaagacaagaggtcaaacctagaaagctcacaaaagtcagatttattaaaactctggaataaaatttggtgtattacctttcgtggtataagttctgagcaaatacaagctgaaaactttggcttacttggagccataattcagggtagtttagttgaggttgacagagaattctggaagttatttactgggtcagcctgcagaccttcatgtcctgcagtatgctgtttgactttggcactgaccaccagtatagttccaggaacggtaaaaatgggaatagagcaaaatatgtgtgaagtaaatagaagcttttctttaaaggaatcaataatgaaatggctcttattctatcagttagagggtgacttagaaaatagcacagaagtgcctccaattcttcacagtaattttcctcatcttgtactggagaaaattcttgtgagtctcactatgaaaaactgtaaagctgcaatgaattttttccaaagcgtgccagaatgtgaacaccaccaaaaagataaagaagaactttcattctcagaagtagaagaactatttcttcagacaacttttgacaagatggactttttaaccattgtgagagaatgtggtatagaaaagcaccagtccagtattggcttctctgtccaccagaatctcaaggaatcactggatcgctgtcttctgggattatcagaacagcttctgaataattactcatctgagattacaaattcagaaactcttgtccggtgttcacgtcttttggtgggtgtccttggctgctactgttacatgggtgtaatagctgaagaggaagcatataagtcagaattattccagaaagccaagtctctaatgcaatgtgcaggagaaagtatcactctgtttaaaaataagacaaatgaggaattcagaattggttccttgagaaatatgatgcagctatgtacacgttgcttgagcaactgtaccaagaagagtccaaataagattgcatctggctttttcctgcgattgttaacatcaaagctaatgaatgacattgcagatatttgtaaaagtttagcatccttcatcaaaaagccatttgaccgtggagaagtagaatcaatggaagatgatactaatggaaatctaatggaggtggaggatcagtcatccatgaatctatttaacgattaccctgatagtagtgttagtgatgcaaacgaacctggagagagccaaagtaccataggtgccattaatcctttagctgaagaatatctgtcaaagcaagatctacttttcttagacatgctcaagttcttgtgtttgtgtgtaactactgctcagaccaatactgtgtcctttagggcagctgatattcggaggaaattgttaatgttaattgattctagcacgctagaacctaccaaatccctccacctgcatatgtatctaatgcttttaaaggagcttcctggagaagagtaccccttgccaatggaagatgttcttgaacttctgaaaccactatccaatgtgtgttctttgtatcgtcgtgaccaagatgtttgtaaaactattttaaaccatgtccttcatgtagtgaaaaacctaggtcaaagcaatatggactctgagaacacaagggatgctcaaggacagtttcttacagtaattggagcattttggcatctaacaaaggagaggaaatatatattctctgtaagaatggccctagtaaattgccttaaaactttgcttgaggctgatccttattcaaaatgggccattcttaatgtaatgggaaaagactttcctgtaaatgaagtatttacacaatttcttgctgacaatcatcaccaagttcgcatgttggctgcagagtcaatcaatagattgttccaggacacgaagggagattcttccaggttactgaaagcacttcctttgaagcttcagcaaacagcttttgaaaatgcatacttgaaagctcaggaaggaatgagagaaatgtcccatagtgctgagaaccctgaaactttggatgaaatttataatagaaaatctgttttactgacgttgatagctgtggttttatcctgtagccctatctgcgaaaaacaggctttgtttgccctgtgtaaatctgtgaaagagaatggattagaacctcaccttgtgaaaaaggttttagagaaagtttctgaaacttttggatatagacgtttagaagactttatggcatctcatttagattatctggttttggaatggctaaatcttcaagatactgaatacaacttatcttcttttccttttattttattaaactacacaaatattgaggatttctatagatcttgttataaggttttgattccacatctggtgattagaagtcattttgatgaggtgaagtccattgctaatcagattcaagaggactggaaaagtcttctaacagactgctttccaaagattcttgtaaatattcttccttattttgcctatgagggtaccagagacagtgggatggcacagcaaagagagactgctaccaaggtctatgatatgcttaaaagtgaaaacttattgggaaaacagattgatcacttattcattagtaatttaccagagattgtggtggagttattgatgacgttacatgagccagcaaattctagtgccagtcagagcactgacctctgtgacttttcaggggatttggatcctgctcctaatccacctcattttccatcgcatgtgattaaagcaacatttgcctatatcagcaattgtcataaaaccaagttaaaaagcattttagaaattctttccaaaagccctgattcctatcagaaaattcttcttgccatatgtgagcaagcagctgaaacaaataatgtttataagaagcacagaattcttaaaatatatcacctgtttgttagtttattactgaaagatataaaaagtggcttaggaggagcttgggcctttgttcttcgagacgttatttatactttgattcactatatcaaccaaaggccttcttgtatcatggatgtgtcattacgtagcttctccctttgttgtgacttattaagtcaggtttgccagacagccgtgacttactgtaaggatgctctagaaaaccatcttcatgttattgttggtacacttataccccttgtgtatgagcaggtggaggttcagaaacaggtattggacttgttgaaatacttagtgatagataacaaggataatgaaaacctctatatcacgattaagcttttagatccttttcctgaccatgttgtttttaaggatttgcgtattactcagcaaaaaatcaaatacagtagaggacccttttcactcttggaggaaattaaccattttctctcagtaagtgtttatgatgcacttccattgacaagacttgaaggactaaaggatcttcgaagacaactggaactacataaagatcagatggtggacattatgagagcttctcaggataatccgcaagatgggattatggtgaaactagttgtcaatttgttgcagttatccaagatggcaataaaccacactggtgaaaaagaagttctagaggctgttggaagctgcttgggagaagtgggtcctatagatttctctaccatagctatacaacatagtaaagatgcatcttataccaaggcccttaagttatttgaagataaagaacttcagtggaccttcataatgctgacctacctgaataacacactggtagaagattgtgtcaaagttcgatcagcagctgttacctgtttgaaaaacattttagccacaaagactggacatagtttctgggagatttataagatgacaacagatccaatgctggcctatctacagccttttagaacatcaagaaaaaagtttttagaagtacccagatttgacaaagaaaacccttttgaaggcctggatgatataaatctgtggattcctctaagtgaaaatcatgacatttggataaagacactgacttgtgcttttttggacagtggaggcacaaaatgtgaaattcttcaattattaaagccaatgtgtgaagtgaaaactgacttttgtcagactgtacttccatacttgattcatgatattttactccaagatacaaatgaatcatggagaaatctgctttctacacatgttcagggatttttcaccagctgtcttcgacacttctcgcaaacgagccgatccacaacccctgcaaacttggattcagagtcagagcactttttccgatgctgtttggataaaaaatcacaaagaacaatgcttgctgttgtggactacatgagaagacaaaagagaccttcttcaggaacaatttttaatgatgctttctggctggatttaaattatctagaagttgccaaggtagctcagtcttgtgctgctcactttacagctttactctatgcagaaatctatgcagataagaaaagtatggatgatcaagagaaaagaagtcttgcatttgaagaaggaagccagagtacaactatttctagcttgagtgaaaaaagtaaagaagaaactggaataagtttacaggatcttctcttagaaatctacagaagtataggggagccagatagtttgtatggctgtggtggagggaagatgttacaacccattactagactacgaacatatgaacacgaagcaatgtggggcaaagccctagtaacatatgacctcgaaacagcaatcccctcatcaacacgccaggcaggaatcattcaggccttgcagaatttgggactctgccatattctttccgtctatttaaaaggattggattatgaaaataaagactggtgtcctgaactagaagaacttcattaccaagcagcatggaggaatatgcagtgggaccattgcacttccgtcagcaaagaagtagaaggaaccagttaccatgaatcattgtacaatgctctacaatctctaagagacagagaattctctacattttatgaaagtctcaaatatgccagagtaaaagaagtggaagagatgtgtaagcgcagccttgagtctgtgtattcgctctatcccacacttagcaggttgcaggccattggagagctggaaagcattggggagcttttctcaagatcagtcacacatagacaactctctgaagtatatattaagtggcagaaacactcccagcttctcaaggacagtgattttagttttcaggagcctatcatggctctacgcacagtcattttggagatcctgatggaaaaggaaatggacaactcacaaagagaatgtattaaggacattctcaccaaacaccttgtagaactctctatactggccagaactttcaagaacactcagctccctgaaagggcaatatttcaaattaaacagtacaattcagttagctgtggagtctctgagtggcagctggaagaagcacaagtattctgggcaaaaaaggagcagagtcttgccctgagtattctcaagcaaatgatcaagaagttggatgccagctgtgcagcgaacaatcccagcctaaaacttacatacacagaatgtctgagggtttgtggcaactggttagcagaaacgtgcttagaaaatcctgcggtcatcatgcagacctatctagaaaaggcagtagaagttgctggaaattatgatggagaaagtagtgatgagctaagaaatggaaaaatgaaggcatttctctcattagcccggttttcagatactcaataccaaagaattgaaaactacatgaaatcatcggaatttgaaaacaagcaagctctcctgaaaagagccaaagaggaagtaggtctccttagggaacataaaattcagacaaacagatacacagtaaaggttcagcgagagctggagttggatgaattagccctgcgtgcactgaaagaggatcgtaaacgcttcttatgtaaagcagttgaaaattatatcaactgcttattaagtggagaagaacatgatatgtgggtattccgactttgttccctctggcttgaaaattctggagtttctgaagtcaatggcatgatgaagagagacggaatgaagattccaacatataaatttttgcctcttatgtaccaattggctgctagaatggggaccaagatgatgggaggcctaggatttcatgaagtcctcaataatctaatctctagaatttcaatggatcacccccatcacactttgtttattatactggccttagcaaatgcaaacagagatgaatttctgactaaaccagaggtagccagaagaagcagaataactaaaaatgtgcctaaacaaagctctcagcttgatgaggatcgaacagaggctgcaaatagaataatatgtactatcagaagtaggagacctcagatggtcagaagtgttgaggcactttgtgatgcttatattatattagcaaacttagatgccactcagtggaagactcagagaaaaggcataaatattccagcagaccagccaattactaaacttaagaatttagaagatgttgttgtccctactatggaaattaaggtggaccacacaggagaatatggaaatctggtgactatacagtcatttaaagcagaatttcgcttagcaggaggtgtaaatttaccaaaaataatagattgtgtaggttccgatggcaaggagaggagacagcttgttaagggccgtgatgacctgagacaagatgctgtcatgcaacaggtcttccagatgtgtaatacattactgcagagaaacacggaaactaggaagaggaaattaactatctgtacttataaggtggttcccctctctcagcgaagtggtgttcttgaatggtgcacaggaactgtccccattggtgaatttcttgttaacaatgaagatggtgctcataaaagatacaggccaaatgatttcagtgcctttcagtgccaaaagaaaatgatggaggtgcaaaaaaagtcttttgaagagaaatatgaagtcttcatggatgtttgccaaaattttcaaccagttttccgttacttctgcatggaaaaattcttggatccagctatttggtttgagaagcgattggcttatacgcgcagtgtagctacttcttctattgttggttacatacttggacttggtgatagacatgtacagaatatcttgataaatgagcagtcagcagaacttgtacatatagatctaggtgttgcttttgaacagggcaaaatccttcctactcctgagacagttccttttagactcaccagagatattgtggatggcatgggcattacgggtgttgaaggtgtcttcagaagatgctgtgagaaaaccatggaagtgatgagaaactctcaggaaactctgttaaccattgtagaggtccttctatatgatccactctttgactggaccatgaatcctttgaaagctttgtatttacagcagaggccggaagatgaaactgagcttcaccctactctgaatgcagatgaccaagaatgcaaacgaaatctcagtgatattgaccagagtttcaacaaagtagctgaacgtgtcttaatgagactacaagagaaactgaaaggagtggaagaaggcactgtgctcagtgttggtggacaagtgaatttgctcatacagcaggccatagaccccaaaaatctcagccgacttttcccaggatggaaagcttgggtgtgatcttcagtatatgaattaccctttcattcagcctttagaaattatattttagcctttatttttaacctgccaacatactttaagtagggattaatatttaagtgaactattgtgggtttttttgaatgttggttttaatacttgatttaatcaccactcaaaaatgttttgatggtcttaaggaacatctctgctttcactctttagaaataatggtcattcgggctgggcgcagcggctcacgcctgtaatcccagcactttgggaggccgaggtgagcggatcacaaggtcaggagttcgagaccagcctggccaagagaccagcctggccagtatggtgaaaccctgtctctactaaaaatacaaaaattagccgagcatggtggcgggcacctgtaatcccagctactcgagaggctgaggcaggagaatctcttgaacctgggaggtgaaggttgctgtgggccaaaatcatgccattgcactccagcctgggtgacaagagcgaaactccatctcaaaaaaaaaaaaaaaaaaacagaaacgtatttggatttttcctagtaagatcactcagtgttactaaataatgaagttgttatggagaacaaatttcaaagacacagttagtgtagttactatttttttaagtgtgtattaaaacttctcattctattctctttatcttttaagcccttctgtactgtccatgtatgttatctttctgtgataacttcatagattgccttctagttcatgaattctcttgtcagatgtatataatctcttttaccctatccattgggcttcttctttcagaaattgtttttcatttctaattatgcatcatttttcagatctctgtttcttgatgtcatttttaatgtttttttaatgttttttatgtcactaattattttaaatgtctgtacttgatagacactgtaatagttctattaaatttagttcctgctgtttatatctgttgatttttgtatttgataggctgttcatccagttttgtctttttgaaaagtgagtttattttcagcaaggctttatctatgggaatcttgagtgtctgtttatgtcatattcccagggctgttgctgcacacaagcccattcttattttaatttcttggctttagggtttccatacctgaagtgtagcataaatactgataggagatttcccaggccaaggcaaacacacttcctcctcatctccttgtgctagtgggcagaatatttgattgatgcctttttcactgagagtataagcttccatgtgtcccacctttatggcaggggtggaaggaggtacatttaattcccactgcctgcctttggcaagccctgggttctttgctccccatatagatgtctaagctaaaagccgtgggttaatgagactggcaaattgttccaggacagctacagcatcagctcacatattcacctctctggtttttcattcccctcatttttttctgagacagagtcttgctctgtcacccaggctggagtgcagtggcatgatctcagctcactgaaacctctgcctcctgggttcaagcaattctcctgcctcagcctcccgagtagctgggactacaggcgtgtgccaacacgcccggctaattttttgtatttttattagagacggagtttcaccgtgttagccaggatggtctcgatcgcttgacctcgtgatccaccctcctcggcctcccaaagtgctgggattacaggtgtgagccaccgcgcccggcctcattcccctcatttttgaccgtaaggatttcccctttcttgtaagttctgctatgtatttaaaagaatgttttctacattttatccagcatttctctgtgttctgttggaagggaagggcttaggtatctagtttgatacataggtagaagtggaacatttctctgtcccccagctgtcatcatataagataaacatcagataaaaagccacctgaaagtaaaactactgactcgtgtattagtgagtataatctcttctccatccttaggaaaatgttcatcccagctgcggagattaacaaatgggtgattgagctttctcctcgtatttggaccttgaaggttatataaatttttttcttatgaagagttggcatttctttttattgccaatggcaggcactcattcatatttgatctcctcaccttcccctcccctaaaaccaatctccagaactttttggactataaatttcttggtttgacttctggagaactgttcagaatattactttgcatttcaaattacaaacttaccttggtgtatctttttcttacaagctgcctaaatgaatatttggtatatattggtagttttattactatagtaaatcaaggaaatgcagtaaacttaaaatgtctttaagaaagccctgaaatcttcatgggtgaaattagaaattatcaactagataatagtatagataaatgaatttgtagctaattcttgctagttgttgcatccagagagctttgaataacatcattaatctactctttagccttgcatggtatgctatgaggctcctgttctgttcaagtattctaatcaatggctttgaaaagtttatcaaatttacatacagatcacaagcctaggagaaataactaattcacagatgacagaattaagattataaaagattttttttttgtaattttagtagagacagggttgccattgtattccagccttggcgacagagcaagactctgcctcaaaaaaaaaaaaaaaaaggttttggcaagctggaactctttctgcaaatgactaagatagaaaactgccaaggacaaatgaggagtagttagattttgaaaatattaatcatagaatagttgttgtatgctaagtcactgacccatattatgtacagcatttctgatctttactttgcaagattagtgatactatcccaatacactgctggagaaatcagaatttggagaaataagttgtccaaggcaagaagatagtaaattataagtacaagtgtaatatggacagtatctaacttgaaaagatttcaggcgaaaagaatctggggtttgccagtcagttgctcaaaaggtcaatgaaaaccaaatagtgaagctatcagagaagctaataaattatagactgcttgaacagttgtgtccagattaagggagataatagctttcccaccctactttgtgcaggtcatacctccccaaagtgtttacctaatcagtaggttcacaaactcttggtcattatagtatatgcctaaaatgtatgcacttaggaatgctaaaaatttaaatatggtctaaagcaaataaaagcaaagaggaaaaactttggacagcgtaaagactagaatagtcttttaaaaagaaagccagtatattggtttgaaatatagagatgtgtcccaatttcaagtattttaattgcaccttaatgaaattatctattttctatagattttagtactattgaatgtattactttactgttacctgaatttattataaagtgtttttgaataaataattctaaaagc

SEQ ID NO: 362 - DNA, 1572 bp, Homo Sapiens
  NM_000056
gggtgctccgccctccccgcaggcggcgtgcggctgcatagcctgagaatcccggtggtgagcggggatggcggttgtagcggcggctgccggctggctactcaggctcagggcggcaggggctgaggggcactggcgtcggcttcctggcgcggggctggcgcggggctttttgcaccccgccgcgactgtcgaggatgcggcccagaggcggcaggtggctcattttactttccagccagatccggagccccgggagtacgggcaaactcagaaaatgaatcttttccagtctgtaacaagtgccttggataactcattggccaaagatcctactgcagtaatatttggtgaagatgttgcctttggtggagtctttagatgcactgttggcttgcgagacaaatatggaaaagatagagtttttaataccccattgtgtgaacaaggaattgttggatttggaatcggaattgcggtcactggagctactgccattgcggaaattcagtttgcagattatattttccctgcatttgatcagattgttaatgaagctgccaagtatcgctatcgctctggggatctttttaactgtggaagcctcactatccggtccccttggggctgtgttggtcatggggctctctatcattctcagagtcctgaagcattttttgcccattgcccaggaatcaaggtggttatacccagaagccctttccaggccaaaggacttcttttgtcatgcatagaggataaaaatccttgtatattttttgaacctaaaatactttacagggcagcagcggaagaagtccctatagaaccatacaacatcccactgtcccaggccgaagtcatacaggaagggagtgatgttactctagttgcctggggcactcaggttcatgtgatccgagaggtagcttccatggcaaaagaaaagcttggagtgtcttgtgaagtcattgatctgaggactataataccttgggatgtggacacaatttgtaagtctgtgatcaaaacagggcgactgctaatcagtcacgaggctcccttgacaggcggctttgcatcggaaatcagctctacagttcaggaggaatgtttcttgaacctagaggctcctatatcaagagtatgtggttatgacacaccatttcctcacatttttgaaccattctacatcccagacaaatggaagtgttatgatgcccttcgaaaaatgatcaactattgaccatatagaaaagctggaagattatgactagatatggaaatattttttctgaatttttttttatatttcctccgacttacctctttttgaaaagagagtttttattaagtgaaccatcacgatattggctgaaaagttctacattctattattgtattgtaacacacatgtattgatgattttcattaagagtttcagattaactttgaaaaatattccacatggtaatcttataaattctgtttaattacatctgtaaatattatgtgtgtgatagtattcaataaagtaaaatcaaattgtcaaaaaaaaaaaaaaaaaaaaaa

SEQ ID NO: 363 - DNA, 2611 bp, Homo Sapiens
  NM_000061
aactgagtggctgtgaaagggtggggtttgctcagactgtccttcctctctggactgtaagaatatgtctccagggccagtgtctgctgcgatcgagtcccaccttccaagtcctggcatctcaatgcatctgggaagctacctgcattaagtcaggactgagcacacaggtgaactccagaaagaagaagctatggccgcagtgattctggagagcatctttctgaagcgatcccaacagaaaaagaaaacatcacctctaaacttcaagaagcgcctgtttctcttgaccgtgcacaaactctcctactatgagtatgactttgaacgtgggagaagaggcagtaagaagggttcaatagatgttgagaagatcacttgtgttgaaacagtggttcctgaaaaaaatcctcctccagaaagacagattccgagaagaggtgaagagtccagtgaaatggagcaaatttcaatcattgaaaggttcccttatcccttccaggttgtatatgatgaagggcctctctacgtcttctccccaactgaagaactaaggaagcggtggattcaccagctcaaaaacgtaatccggtacaacagtgatctggttcagaaatatcacccttgcttctggatcgatgggcagtatctctgctgctctcagacagccaaaaatgctatgggctgccaaattttggagaacaggaatggaagcttaaaacctgggagttctcaccggaagacaaaaaagcctcttcccccaacgcctgaggaggaccagatcttgaaaaagccactaccgcctgagccagcagcagcaccagtctccacaagtgagctgaaaaaggttgtggccctttatgattacatgccaatgaatgcaaatgatctacagctgcggaagggtgatgaatattttatcttggaggaaagcaacttaccatggtggagagcacgagataaaaatgggcaggaaggctacattcctagtaactatgtcactgaagcagaagactccatagaaatgtatgagtggtattccaaacacatgactcggagtcaggctgagcaactgctaaagcaagaggggaaagaaggaggtttcattgtcagagactccagcaaagctggcaaatatacagtgtctgtgtttgctaaatccacaggggaccctcaaggggtgatacgtcattatgttgtgtgttccacacctcagagccagtattacctggctgagaagcaccttttcagcaccatccctgagctcattaactaccatcagcacaactctgcaggactcatatccaggctcaaatatccagtgtctcaacaaaacaagaatgcaccttccactgcaggcctgggatacggatcatgggaaattgatccaaaggacctgaccttcttgaaggagctggggactggacaatttggggtagtgaagtatgggaaatggagaggccagtacgacgtggccatcaagatgatcaaagaaggctccatgtctgaagatgaattcattgaagaagccaaagtcatgatgaatctttcccatgagaagctggtgcagttgtatggcgtctgcaccaagcagcgccccatcttcatcatcactgagtacatggccaatggctgcctcctgaactacctgagggagatgcgccaccgcttccagactcagcagctgctagagatgtgcaaggatgtctgtgaagccatggaatacctggagtcaaagcagttccttcaccgagacctggcagctcgaaactgtttggtaaacgatcaaggagttgttaaagtatctgatttcggcctgtccaggtatgtcctggatgatgaatacacaagctcagtaggctccaaatttccagtccggtggtccccaccggaagtcctgatgtatagcaagttcagcagcaaatctgacatttgggcttttggggttttgatgtgggaaatttactccctggggaagatgccatatgagagatttactaacagtgagactgctgaacacattgcccaaggcctacgtctctacaggcctcatctggcttcagagaaggtatataccatcatgtacagttgctggcatgagaaagcagatgagcgtcccactttcaaaattcttctgagcaatattctagatgtcatggatgaagaatcctgagctcgccaataagcttcttggttctacttctcttctccacaagccccaatttcactttctcagaggaaatcccaagcttaggagccctggagcctttgtgctcccactcaatacaaaaaggcccctctctacatctgggaatgcacctcttctttgattccctgggatagtggcttctgagcaaaggccaagaaattattgtgcctgaaatttcccgagagaattaagacagactgaatttgcgatgaaaatattttttaggagggaggatgtaaatagccgcacaaaggggtccaacagctctttgagtaggcatttggtagagcttgggggtgtgtgtgtgggggtggaccgaatttggcaagaatgaaatggtgtcataaagatgggaggggagggtgttttgataaaataaaattactagaaagcttgaaagtc

SEQ ID NO: 364 - DNA, 1666 bp, Homo Sapiens
  NM_000067
cctccccttgtcgcctaggtccacccgagccccctcccccgggccgcccccgagcacgaagttggcgggagcctataaaagctggtgccggcgcgacccgcggacacacagtgcaggcgcccaagccgccgccgccagatcggtgccgattcctgccctgccccgaccgccagcgcgaccatgtcccatcactgggggtacggcaaacacaacggacctgagcactggcataaggacttccccattgccaagggagagcgccagtcccctgttgacatcgacactcatacagccaagtatgacccttccctgaagcccctgtctgtttcctatgatcaagcaacttccctgaggatcctcaacaatggtcatgctttcaacgtggagtttgatgactctcaggacaaagcagtgctcaagggaggacccctggatggcacttacagattgattcagtttcactttcactggggttcacttgatggacaaggttcagagcatactgtggataaaaagaaatatgctgcagaacttcacttggttcactggaacaccaaatatggggattttgggaaagctgtgcagcaacctgatggactggccgttctaggtatttttttgaaggttggcagcgctaaaccgggccttcagaaagttgttgatgtgctggattccattaaaacaaagggcaagagtgctgacttcactaacttcgatcctcgtggcctccttcctgaatccttggattactggacctacccaggctcactgaccacccctcctcttctggaatgtgtgacctggattgtgctcaaggaacccatcagcgtcagcagcgagcaggtgttgaaattccgtaaacttaacttcaatggggagggtgaacccgaagaactgatggtggacaactggcgcccagctcagccactgaagaacaggcaaatcaaagcttccttcaaataagatggtcccatagtctgtatccaaataatgaatcttcgggtgtttccctttagctaagcacagatctaccttggtgatttggaccctggttgctttgtgtctagttttctagacccttcatctcttacttgatagacttactaataaaatgtgaagactagaccaattgtcatgcttgacacaactgctgtggctggttggtgctttgtttatggtagtagtttttctgtaacacagaatataggataagaaataagaataaagtaccttgactttgttcacagcatgtagggtgatgagcactcacaattgttgactaaaatgctgcttttaaaacataggaaagtagaatggttgagtgcaaatccatagcacaagataaattgagctagttaaggcaaatcaggtaaaatagtcatgattctatgtaatgtaaaccagaaaaaataaatgttcatgatttcaagatgttatattaaagaaaaactttaaaaattattatatatttatagcaaagttatcttaaatatgaattctgttgtaatttaatgacttttgaattacagagatataaatgaagtattatctgtaaaaattgttataattagagttgtgatacagagtatatttccattcagacaatatatcataacttaataaatattgtattttagatatattctctaataaaattcagaattct

SEQ ID NO: 365 - DNA, 1311 bp, Homo Sapiens
  NM_000073
agtctagctgctgcacaggctggctggctggctggctgctaagggctgctccacgcttttgccggaggacagagactgacatggaacaggggaagggcctggctgtcctcatcctggctatcattcttcttcaaggtactttggcccagtcaatcaaaggaaaccacttggttaaggtgtatgactatcaagaagatggttcggtacttctgacttgtgatgcagaagccaaaaatatcacatggtttaaagatgggaagatgatcggcttcctaactgaagataaaaaaaaatggaatctgggaagtaatgccaaggaccctcgagggatgtatcagtgtaaaggatcacagaacaagtcaaaaccactccaagtgtattacagaatgtgtcagaactgcattgaactaaatgcagccaccatatctggctttctctttgctgaaatcgtcagcattttcgtccttgctgttggggtctacttcattgctggacaggatggagttcgccagtcgagagcttcagacaagcagactctgttgcccaatgaccagctctaccagcccctcaaggatcgagaagatgaccagtacagccaccttcaaggaaaccagttgaggaggaattgaactcaggactcagagtagtccaggtgttctcctcctattcagttcccagaatcaaagcaatgcattttggaaagctcctagcagagagactttcagccctaaatctagactcaaggttcccagagatgacaaatggagaagaaaggccatcagagcaaatttgggggtttctcaaataaaataaaaataaaaacaaatactgtgtttcagaagcgccacctattggggaaaattgtaaaagaaaaatgaaaagatcaaataaccccctggatttgaatataattttttgtgttgtaatttttatttcgtttttgtataggttataattcacatggctcaaatattcagtgaaagctctccctccaccgccatcccctgctacccagtgaccctgttgccctcttcagagacaaattagtttctcttttttttttttttttttttttttttgagacagtctggctctgtcacccaggctgaaatgcagtggcaccatctcggctcactgcaacctctgcctcctgggttcaagcgattctcctgcctcagcctcccgggcagctgggattacaggcacacactaccacacctggctaatttttgtatttttagtagagacagggttttgctctgttggccaagctggtctcgaactcctgacctcaagtgatccgcccgcctc

SEQ ID NO: 366 - DNA, 1834 bp, Homo Sapiens
  NM_000074
actttgacagtcttctcatgctgcctctgccaccttctctgccagaagataccatttcaactttaacacagcatgatcgaaacatacaaccaaacttctccccgatctgcggccactggactgcccatcagcatgaaaatttttatgtatttacttactgtttttcttatcacccagatgattgggtcagcactttttgctgtgtatcttcatagaaggttggacaagatagaagatgaaaggaatcttcatgaagattttgtattcatgaaaacgatacagagatgcaacacaggagaaagatccttatccttactgaactgtgaggagattaaaagccagtttgaaggctttgtgaaggatataatgttaaacaaagaggagacgaagaaagaaaacagctttgaaatgcaaaaaggtgatcagaatcctcaaattgcggcacatgtcataagtgaggccagcagtaaaacaacatctgtgttacagtgggctgaaaaaggatactacaccatgagcaacaacttggtaaccctggaaaatgggaaacagctgaccgttaaaagacaaggactctattatatctatgcccaagtcaccttctgttccaatcgggaagcttcgagtcaagctccatttatagccagcctctgcctaaagtcccccggtagattcgagagaatcttactcagagctgcaaatacccacagttccgccaaaccttgcgggcaacaatccattcacttgggaggagtatttgaattgcaaccaggtgcttcggtgtttgtcaatgtgactgatccaagccaagtgagccatggcactggcttcacgtcctttggcttactcaaactctgaacagtgtcaccttgcaggctgtggtggagctgacgctgggagtcttcataatacagcacagcggttaagcccaccccctgttaactgcctatttataaccctaggatcctccttatggagaactatttattatacactccaaggcatgtagaactgtaataagtgaattacaggtcacatgaaaccaaaacgggccctgctccataagagcttatatatctgaagcagcaaccccactgatgcagacatccagagagtcctatgaaaagacaaggccattatgcacaggttgaattctgagtaaacagcagataacttgccaagttcagttttgtttctttgcgtgcagtgtctttccatggataatgcatttgatttatcagtgaagatgcagaagggaaatggggagcctcagctcacattcagttatggttgactctgggttcctatggccttgttggagggggccaggctctagaacgtctaacacagtggagaaccgaaaccccccccccccccccgccaccctctcggacagttattcattctctttcaatctctctctctccatctctctctttcagtctctctctctcaacctctttcttccaatctctctttctcaatctctctgtttccctttgtcagtctcttccctcccccagtctctcttctcaatccccctttctaacacacacacacacacacacacacacacacacacacacacacacacacacacagagtcaggccgttgctagtcagttctcttctttccaccctgtccctatctctaccactatagatgagggtgaggagtagggagtgcagccctgagcctgcccactcctcattacgaaatgactgtatttaaaggaaatctattgtatctacctgcagtctccattgtttccagagtgaacttgtaattatcttgttatttattttttgaataataaagacctcttaacattaa

SEQ ID NO: 367 - DNA, 1474 bp, Homo Sapiens
  NM_000075
agccctcccagtttccgcgcgcctctttggcagctggtcacatggtgagggtgggggtgagggggcctctctagcttgcggcctgtgtctatggtcgggccctctgcgtccagctgctccggaccgagctcgggtgtatggggccgtaggaaccggctccggggccccgataacgggccgcccccacagcaccccgggctggcgtgagggtctcccttgatctgagaatggctacctctcgatatgagccagtggctgaaattggtgtcggtgcctatgggacagtgtacaaggcccgtgatccccacagtggccactttgtggccctcaagagtgtgagagtccccaatggaggaggaggtggaggaggccttcccatcagcacagttcgtgaggtggctttactgaggcgactggaggcttttgagcatcccaatgttgtccggctgatggacgtctgtgccacatcccgaactgaccgggagatcaaggtaaccctggtgtttgagcatgtagaccaggacctaaggacatatctggacaaggcacccccaccaggcttgccagccgaaacgatcaaggatctgatgcgccagtttctaagaggcctagatttccttcatgccaattgcatcgttcaccgagatctgaagccagagaacattctggtgacaagtggtggaacagtcaagctggctgactttggcctggccagaatctacagctaccagatggcacttacacccgtggttgttacactctggtaccgagctcccgaagttcttctgcagtccacatatgcaacacctgtggacatgtggagtgttggctgtatctttgcagagatgtttcgtcgaaagcctctcttctgtggaaactctgaagccgaccagttgggcaaaatctttgacctgattgggctgcctccagaggatgactggcctcgagatgtatccctgccccgtggagcctttccccccagagggccccgcccagtgcagtcggtggtacctgagatggaggagtcgggagcacagctgctgctggaaatgctgacttttaacccacacaagcgaatctctgcctttcgagctctgcagcactcttatctacataaggatgaaggtaatccggagtgagcaatggagtggctgccatggaaggaagaaaagctgccatttcccttctggacactgagagggcaatctttgcctttatctctgaggctatggagggtcctcctccatctttctacagagattactttgctgccttaatgacattcccctcccacctctccttttgaggcttctccttctccttcccatttctctacactaaggggtatgttccctcttgtccctttccctacctttatatttggggtccttttttatacaggaaaaacaaaacaaagaaataatggtcttttttttttttttaaaaaaaaaaaaaaaaaaaaaaaaaaaaaaaa

SEQ ID NO: 368 - DNA, 1943 bp, Homo Sapiens
  NM_000076
agtgcgctgtgctcgaggggtgccggccaggcctgagcgagcgagctagccagcaggcatcgagggggcgcggctgccgtccggacgagacaggcgaacccgacgcagaagagtccaccaccggacagccaggtagccgccgcgtccctcgcacacgcagagtcgggcggcgcggggtctcccttgcgcccggcctccgccctctcctcctctcctttccccttcttctcgctgtcctctcctctctcgctgcccgcgtttgcgcagccccgggccatgtccgacgcgtccctccgcagcacatccacgatggagcgtcttgtcgcccgtgggaccttcccagtactagtgcgcaccagcgcctgccgcagcctcttcgggccggtggaccacgaggagctgagccgcgagctgcaggcccgcctggccgagctgaacgccgaggaccagaaccgctgggattacgacttccagcaggacatgccgctgcggggccctggacgcctgcagtggaccgaagtggacagcgactcggtgcccgcgttctaccgcgagacggtgcaggtggggcgctgccgcctgctgctggcgccgcggcccgtcgcggtcgcggtggctgtcagcccgcccctcgagccggccgctgagtccctcgacggcctcgaggaggcgccggagcagctgcctagtgtcccggtcccggccccggcgtccaccccgcccccagtcccggtcctggctccagccccggccccggctccggctccggtcgcggctccggtcgcggctccggtcgcggtcgcggtcctggccccggccccggccccggctccggctccggctccggccccggctccagtcgcggccccggccccagccccggccccggccccggccccggcccccgccccggccccggccccggacgcggcgcctcaagagagcgccgagcagggcgcgaaccaggggcagcgcggccaggagcctctcgctgaccagctgcactcggggatttcgggacgtcccgcggccggcaccgcggccgccagcgccaacggcgcggcgatcaagaagctgtccgggcctctgatctccgatttcttcgccaagcgcaagagatcagcgcctgagaagtcgtcgggcgatgtccccgcgccgtgtccctctccaagcgccgcccctggcgtgggctcggtggagcagaccccgcgcaagaggctgcggtgagccaatttagagcccaaagagccccgagggaacctgccggggcagcggacgttggaagggcgctgggcctcggctgggaccgttcatgtagcagcaaccggcggcggctgccgcagagcagcgttcggttttgtttttaaattttgaaaactgtgcaatgtattaataacgtctttttatatctaaatgtattctgcacgagaaggtacactggtcccaaggtgtaaagctttaagagtcatttatataaaatgtttaatctctgctgaaactcagtgcaaaaaaaagaaaaaagaaaaaaaaaaggaaaaaataaaaaaaccatgtatatttgtacaaaaagtttttaaagttatactaacttatattttctatttatgtccaggcgtggaccgctctgccacgcactagctcggttattggttatgccaaaggcactctccatctcccacatctggttattgacaagtgtaactttattttcatcgcggactctggggaagggggtcactcacaagctgtagctgccatacatgcccatctagcttgcagtctcttcgcgctttcgctgtctctcttattatgactgtgtttatctgaaacttgaagacaagtctgttaaaatggttcctgagccgtctgtaccactgccccggcccctcgtccgccgggttctaaataaagaggccgaaaaatgctgcaaaaaaaaaaaaaaa

SEQ ID NO: 369 - DNA, 1717 bp, Homo Sapiens
  NM_000078
atatacgggctccaggctgaacggctcgggccacttacacaccactgcctgataaccatgctggctgccacagtcctgaccctggccctgctgggcaatgcccatgcctgctccaaaggcacctcgcacgaggcaggcatcgtgtgccgcatcaccaagcctgccctcctggtgttgaaccacgagactgccaaggtgatccagaccgccttccagcgagccagctacccagatatcacgggcgagaaggccatgatgctccttggccaagtcaagtatgggttgcacaacatccagatcagccacttgtccatcgccagcagccaggtggagctggtggaagccaagtccattgatgtctccattcagaacgtgtctgtggtcttcaaggggaccctgaagtatggctacaccactgcctggtggctgggtattgatcagtccattgacttcgagatcgactctgccattgacctccagatcaacacacagctgacctgtgactctggtagagtgcggaccgatgcccctgactgctacctgtctttccataagctgctcctgcatctccaaggggagcgagagcctgggtggatcaagcagctgttcacaaatttcatctccttcaccctgaagctggtcctgaagggacagatctgcaaagagatcaacgtcatctctaacatcatggccgattttgtccagacaagggctgccagcatcctttcagatggagacattggggtggacatttccctgacaggtgatcccgtcatcacagcctcctacctggagtcccatcacaagggtcatttcatctacaagaatgtctcagaggacctccccctccccaccttctcgcccacactgctgggggactcccgcatgctgtacttctggttctctgagcgagtcttccactcgctggccaaggtagctttccaggatggccgcctcatgctcagcctgatgggagacgagttcaaggcagtgctggagacctggggcttcaacaccaaccaggaaatcttccaagaggttgtcggcggcttccccagccaggcccaagtcaccgtccactgcctcaagatgcccaagatctcctgccaaaacaagggagtcgtggtcaattcttcagtgatggtgaaattcctctttccacgcccagaccagcaacattctgtagcttacacatttgaagaggatatcgtgactaccgtccaggcctcctattctaagaaaaagctcttcttaagcctcttggatttccagattacaccaaagactgtttccaacttgactgagagcagctccgagtccgtccagagcttcctgcagtcaatgatcaccgctgtgggcatccctgaggtcatgtctcggctcgaggtagtgtttacagccctcatgaacagcaaaggcgtgagcctcttcgacatcatcaaccctgagattatcactcgagatggcttcctgctgctgcagatggactttggcttccctgagcacctgctggtggatttcctccagagcttgagctagaagtctccaaggaggtcgggatggggcttgtagcagaaggcaagcaccaggctcacagctggaaccctggtgtctcctccagcgtggtggaagttgggttaggagtacggagatggagattggctcccaactcctccctatcctaaaggcccactggcattaaagtgctgtatccaag

SEQ ID NO: 370 - DNA, 818 bp, Homo Sapiens
  NM_000099
cgcagcgggtcctctctatctagctccagcctctcgcctgcgccccactccccgcgtcccgcgtcctagccgaccatggccgggcccctgcgcgccccgctgctcctgctggccatcctggccgtggccctggccgtgagccccgcggccggctccagtcccggcaagccgccgcgcctggtgggaggccccatggacgccagcgtggaggaggagggtgtgcggcgtgcactggactttgccgtcggcgagtacaacaaagccagcaacgacatgtaccacagccgcgcgctgcaggtggtgcgcgcccgcaagcagatcgtagctggggtgaactacttcttggacgtggagctgggccgaaccacgtgtaccaagacccagcccaacttggacaactgccccttccatgaccagccacatctgaaaaggaaagcattctgctctttccagatctacgctgtgccttggcagggcacaatgaccttgtcgaaatccacctgtcaggacgcctaggggtctgtaccgggctggcctgtgcctatcacctcttatgcacacctcccaccccctgtattcccacccctggactggtggcccctgccttggggaaggtctccccatgtgcctgcaccaggagacagacagagaaggcagcaggcggcctttgttgctcagcaaggggctctgccctccctccttccttcttgcttctcatagccccggtgtgcggtgcatacacccccacctcctgcaataaaatagtagcatcggcaaaaaaaaaaaaaaaaaaaaaaaaaaaaaaaaaaaaaaaaaaa

SEQ ID NO: 371 - DNA, 674 bp, Homo Sapiens
  NM_000100
ccccttggttccgcccgcgcgtcacgtgaccccagcgcctacttgggctgaggagccgccgcgtcccctcgccgagtcccctcgccagattccctccgtcgccgccaagatgatgtgcggggcgccctccgccacgcagccggccaccgccgagacccagcacatcgccgaccaggtgaggtcccagcttgaagagaaagaaaacaagaagttccctgtgtttaaggccgtgtcattcaagagccaggtggtcgcggggacaaactacttcatcaaggtgcacgtcggcgacgaggacttcgtacacctgcgagtgttccaatctctccctcatgaaaacaagcccttgaccttatctaactaccagaccaacaaagccaagcatgatgagctgacctatttctgatcctgactttggacaaggcccttcagccagaagactgacaaagtcatcctccgtctaccagagcgtgcacttgtgatcctaaaataagcttcatctccgggctgtgccccttggggtggaaggggcaggattctgcagctgcttttgcatttctcttcctaaatttcattgtgttgatttctttccttcccaataggtgatcttaattactttcagaatattttcaaaatagatatatttttaaaatccttaaaaaaaaaaaaaaaaa

SEQ ID NO: 372 - DNA, 743 bp, Homo Sapiens
  NM_000101
cgcgcctagcagtgtcccagccgggttcgtgtcgccatggggcagatcgagtgggccatgtgggccaacgaacaggcgctggcgtccggcctgatcctcatcaccgggggcatcgtggccacagctgggcgcttcacccagtggtactttggtgcctactccattgtggcgggcgtgtttgtgtgcctgctggagtacccccgggggaagaggaagaagggctccaccatggagcgctggggacagaagtacatgaccgccgtggtgaagctgttcgggccctttaccaggaattactatgttcgggccgtcctgcatctcctgctctcggtgcccgccggcttcctgctggccaccatccttgggaccgcctgcctggccattgcgagcggcatctacctactggcggctgtgcgtggcgagcagtggacgcccatcgagcccaagccccgggagcggccgcagatcggaggcaccatcaagcagccgcccagcaaccccccgccgcggcccccggccgaggcccgcaagaagcccagcgaggaggaggctgcggtggcggcggggggacccccgggaggtccccaggtcaaccccatcccggtgaccgacgaggtcgtgtgacctcgccccggacctgccctcccgccaggtgcacccacctgcaataaatgcagcgaagccgggaaaaaaaaaaaaaaaaaaaaaaaaaaaaaaaaaaaaaaaaaaaaaaaaaaaaaaaa

SEQ ID NO: 373 - DNA, 4422 bp, Homo Sapiens
  NM_000103
gggagtttctggagggctgaacacgtggaggcaaacaggaaggtgaagaagaacttatcctatcaggacggaaggtcctgtgctcgggatcttccagacgtcgcgactctaaattgccccctctgaggtcaaggaacacaagatggttttggaaatgctgaacccgatacattataacatcaccagcatcgtgcctgaagccatgcctgctgccaccatgccagtcctgctcctcactggcctttttctcttggtgtggaattatgagggcacatcctcaataccaggtcctggctactgcatgggaattggacccctcatctcccacggcagattcctgtggatggggatcggcagtgcctgcaactactacaaccgggtatatggagaattcatgcgagtctggatctctggagaggaaacactcattatcagcaagtcctcaagtatgttccacataatgaagcacaatcattacagctctcgattcggcagcaaacttgggctgcagtgcatcggtatgcatgagaaaggcatcatatttaacaacaatccagagctctggaaaacaactcgacccttctttatgaaagctctgtcaggccccggccttgttcgtatggtcacagtctgtgctgaatccctcaaaacacatctggacaggttggaggaggtgaccaatgaatcgggctatgtggacgtgttgacccttctgcgtcgtgtcatgctggacacctctaacacgctcttcttgaggatccctttggacgaaagtgctatcgtggttaaaatccaaggttattttgatgcatggcaagctctcctcatcaaaccagacatcttctttaagatttcttggctatacaaaaagtatgagaagtctgtcaaggatttgaaagatgccatagaagttctgatagcagaaaaaagacgcaggatttccacagaagagaaactggaagaatgtatggactttgccactgagttgattttagcagagaaacgtggtgacctgacaagagagaatgtgaaccagtgcatattggaaatgctgatcgcagctcctgacaccatgtctgtctctttgttcttcatgctatttctcattgcaaagcaccctaatgttgaagaggcaataataaaggaaatccagactgttattggtgagagagacataaagattgatgatatacaaaaattaaaagtgatggaaaacttcatttatgagagcatgcggtaccagcctgtcgtggacttggtcatgcgcaaagccttagaagatgatgtaatcgatggctacccagtgaaaaaggggacaaacattatcctgaatattggaaggatgcacagactcgagtttttccccaaacccaatgaatttactcttgaaaattttgcaaagaatgttccttataggtactttcagccatttggctttgggccccgtggctgtgcaggaaagtacatcgccatggtgatgatgaaagccatcctcgttacacttctgagacgattccacgtgaagacattgcaaggacagtgtgttgagagcatacagaagatacacgacttgtccttgcacccagatgagactaaaaacatgctggaaatgatctttaccccaagaaactcagacaggtgtctggaacactagagaaggctggtcagtacccactctggagcatttctcatcagtagttcacatacaaatcatccatccttgccaatagtgtcatcctcacagtgaacactcagtggcccatggcattttataggcatacctcctatgggttgtcaccaagctaggtgctatttgtcatctgctcctgttcacaccagagaaccaggctacaagagaaaaagcagaggccaagagtttgagggagaaatagtcggtgaagaaaccgtatccataaagacccgattccaccaaatgtgctttgagaaggataggccttcattaacaaaatgtatgtctggttccccagtagagctctactgcctcaacccaaggggatttttatgtctggggcagaaacactcaagttgattagaaagaccaggccaatgtcagggtacctggggccaaacccacctgctagtgtgaattaaagtactttaattttgttttctgtggaggtggaaaagcaacattcatagtctttggagaaatgcttagaaattcagcatttgacccttgctgtgaattaagcccaattaattcctgtttgtctacatatgatctgtctgtggcaaaagtttaatcagaggaaattctttcccagtctgtcgatttatgcctcagccacttgcctgtgctacaattcattgtgttacctgtagattcaggtaatacaaactatatataatcatcaagtaatacaaactaatttagtaatagcctgggttaagtattattagggccctgtgtctgctgtagaaaaaaaaattcacatgatgcacttcaaattcaaataaaaatccttttggcatgttcccatttttgcttagctcaattagtgtggctaaccaagagataactgtaaatgtgacattgatttgctcttactacagcttcagtgattgggggaggaaaagtcccaacccaatgggctcaaacttctaaggggtactcctctcatccccttatccttctccctcgacattttctccctctttcttcccatgaccccaaagccaagggcaacagatcagtaaagaacgtggtcagagtagaacccctgaagtattttttaatcctacctcaaaatttaacagttacctgagagatttaacattatctagttcattgaatcattgtatgtggtcatggataaattgcacaccttggaattcgctttctaaaggaaatcaaatgaatggaggaactttccaaacaccactttacttgtgttatatagccaatataactatctctactgaatgtcattgaaaaactaaaaaattaaacttatttacaaataggtaaatatttgtcattgaatccattgccatcccatttgactgttcttttcatcctactgtctagtaataagctgagtataagatgacagtgtaatctccctgaaagcaggagctactttctttcttttgtaatctatttccatccccatttccctgtcctgtctccctgtattcactcccaagctcagttctgaatagacattcctgctcagagatactcccaactgatgcagaaaccaaataaagaggtaggtattccaagaattcaagaatggacattagtaaagaataaaacatttatttgagcttggaattatttggatcatctatatggcctaaaaatatatggactatgcctgtgtacctgaatacgtatgtagtcaggtcaagacaatcatccaaataacttagacccctaaaagcaaggccaggatttgcaatttaatgtgtcccaattaattcacttgaaaattagtaacactctgtttacgttgcctctggctggagctgcatggtggaagaagcccaactttggatccatgtacttcacccatccaatactcttgggacatttatgtgtattttatctgtatatatgaagccaatgtctatgtctacacagtcaaagtgaaatgcatgtttgatatagctgtacatagatatctattttgcaggtacaaaaatatcctgggggaaaactgggagtggaagggtggggggtgggagtgagggacatgggggagggacaggaagaggagaagtgttggtttgaacgatccaagcaaactctcccagaatcaaattacctgggtagttgttcaacttttcactctgcttagcctgtatagacaaaccccatatatttgtagaggcttggccttggaattctggaataccattggcttttcagtaggctgatgaacacattttgaaaattctattatcttcagaattttgccccattgttaagtgcttaaccgtcactcttgaatgtgcaatgtgctgtggattccattttcatcagttctgaaagaactgcaatgtgtaaattatcagtgaaatgcatgcatataagggctctatcattatcaaattgtaaggacaattgtacccttctatatctttgggcatgctagacacccccatgccttcattgagatcccattttccccctctcaagtggaaaataatcacatccagcaagctctctcattattgagaaataccatttggaaattgccactttttattcctaagcagcacctttcactgttcatgatgctaatgttccacaaaagcatgtgccattggcccactgaaggatagagggacccttttcaatctatatcagctgggctctgggactgaatctctcacctattcttgcagaaagacatactaattaaaccttgtcaaagtaaaaaaaaaaaaaaaaaa

SEQ ID NO: 374 - DNA, 5160 bp, Homo Sapiens
  NM_000104
aaaacccggaggagcgggatggcgcgctttgactctggagtgggagtgggagcgagcgcttctgcgactccagttgtgagagccgcaagggcatgggaattgacgccactcaccgacccccagtctcaatctcaacgctgtgaggaaacctcgactttgccaggtccccaagggcagcggggctcggcgagcgaggcacccttctccgtccccatcccaatccaagcgctcctggcactgacgacgccaagagactcgagtgggagttaaagcttccagtgagggcagcaggtgtccaggccgggcctgcgggttcctgttgacgtcttgccctaggcaaaggtcccagttccttctcggagccggctgtcccgcgccactggaaaccgcacctccccgcagcatgggcaccagcctcagcccgaacgacccttggccgctaaacccgctgtccatccagcagaccacgctcctgctactcctgtcggtgctggccactgtgcatgtgggccagcggctgctgaggcaacggaggcggcagctccggtccgcgcccccgggcccgtttgcgtggccactgatcggaaacgcggcggcggtgggccaggcggctcacctctcgttcgctcgcctggcgcggcgctacggcgacgttttccagatccgcctgggcagctgccccatagtggtgctgaatggcgagcgcgccatccaccaggccctggtgcagcagggctcggccttcgccgaccggccggccttcgcctccttccgtgtggtgtccggcggccgcagcatggctttcggccactactcggagcactggaaggtgcagcggcgcgcagcccacagcatgatgcgcaacttcttcacgcgccagccgcgcagccgccaagtcctcgagggccacgtgctgagcgaggcgcgcgagctggtggcgctgctggtgcgcggcagcgcggacggcgccttcctcgacccgaggccgctgaccgtcgtggccgtggccaacgtcatgagtgccgtgtgtttcggctgccgctacagccacgacgaccccgagttccgtgagctgctcagccacaacgaagagttcgggcgcacggtgggcgcgggcagcctggtggacgtgatgccctggctgcagtacttccccaacccggtgcgcaccgttttccgcgaattcgagcagctcaaccgcaacttcagcaacttcatcctggacaagttcttgaggcactgcgaaagccttcggcccggggccgccccccgcgacatgatggacgcctttatcctctctgcggaaaagaaggcggccggggactcgcacggtggtggcgcgcggctggatttggagaacgtaccggccactatcactgacatcttcggcgccagccaggacaccctgtccaccgcgctgcagtggctgctcctcctcttcaccaggtatcctgatgtgcagactcgagtgcaggcagaattggatcaggtcgtggggagggaccgtctgccttgtatgggtgaccagcccaacctgccctatgtcctggccttcctttatgaagccatgcgcttctccagctttgtgcctgtcactattcctcatgccaccactgccaacacctctgtcttgggctaccacattcccaaggacactgtggtttttgtcaaccagtggtctgtgaatcatgacccactgaagtggcctaacccggagaactttgatccagctcgattcttggacaaggatggcctcatcaacaaggacctgaccagcagagtgatgattttttcagtgggcaaaaggcggtgcattggcgaagaactttctaagatgcagctttttctcttcatctccatcctggctcaccagtgcgatttcagggccaacccaaatgagcctgcgaaaatgaatttcagttatggtctaaccattaaacccaagtcatttaaagtcaatgtcactctcagagagtccatggagctccttgatagtgctgtccaaaatttacaagccaaggaaacttgccaataagaagcaagaggcaagctgaaattttagaaatattcacatcttcggagatgaggagtaaaattcagtttttttccagttcctcttttgtgctgcttctcaattagcgtttaaggtgagcataaatcaactgtccatcaggtgaggtgtgctccatacccagcggttcttcatgagtagtgggctatgcaggagcttctgggagatttttttgagtcaaagacttaaagggcccaatgaattattatatacatactgcatcttggttatttctgaaggtagcattctttggagttaaaatgcacatatagacacatacacccaaacacttacaccaaactactgaatgaagcagtattttggtaaccaggccatttttggtgggaatccaagattggtctcccatatgcagaaatagacaaaaagtatattaaacaaagtttcagagtatattgttgaagagacagagacaagtaatttcagtgtaaagtgtgtgattgaaggtgataagggaaaagataaagaccagaaattcccttttcaccttttcaggaaaataacttagactctagtatttatgggtggatttatccttttgccttctggtatacttccttacttttaaggataaatcataaagtcagttgctcaaaaagaaatcaatagttgaattagtgagtatagtggggttccatgagttatcatgaattttaaagtatgcattattaaattgtaaaactccaaggtgatgttgtacctcttttgcttgccaaagtacagaatttgaattatcagcaaagaaaaaaaaaaaagccagccaagctttaaattatgtgaccataatgtactgatttcagtaagtctcataggttaaaaaaaaaagtcaccaaatagtgtgaaatatattacttaactgtccgtaagcagtatattagtattatcttgttcaggaaaaggttgaataatatatgccttgtataatattgaaaattgaaaagtacaactaacgcaaccaagtgtgctaaaaatgagcttgattaaatcaaccacctatttttgacatggaaatgaagcagggtttcttttcttcactcaaattttggcgaatctcaaaattagatcctaagatgtgttcttatttttataacatctttattgaaattctatttataatacagaatcttgttttgaaaataacctaattaatatattaaaattccaaattcatggcatgcttaaattttaactaaattttaaagccattctgattattgagttccagttgaagttagtggaaatctgaacattctcctgtggaaggcagagaaatctaagctgtgtctgcccaatgaataatggaaaatgccatgaattacctggatgttctttttacgaggtgacaagagttggggacagaactcccattacaactgaccaagtttctcttctagatgattttttgaaagttaacattaatgcctgctttttggaaagtcagaatcagaagatagtcttggaagctgtttggaaaagacagtggagatgaggtcagttgtgttttttaagatggcaattactttggtagctgggaaagcataaagctcaaatgaaatgtatgcattcacatttagaaaagtgaattgaagtttcaagttttaaagttcattgcaattaaacttccaaagaaagttctacagtgtcctaagtgctaagtgcttattacattttattaagctttttggaatctttgtaccaaaattttaaaaaagggagtttttgatagttgtgtgtatgtgtgtgtggggtggggggatggtaagagaaaagagagaaacactgaaaagaaggaaagatggttaaacattttcccactcattctgaattaattaatttggagcacaaaattcaaagcatggacatttagaagaaagatgtttggcgtagcagagttaaatctcaaataggctattaaaaaagtctacaacatagcagatctgttttgtggtttggaatattaaaaaacttcatgtaattttattttaaaatttcatagctgtacttcttgaatataaaaaatcatgccagtatttttaaaggcattagagtcaactacacaaagcaggcttgcccagtacatttaaattttttggcacttgccattccaaaatattatgccccaccaaggctgagacagtgaatttgggctgctgtagcctatttttttagattgagaaatgtgtagctgcaaaaataatcatgaaccaatctggatgcctcattatgtcaaccaggtccagatgtgctataatctgtttttacgtatgtaggcccagtcgtcatcagatgcttgcggcaaaaggaaagctgtgtttatatggaagaaagtaaggtgcttggagtttacctggcttatttaatatgcttataacctagttaaagaaaggaaaagaaaacaaaaaacgaatgaaaataactgaatttggaggctggagtaatcagattactgctttaatcagaaaccctcattgtgtttctaccggagagagaatgtatttgctgacaaccattaaagtcagaagttttactccaggttattgcaataaagtataatgtttattaaatgcttcatttgtatgtcaaagctttgactctataagcaaattgcttttttccaaaacaaaaagatgtctcaggtttgttttgtgaattttctaaaagctttcatgtcccagaacttagcctttacctgtgaagtgttactacagccttaatattttcctagtagatctatattagatcaaatagttgcatagcagtatatgttaatttgtgtgtttttagctgtgacacaactgtgtgattaaaaggtatactttagtagacatttataactcaaggataccttcttatttaatcttttcttatttttgtactttatcatgaatgcttttagtgtgtgcataatagctacagtgcatagttgtagacaaagtacattctggggaaacaacatttatatgtagcctttactgtttgatataccaaattaaaaaaaaattgtatctcattacttatactgggacaccattaccaaaataataaaaatcactttcataatcttgaaaaaa

SEQ ID NO: 375 - DNA, 3579 bp, Homo Sapiens
  NM_000108
gatgacgtaggctgcgcctgtgcatgcgcagggaggggagaccttggcggagcggcggaggcgcccagcggaggtgaaagtattggcggaaaggaaaatacagcggaaaaatgcagagctggagtcgtgtgtactgctccttggccaagagaggccatttcaatcgaatatctcatggcctacagggactttctgcagtgcctctgagaacttacgcagatcagccgattgatgctgatgtaacagttataggttctggtcctggaggatatgttgctgctattaaagctgcccagttaggcttcaagacagtctgcattgagaaaaatgaaacacttggtggaacatgcttgaatgttggttgtattccttctaaggctttattgaacaactctcattattaccatatggcccatggaaaagattttgcatctagaggaattgaaatgtccgaagttcgcttgaatttagacaagatgatggagcagaagagtactgcagtaaaagctttaacaggtggaattgcccacttattcaaacagaataaggttgttcatgtcaatggatatggaaagataactggcaaaaatcaagtcactgctacgaaagctgatggcggcactcaggttattgatacaaagaacattcttatagccacgggttcagaagttactccttttcctggaatcacgatagatgaagatacaatagtgtcatctacaggtgctttatctttaaaaaaagttccagaaaagatggttgttattggtgcaggagtaataggtgtagaattgggttcagtttggcaaagacttggtgcagatgtgacagcagttgaatttttaggtcatgtaggtggagttggaattgatatggagatatctaaaaactttcaacgcatccttcaaaaacaggggtttaaatttaaattgaatacaaaggttactggtgctaccaagaagtcagatggaaaaattgatgtttctattgaagctgcttctggtggtaaagctgaagttatcacttgtgatgtactcttggtttgcattggccgacgaccctttactaagaatttgggactagaagagctgggaattgaactagatcccagaggtagaattccagtcaataccagatttcaaactaaaattccaaatatctatgccattggtgatgtagttgctggtccaatgctggctcacaaagcagaggatgaaggcattatctgtgttgaaggaatggctggtggtgctgtgcacattgactacaattgtgtgccatcagtgatttacacacaccctgaagttgcttgggttggcaaatcagaagagcagttgaaagaagagggtattgagtacaaagttgggaaattcccatttgctgctaacagcagagctaagacaaatgctgacacagatggcatggtgaagatccttgggcagaaatcgacagacagagtactgggagcacatattcttggaccaggtgctggagaaatggtaaatgaagctgctcttgctttggaatatggagcatcctgtgaagatatagctagagtctgtcatgcacatccgaccttatcagaagcttttagagaagcaaatcttgctgcgtcatttggcaaatcaatcaacttttgaattagaagattatatatatttttttctgaaatttcctgggagcttttgtagaagtcacattcctgaacaggatattctcacagctccaagaatttctaggactgaattatgaaacttttggaaggtatttaataggtttggacaaaatggaatactcttatatctatattttacataaatttagtattttgtttcagtgcactaatgtgtaagacaaaaagctacttattgtagcatcctggaatatctccgtcaactcatattttcatgctgttcatgaaagattcaatgcccctgaatttaaatagcttttttctctgatacagaaaagttgaattttacatggctggagctagaatttgatatgtgaacagttgtgtttgaagcacagtgatcaagttatttttaatttggttttcacattggaaacaagtcagtcattcagatatgattcaaatgtctataaaccgaactgatgtaagtaaacggtctctcacttgttttatttaacctctaaattctttcattttaggggtagcatttgtgttgaagaggttttaaagcttccattgttgtctgcaactctgaagggtaattatatagttacccaaattaagagagtctatttacggaactcaaatacgtgggcattcaaatgtattacagtggggaatgaagatactgaaataaacgtcttaaatattcatttactggttatcatgagtacgtgttgagatggtcatagttttttttatgactacttctagtgtatattctaatttcttttctaggcctgaatgtatctttattttcatgttataggacaatattaaggcattttaaaggtcatcatcctttcatctattttagatacacctactaaatgtttaatatatacttttggagaagtacaacataagggagtctttaatctgtgttttccttggctgggttaatgactgtttatttaaagagtgttgtaaaattggatgtgtggtgtttaaaatggccatgtcctgaggaaacttaagtaacaaagtactaaatgctaagtaggcttttgcatattgtaactaaatttaagaataattcagattaagtagttctgaaatttggtatagatagcatagattgtctcatgctcatgagtgacataatgaccctggattctgttacatacttctaaagaaaattgattgttgtcttaggaggcagttaacttggctgaacaccaactccacactctgtcttgtttgtaggtggcagcagctgaaatctcttctcagttgttttagctttagctatgctgctggaagtctttcccatgcaagtgtgtagttcaggggtcaaccagagtttgggcagaaggaagtctgccccttctgtgcctcctgttttttgggggtttcccctttatgttccagctgttgtggttgccccatattctgccttctgatccttaaccaataaaacttggcttttgtttccccctcaagtgagaacccgttaaaaatgagacattgagccagtgctgttcactttttaagtgccaacttccctctactttccacttgtttatagttgtttccagtgcctttagttttttctaaaatatatttgttcagagtttgcagttgctatcagcaggagggttggtctgatatctgtgtgctactttgccattattggaagtgaactctgcatctttttaaaaatttgaaatcccggtatcatgtgaagtgctgtttatgtaaatctcaacatatcccttactcagggaaaaaaaagtttttagttagggaatagtgaaatataatttaatatggaattctagctgtagagttaaatccatctttaagtgtttacattcagtatgagaatgcaaatttatctgtatggggaataaagtcctaggaataaaacaagttttaagtgttca

SEQ ID NO: 376 - DNA, 2117 bp, Homo Sapiens
  NM_000113
gaaccggaagcgtgggtctggcggctgcaccggttcgcggtcggcgcgagaacaagcagggtggcgcgggtccgggcatgaagctgggccgggccgtgctgggcctgctgctgctggcgccgtccgtggtgcaggcggtggagcccatcagcctgggactggccctggccggcgtcctcaccggctacatctacccgcgtctctactgcctcttcgccgagtgctgcgggcagaagcggagccttagccgggaggcactgcagaaggatctggacgacaacctctttggacagcatcttgcaaagaaaatcatcttaaatgccgtgtttggtttcataaacaacccaaagcccaagaaacctctcacgctctccctgcacgggtggacaggcaccggcaaaaatttcgtcagcaagatcatcgcagagaatatttacgagggtggtctgaacagtgactatgtccacctgtttgtggccacattgcactttccacatgcttcaaacatcaccttgtacaaggatcagttacagttgtggattcgaggcaacgtgagtgcctgtgcgaggtccatcttcatatttgatgaaatggataagatgcatgcaggcctcatagatgccatcaagcctttcctcgactattatgacctggtggatggggtctcctaccagaaagccatgttcatatttctcagcaatgctggagcagaaaggatcacagatgtggctttggatttctggaggagtggaaagcagagggaagacatcaagctcaaagacattgaacacgcgttgtctgtgtcggttttcaataacaagaacagtggcttctggcacagcagcttaattgaccggaacctcattgattattttgttcccttcctccccctggaatacaaacacctaaaaatgtgtatccgagtggaaatgcagtcccgaggctatgaaattgatgaagacattgtaagcagagtggctgaggagatgacatttttccccaaagaggagagagttttctcagataaaggctgcaaaacggtgttcaccaagttagattattactacgatgattgacagtcatgattggcagccggagtcactgcctggagttggaaaagaaacaacactcagtccttccacacttccacccccagctcctttccctggaagaggaatccagtgaatgttcctgtttgatgtgacaggaattctccctggcattgtttccaccccctggtgcctgcaggccacccagggaccacgggcgaggacgtgaagcctcccgaacacgcacagaaggaaggagccagctcccagcccactcatcgcagggctcatgattttttacaaattatgttttaattccaagtgtttctgtttcaaggaaggatgaataagttttattgaaaatgtggtaactttatttaaaatgatttttaacattatgagagactgctcagattctaagttgttggccttgtgtgtgtgtttttttttaagttctcatcattattacatagactgtgatgtatctttactggaaatgagcccaagcacacatgcatggcatttgttccacaggagggcatccctggggatgtggctggagcatgagccagctctgtcccaggatggtcccagcggatgctgccaggggcagtgaagtgtttaggtgaaggacaagtaggtaagaggacgccttcaggcaccacagataagcctgaaacagcctctccaagggttttcaccttagcaacaatgggagctgtgggagtgattttggccacactgtcaacatttgttagaaccagtcttttgaaagaaaagtatttccaacttgtcacttgccagtcactccgttttgcaaaaggtggcccttcactgtccattccaaatagcccacacgtgctctctgctggattctaaattatgtgaattttgccatattaaatcttcctcatttatactattatttgttacgttcaatcagaatccccgaaacctcctataaagcttagctgccccttctgaggatgctgagaacggtgtctttctttataaatgcaaatggctaccgttttacaataaaattttgcatgtgccaaaaaaaaaaaa

SEQ ID NO: 377 - DNA, 4296 bp, Homo Sapiens
  NM_000115
acattccggtgggggactctggccagcccgagcaacgtggatcctgagagcactcccaggtaggcatttgccccggtgggacgccttgccagagcagtgtgtggcaggcccccgtggaggatcaacacagtggctgaacactgggaaggaactggtacttggagtctggacatctgaaacttggctctgaaactgcggagcggccaccggacgccttctggagcaggtagcagcatgcagccgcctccaagtctgtgcggacgcgccctggttgcgctggttcttgcctgcggcctgtcgcggatctggggagaggagagaggcttcccgcctgacagggccactccgcttttgcaaaccgcagagataatgacgccacccactaagaccttatggcccaagggttccaacgccagtctggcgcggtcgttggcacctgcggaggtgcctaaaggagacaggacggcaggatctccgccacgcaccatctcccctcccccgtgccaaggacccatcgagatcaaggagactttcaaatacatcaacacggttgtgtcctgccttgtgttcgtgctggggatcatcgggaactccacacttctgagaattatctacaagaacaagtgcatgcgaaacggtcccaatatcttgatcgccagcttggctctgggagacctgctgcacatcgtcattgacatccctatcaatgtctacaagctgctggcagaggactggccatttggagctgagatgtgtaagctggtgcctttcatacagaaagcctccgtgggaatcactgtgctgagtctatgtgctctgagtattgacagatatcgagctgttgcttcttggagtagaattaaaggaattggggttccaaaatggacagcagtagaaattgttttgatttgggtggtctctgtggttctggctgtccctgaagccataggttttgatataattacgatggactacaaaggaagttatctgcgaatctgcttgcttcatcccgttcagaagacagctttcatgcagttttacaagacagcaaaagattggtggctattcagtttctatttctgcttgccattggccatcactgcatttttttatacactaatgacctgtgaaatgttgagaaagaaaagtggcatgcagattgctttaaatgatcacctaaagcagagacgggaagtggccaaaaccgtcttttgcctggtccttgtctttgccctctgctggcttccccttcacctcagcaggattctgaagctcactctttataatcagaatgatcccaatagatgtgaacttttgagctttctgttggtattggactatattggtatcaacatggcttcactgaattcctgcattaacccaattgctctgtatttggtgagcaaaagattcaaaaactgctttaagtcatgcttatgctgctggtgccagtcatttgaagaaaaacagtccttggaggaaaagcagtcgtgcttaaagttcaaagctaatgatcacggatatgacaacttccgttccagtaataaatacagctcatcttgaaagaagaactattcactgtatttcattttctttatattggaccgaagtcattaaaacaaaatgaaacatttgccaaaacaaaacaaaaaactatgtatttgcacagcacactattaaaatattaagtgtaattattttaacactcacagctacatatgacattttatgagctgtttacggcatggaaagaaaatcagtgggaattaagaaagcctcgtcgtgaaagcacttaattttttacagttagcacttcaacatagctcttaacaacttccaggatattcacacaacacttaggcttaaaaatgagctcactcagaatttctattctttctaaaaagagatttatttttaaatcaatgggactctgatataaaggaagaataagtcactgtaaaacagaacttttaaatgaagcttaaattactcaatttaaaattttaaaatcctttaaaacaacttttcaattaatattatcacactattatcagattgtaattagatgcaaatgagagagcagtttagttgttgcatttttcggacactggaaacatttaaatgatcaggagggagtaacagaaagagcaaggctgtttttgaaaatcattacactttcactagaagcccaaacctcagcattctgcaatatgtaaccaacatgtcacaaacaagcagcatgtaacagactggcacatgtgccagctgaatttaaaatataatacttttaaaaagaaaattattacatcctttacattcagttaagatcaaacctcacaaagagaaatagaatgtttgaaaggctatcccaaaagacttttttgaatctgtcattcacataccctgtgaagacaatactatctacaattttttcaggattattaaaatcttcttctttcactatcgtagcttaaactctgtttggttttgtcatctgtaaatacttacctacatacactgcatgtagatgattaaatgagggcaggccctgtgctcatagctttacgatggagagatgccagtgacctcataataaagactgtgaactgcctggtgcagtgtccacatgacaaaggggcaggtagcaccctctctcacccatgctgtggttaaaatggtttctagcatatgtataatgctatagttaaaatactatttttcaaaatcatacagattagtacatttaacagctacctgtaaagcttattactaatttttgtattatttttgtaaatagccaatagaaaagtttgcttgacatggtgcttttctttcatctagaggcaaaactgctttttgagaccgtaagaacctcttagctttgtgcgttcctgcctaatttttatatcttctaagcaaagtgccttaggatagcttgggatgagatgtgtgtgaaagtatgtacaagagaaaacggaagagagaggaaatgaggtggggttggaggaaacccatggggacagattcccattcttagcctaacgttcgtcattgcctcgtcacatcaatgcaaaaggtcctgattttgttccagcaaaacacagtgcaatgttctcagagtgactttcgaaataaattgggcccaagagctttaactcggtcttaaaatatgcccaaatttttactttgtttttcttttaataggctgggccacatgttggaaataagctagtaatgttgttttctgtcaatattgaatgtgatggtacagtaaaccaaaacccaacaatgtggccagaaagaaagagcaataataattaattcacacaccatatggattctatttataaatcacccacaaacttgttctttaatttcatcccaatcactttttcagaggcctgttatcatagaagtcattttagactctcaattttaaattaattttgaatcactaatattttcacagtttattaatatatttaatttctatttaaattttagattatttttattaccatgtactgaatttttacatcctgataccctttccttctccatgtcagtatcatgttctctaattatcttgccaaattttgaaactacacacaaaaagcatacttgcattatttataataaaattgcattcagtggctttttaaaaaaatgtttgattcaaaactttaacatactgataagtaagaaacaattataatttctttacatactcaaaaccaagatagaaaaaggtgctatcgttcaacttcaaaacatgtttcctagtattaaggactttaatatagcaacagacaaaattattgttaacatggatgttacagctcaaaagatttataaaagattttaacctattttctcccttattatccactgctaatgtggatgtatgttcaaacaccttttagtattgatagcttacatatggccaaaggaatacagtttatagcaaaacatgggtatgctgtagctaactttataaaagtgtaatataacaatgtaaaaaattatatatctgggaggattttttggttgcctaaagtggctatagttactgattttttattatgtaagcaaaaccaataaaaatttaagtttttttaacaactaccttatttttcactgtacagacactaattcattaaatactaattgattgtttaaaagaaatataaatgtgacaagtggacattatttatgttaaatatacaattatcaagcaagtatgaagttattcaattaaaatgccacatttctggtctctgggaaaaaaaaaaaaaa

SEQ ID NO: 378 - DNA, 1370 bp, Homo Sapiens
  NM_000117
cacggccggtctgtgccggctgctcccgcggttaggtcccgccccgcgcagcgcgcgcagcctgcggagccagcggccgtgacgcgacaacgattcggctgtgacgcgacaacgattcggctgtgacgcgagcgcggccgctcccgatgcgctcgtgccgcccccgccgtgctcctcggcagccgttgctcggccggttttggtaggcccgggccgccgccaggcctccgcctgagcccgcacccgccatggacaactacgcagatctttcggataccgagctgaccaccttgctgcgccggtacaacatcccgcacgggcctgtagtaggatcaactcgtaggctttacgagaagaagatcttcgagtacgagacccagaggcggcggctctcgccccccagctcgtccgccgcctcctcttatagcttctctgacttgaattcgactagaggggatgcagatatgtatgatcttcccaagaaagaggacgctttactctaccagagcaagggctacaatgacgactactatgaagagagctacttcaccaccaggacttatggggagcccgagtctgccggcccgtccagggctgtccgccagtcagtgacttcattcccagatgctgacgctttccatcaccaggtgcatgatgacgatcttttgtcttcttctgaagaggagtgcaaggatagggaacgccccatgtacggccgggacagtgcctaccagagcatcacgcactaccgccctgtttcagcctccaggagctccctggacctgtcctattatcctacttcctcctccacctcttttatgtcctcctcatcatcttcctcttcatggctcacccgccgtgccatccggcctgaaaaccgtgctcctggggctgggctgggccaggatcgccaggtcccgctctggggccagctgctgcttttcctggtctttgtgatcgtcctcttcttcatttaccacttcatgcaggctgaagaaggcaaccccttctagagggagccatgagggtctgggcttcagagctaggtctttggggaagtcctggctgactgccttagcagtgggggtgggggtgggggcaggggcaggggctttatgtgtttttgcttggggggcgctgggcctagcccagagtagtgcttgctccccctgccttgtcccaccagggaggcagcagactcaggccctccatggtcctctttgtcattttgttgacatgcattcctccttttgtcatcttgttggggggaggggattaaccaaaggccaccctgactttgtttttgtggacacacaataaaagccccgtttatttgtaaaaaaaaaaaaaaaaaaaaaaaaaaaaaaaaa

SEQ ID NO: 379 - DNA, 3196 bp, Homo Sapiens
  NM_000118
ctctacccggttggcaggcggcctggcccagccccttctctaaggaagcgcatttcctgcctccctgggccggccgggctggatgagccgggagctccctgctgccggtcataccacagccttcatctgcgccctggggccaggactgctgctgtcactgccatccattggagcccagcaccccctccccgcccatccttcggacagcaactccagcccagccccgcgtccctgtgtccacttctcctgacccctcggccgccaccccagaaggctggagcagggacgccgtcgctccggccgcctgctcccctcgggtccccgtgcgagcccacgccggccccggtgcccgcccgcagccctgccactggacacaggataaggcccagcgcacaggcccccacgtggacagcatggaccgcggcacgctccctctggctgttgccctgctgctggccagctgcagcctcagccccacaagtcttgcagaaacagtccattgtgaccttcagcctgtgggccccgagaggggcgaggtgacatataccactagccaggtctcgaagggctgcgtggctcaggcccccaatgccatccttgaagtccatgtcctcttcctggagttcccaacgggcccgtcacagctggagctgactctccaggcatccaagcaaaatggcacctggccccgagaggtgcttctggtcctcagtgtaaacagcagtgtcttcctgcatctccaggccctgggaatcccactgcacttggcctacaattccagcctggtcaccttccaagagcccccgggggtcaacaccacagagctgccatccttccccaagacccagatccttgagtgggcagctgagaggggccccatcacctctgctgctgagctgaatgacccccagagcatcctcctccgactgggccaagcccaggggtcactgtccttctgcatgctggaagccagccaggacatgggccgcacgctcgagtggcggccgcgtactccagccttggtccggggctgccacttggaaggcgtggccggccacaaggaggcgcacatcctgagggtcctgccgggccactcggccgggccccggacggtgacggtgaaggtggaactgagctgcgcacccggggatctcgatgccgtcctcatcctgcagggtcccccctacgtgtcctggctcatcgacgccaaccacaacatgcagatctggaccactggagaatactccttcaagatctttccagagaaaaacattcgtggcttcaagctcccagacacacctcaaggcctcctgggggaggcccggatgctcaatgccagcattgtggcatccttcgtggagctaccgctggccagcattgtctcacttcatgcctccagctgcggtggtaggctgcagacctcacccgcaccgatccagaccactcctcccaaggacacttgtagcccggagctgctcatgtccttgatccagacaaagtgtgccgacgacgccatgaccctggtactaaagaaagagcttgttgcgcatttgaagtgcaccatcacgggcctgaccttctgggaccccagctgtgaggcagaggacaggggtgacaagtttgtcttgcgcagtgcttactccagctgtggcatgcaggtgtcagcaagtatgatcagcaatgaggcggtggtcaatatcctgtcgagctcatcaccacagcggaaaaaggtgcactgcctcaacatggacagcctctctttccagctgggcctctacctcagcccacacttcctccaggcctccaacaccatcgagccggggcagcagagctttgtgcaggtcagagtgtccccatccgtctccgagttcctgctccagttagacagctgccacctggacttggggcctgagggaggcaccgtggaactcatccagggccgggcggccaagggcaactgtgtgagcctgctgtccccaagccccgagggtgacccgcgcttcagcttcctcctccacttctacacagtacccatacccaaaaccggcaccctcagctgcacggtagccctgcgtcccaagaccgggtctcaagaccaggaagtccataggactgtcttcatgcgcttgaacatcatcagccctgacctgtctggttgcacaagcaaaggcctcgtcctgcccgccgtgctgggcatcacctttggtgccttcctcatcggggccctgctcactgctgcactctggtacatctactcgcacacgcgtgagtaccccaggcccccacagtgagcatgccgggcccctccatccacccgggggagcccagtgaagcctctgagggattgaggggccctggccaggaccctgacctccgcccctgcccccgctcccgctcccaggttcccccagcaagcgggagcccgtggtggcggtggctgccccggcctcctcggagagcagcagcaccaaccacagcatcgggagcacccagagcaccccctgctccaccagcagcatggcatagccccggccccccgcgctcgcccagcaggagagactgagcagccgccagctgggagcactggtgtgaactcaccctgggagccagtcctccactcgacccagaatggagcctgctctccgcgcctacccttcccgcctccctctcagaggcctgctgccagtgcagccactggcttggaacaccttggggtccctccaccccacagaaccttcaacccagtgggtctgggatatggctgcccaggagacagaccacttgccacgctgttgtaaaaacccaagtccctgtcatttgaacctggatccagcactggtgaactgagctgggcaggaagggagaacttgaaacagattcaggccagcccagccaggccaacagcacctccccgctgggaagagaagagggcccagcccagagccacctggatctatccctgcggcctccacacctgaacttgcctaactaactggcaggggagacaggagcctagcggagcccagcctgggagcccagagggtggcaagaacagtgggcgttgggagcctagctcctgccacatggagccccctctgccggtcgggcagccagcagagggggagtagccaagctgcttgtcctgggcctgcccctgtgtattcaccaccaataaatcagaccatgaaaccagtga

SEQ ID NO: 380 - DNA, 2751 bp, Homo Sapiens
  NM_000122
gggagcttccggattgagccggaagtccccccagagcggatgccgcggcgggcctgtgggagcggggtcatcttctctctgctgctgtagctgccatgggcaaaagagaccgagcggaccgcgacaagaagaaatccaggaagcggcactatgaggatgaagaggatgatgaagaggacgccccggggaacgaccctcaggaagcggttccctcggcggcggggaagcaggtggatgagtcaggcaccaaagtggatgaatatggagccaaggactacaggctgcaaatgccgctgaaggacgaccacacctccaggcccctctgggtggctcccgatggccatatcttcttggaagccttctctccagtttacaaatatgcccaagacttcttggtggctattgcagagccagtgtgccgaccaacccatgtgcatgagtacaaactaactgcctactccttgtatgcagctgtcagcgttgggctgcaaaccagtgacatcaccgagtacctcaggaagctcagcaagactggagtccctgatggaattatgcagtttattaagttgtgtactgtcagctatggaaaagtcaagctggtcttgaagcacaacagatacttcgttgaaagttgccaccctgatgtaatccagcatcttctccaggaccccgtgatccgagaatgccgcttaagaaactctgaaggggaggccactgagctcatcacagagactttcacaagcaaatctgccatttctaagactgctgaaagcagtggtgggccctccacttcccgagtgacagatccacagggtaaatctgacatccccatggacctgtttgacttctatgagcaaatggacaaggatgaagaagaagaagaagagacacagacagtgtcttttgaagtcaagcaggaaatgattgaggaactccagaaacgttgcatccacctggagtaccctctgttggcagaatatgacttccggaatgattctgtcaaccctgatatcaacattgacctaaagcccacagctgtcctcagaccctatcaggagaagagcttgcgaaagatgtttggaaacgggcgtgcacgttcgggggtcattgttcttccctgcggtgctggaaagtccctggttggtgtgactgctgcatgcactgtcagaaaacgctgtctggtgctgggcaactcagctgtttctgtggagcagtggaaagcccagttcaagatgtggtccaccattgacgacagccagatctgccggttcacctccgatgccaaggacaagcccatcggctgctccgttgccattagcacctactccatgctgggccacaccaccaaaaggtcctgggaggccgagcgagtcatggagtggctcaagacccaggagtggggcctcatgatcctggatgaagtgcacaccataccagccaagatgttccgaagggtgctcaccatcgtgcaggcccactgtaagctgggtttgactgcgaccctcgtccgcgaagatgacaaaattgtggatttaaattttctgattgggcctaagctctacgaagccaactggatggagctgcagaataatggctacatcgccaaagtccagtgtgctgaggtctggtgccctatgtctcctgaattttaccgggaatatgtggcaatcaaaaccaagaaacgaatcttgctgtacaccatgaaccccaacaaatttagagcttgccagtttctgatcaagtttcatgaaaggaggaatgacaagattattgtctttgctgacaatgtgtttgccctaaaggaatatgccattcgactgaacaaaccctatatctacggacctacgtctcagggggaaaggatgcaaattctccagaatttcaagcacaaccccaaaattaacaccatcttcatatccaaggtaggtgacacttcgtttgatctgccggaagcaaatgtcctcattcagatctcatcccatggtggctccaggcgtcaggaagcccaaaggctagggcgggtgcttcgagctaaaaaagggatggttgcagaagagtacaatgcctttttctactcactggtatcccaggacacacaggaaatggcttactcaaccaagcggcagagattcttggtagatcaaggttatagcttcaaggtgatcacgaaactcgctggcatggaggaggaagacttggcgttttcgacaaaagaagagcaacagcagctcttacagaaagtcctggcagccactgacctggatgccgaggaggaggtggtggctggggaatttggctccagatccagccaggcatctcggcgctttggcaccatgagttctatgtctggggccgacgacactgtgtacatggagtaccactcatcgcggagcaaggcgcccagcaaacatgtacacccgctcttcaagcgctttaggaaatgatgcttaggcagggtacttcgttcaagaccggcgcttggcacccttgttggaaagggattttcagcataacattttccttccacctctttgaccttccctccagcgttggccaaattgtgctgaggaagatgcatcaagggcttggctgtgccttcataggtcatctagggttttataaaggaggaggagacaatattttttcaaactttttggggagtggggtcatttctgtatataaaaaatgttaatatttaaggtgtatttatgttaccgttctgaataaacagaatggaccattgaaccagta

SEQ ID NO: 381 - DNA, 4100 bp, Homo Sapiens
  NM_000123
ggaaaccgagcgggcccatttttcatgggtttgcggacccaccagcgaaggcgggaggtgtcgcagggacatcttctggctgtttccgtcgcctgcgtggcccttgcaccccggtcttccattagcggcgcagacgtttgggcctaagcgctgggcgaggcgaggccctgcccctccccgccaacggccattctctggacctgtctttcttccgggaggcggtgacagctgctgagacgtgttgcagccagagtctctccgctttaatgcgctcccattagtgccgtcccccactggaaaaccgtggcttctgtattatttgccatctttgttgtgtaggagcagggagggcttcctcccggggtcctaggcggcggtgcagtccgtcgtagaagaattagagtagaagttgtcggggtccgctcttaggacgcagccgcctcatgggggtccaggggctctggaagctgctggagtgctccgggcggcaggtcagccccgaagcgctggaagggaagatcctggctgttgatattagcatttggttaaaccaagcacttaaaggagtccgggatcgccatgggaactcaatagaaaatcctcatcttctcactttgtttcatcggctctgcaaactcttattttttcgaattcgtcctatttttgtgtttgatggggatgctccactattgaagaaacagactttggtgaagagaaggcagagaaaggacttagcgtccagtgactccaggaaaacgacagagaagcttctgaaaacatttttgaaaagacaagccatcaaaactgccttcagaagcaaaagagatgaagcactacccagtcttacccaagttcgaagagaaaacgacctctatgttttgcctcctttacaagaggaagaaaaacacagttcagaagaggaagatgaaaaagaatggcaagaaagaatgaatcaaaaacaagcattacaggaagagttctttcataatcctcaagcgatagatattgagtctgaggacttcagcagcctgccccctgaagtaaagcatgaaatcttgactgatatgaaagagttcaccaagcgcagaagaacattatttgaagcaatgccagaggagtctgatgacttttcacagtaccaactcaaaggcttgcttaaaaagaactatctgaaccagcatatagaacatgtccaaaaggaaatgaatcagcaacattcaggacacatccgaaggcagtatgaagatgaagggggctttctgaaggaggtagagtcaaggagagtggtctctgaagacacttcacattacatcttgataaaaggtattcaagctaagacagttgcagaagtggattcagagtctcttccttcttccagcaaaatgcacggcatgtcttttgacgtgaagtcatctccatgtgaaaaactgaagacagagaaagagcctgatgctacccctccttctccaagaactttactagctatgcaagctgccctgctgggaagtagctcagaagaggagctggagagtgaaaatcgaaggcaggcccgtgggaggaacgcacctgctgctgtagacgaaggctccatatcaccccggactctttcagccattaagagagctcttgacgatgacgaagatgtaaaagtgtgtgctggggatgatgtgcagacgggagggccaggagcagaagaaatgcgtataaacagctccaccgagaacagtgatgaaggacttaaagtgagagatggaaaaggaataccgtttactgcaacacttgcgtcatctagtgtgaactctgcagaggagcacgtagccagcactaatgaggggagagagcccacagactcagttccaaaagaacaaatgtcacttgttcacgtggggactgaagcctttccgataagtgatgagtctatgattaaggacagaaaagatcggctgcctctggagagtgcagtggttagacatagtgacgcacctgggctcccgaatggaagggaactgacaccggcatctccaacttgtacaaattctgtgtcaaagaatgaaacacatgctgaagtgcttgagcagcagaacgaactttgcccatatgagagtaaattcgattcttctcttctttcaagtgatgatgaaacaaaatgtaaaccgaattctgcttctgaagtcattggccctgtcagtttgcaagaaacaagtagcatagtaagtgtcccttcagaggcagtagataatgtggaaaatgtggtgtcatttaatgctaaagagcatgagaattttctggaaaccatccaagaacagcagaccactgaatctgcaggccaggatttaatttccattccaaaggccgtggaaccaatggaaattgactcggaagaaagtgaatctgatggaagtttcattgaagtgcaaagtgtgattagtgatgaggaacttcaagcagaattccctgaaacttccaaacctccctcagaacaaggcgaagaggaactggtaggaactagggagggagaagcccctgctgagtccgagagcctcctgagggacaactctgagagggacgacgtggatggtgagccacaggaagctgagaaagatgcggaagattcgctccatgaatggcaagatattaatttggaggagttggaaactctggagagcaacctcttagcacagcagaattcactgaaagctcaaaaacagcagcaagaacggatcgctgctactgtcaccggacagatgttcctggaaagccaggaactcctgcgcctgttcggcattccctacatccaggctcccatggaagcagaggcgcagtgcgccatcctggacctgactgatcagacttccggaaccatcactgatgacagtgatatctggctgtttggagcgcggcatgtctatagaaacttttttaataaaaacaagtttgtagaatattatcaatatgtggactttcacaatcaattgggattggaccggaataagttaataaatttggcttatttgcttggaagtgattataccgaaggaataccaactgtgggttgtgtaaccgccatggaaattctcaatgaattccctgggcatggcctggaacctctcctaaaattctcagaatggtggcatgaagctcaaaaaaatccaaagataagacctaatcctcatgacaccaaagtgaaaaaaaaattacggacattgcaactcacccctggctttcctaacccagctgttgccgaggcctacctcaaacccgtggtggatgactcgaagggatcctttctgtgggggaaacctgatctcgacaaaattagagaattttgtcagcggtatttcggctggaacagaacgaagacagatgaatctctgtttcctgtattaaagcaactcgatgcccagcagacacagctccgaattgattccttctttagattagcacaacaggagaaagaagatgctaaacgtattaagagccagagactaaacagagctgtgacatgtatgctaaggaaagagaaagaagcagcagccagcgaaatagaagcagtttctgttgccatggagaaagaatttgagctacttgataaggcaaaacgaaaaacccagaagagaggcataacaaataccttagaagagtcatcaagcctgaaaagaaagaggctttcagattctaaacgaaagaatacatgcggtggatttttgggggagacctgcctctcagaatcatctgatggatcttcaagtgaagatgctgaaagttcatctttaatgaatgtacaaaggagaacagctgcgaaagagccaaaaaccagtgcttcagattcgcagaactcagtgaaggaagctcccgtgaagaatggaggtgcgaccaccagcagctctagtgatagtgatgacgatggagggaaagagaagatggtcctcgtgaccgccagatctgtgtttgggaagaaaagaaggaaactaagacgtgcgaggggaagaaaaaggaaaacctaattaaaaaatatgtatcctctataattagttatgacagccatttgtaatgaatttgtcgcaaagacgtaataaaattaactggtggcacggtcaaaa

SEQ ID NO: 382 - DNA, 3376 bp, Homo Sapiens
  NM_000127
ggcgaccgaacgcggcggtcggcagcgttcgcgcgggggcctgcgaagcgctgctcggggccggcactgcccgcggggaggacgcgccgccgccgccacccagcgccgccgccgccgccgcctccagccgggccgccgcgcgtcccgggggccggccccgcgagcgcaggagtaaacaccgccggagtcttggagccgctgcagaagggaataaagagagatgcagggatttgtgaggttacggcgccccagctgcaagatgcactagccggctgaacccgggatcggctgacttgttggaaccggagtgctctgcacggagagtggtggatgagttgaagttgccttcccggggctcattttccacgctgccgagaggaatccgagaggcaaggcaatcacttcgtcttgccattgattgggtatcgggagctttttttttctcccctctctctttcttttcctccgtcttgttgcatgcaagaaaattacagtccgctgctcgcccgccctgggtgcgagatattcagccccgctctctcccgtgcattgtgcaacccaaagatgaaagaccgaaggggagaaagttaaagaaatcgcccacatgcgctggatcagtccacggcttggggaaaggcatccagagaaggtgggagcggagagtttgaagtctttacaggcgggaagatggcggactggagctgaaagtgttgattgggaaacttgggtgattcttgtgtttatttacaatcctcttgacccaggcaggacacatgcaggccaaaaaacgctatttcatcctgctctcagctggctcttgtctcgcccttttgttttatttcggaggcttgcagtttagggcatcgaggagccacagccggagagaagaacacagcggtaggaatggcttgcaccaccccagtccggatcatttctggccccgcttcccggacgctctgcgccccttcgttccttgggatcaattggaaaacgaggattccagcgtgcacatttccccccggcagaagcgagatgccaactccagcatctacaaaggcaagaagtgccgcatggagtcctgcttcgatttcaccctttgcaagaaaaacggcttcaaagtctacgtatacccacagcaaaaaggggagaaaatcgccgaaagttaccaaaacattctagcggccatcgagggctccaggttctacacctcggaccccagccaggcgtgcctctttgtcctgagtctggatactttagacagagaccagttgtcacctcagtatgtgcacaatttgagatccaaagtgcagagtctccacttgtggaacaatggtaggaatcatttaatttttaatttatattccggcacttggcctgactacaccgaggacgtggggtttgacatcggccaggcgatgctggccaaagccagcatcagtactgaaaacttccgacccaactttgatgtttctattcccctcttttctaaggatcatcccaggacaggaggggagagggggtttttgaagttcaacaccatccctcctctcaggaagtacatgctggtattcaaggggaagaggtacctgacagggataggatcagacaccaggaatgccttatatcacgtccataacggggaggacgttgtgctcctcaccacctgcaagcatggcaaagactggcaaaagcacaaggattctcgctgtgacagagacaacaccgagtatgagaagtatgattatcgggaaatgctgcacaatgccactttctgtctggttcctcgtggtcgcaggcttgggtccttcagattcctggaggctttgcaggctgcctgcgtccctgtgatgctcagcaatggatgggagttgccattctctgaagtgattaattggaaccaagctgccgtcataggcgatgagagattgttattacagattccttctacaatcaggtctattcatcaggataaaatcctagcacttagacagcagacacaattcttgtgggaggcttatttttcttcagttgagaagattgtattaactacactagagattattcaggacagaatattcaagcacatatcacgtaacagtttaatatggaacaaacatcctggaggattgttcgtactaccacagtattcatcttatctgggagattttccttactactatgctaatttaggtttaaagcccccctccaaattcactgcagtcatccatgcggtgacccccctggtctctcagtcccagccagtgttgaagcttctcgtggctgcagccaagtcccagtactgtgcccagatcatagttctatggaattgtgacaagcccctaccagccaaacaccgctggcctgccactgctgtgcctgtcgtcgtcattgaaggagagagcaaggttatgagcagccgttttctgccctacgacaacatcatcacagacgccgtgctcagccttgacgaggacacggtgctttcaacaacagaggtggatttcgccttcacagtgtggcagagcttccctgagaggattgtggggtaccccgcgcgcagccacttctgggataactctaaggagcggtggggatacacatcaaagtggacgaacgactactccatggtgttgacaggagctgctatttaccacaaatattatcactacctatactcccattacctgccagccagcctgaagaacatggtggaccaattggccaattgtgaggacattctcatgaacttcctggtgtctgctgtgacaaaattgcctccaatcaaagtgacccagaagaagcagtataaggagacaatgatgggacagacttctcgggcttcccgttgggctgaccctgaccactttgcccagcgacagagctgcatgaatacgtttgccagctggtttggctacatgccgctgatccactctcagatgaggctcgaccccgtcctctttaaagaccaggtctctattttgaggaagaaataccgagacattgagcgactttgaggaatccggctgagtgggggaggggaagcaagaagggatgggggtcaagctgctctctcttcccagtgcagatccactcatcagcagagccagattgtgccaactatccaaaaacttagatgagcagaatgacaaaaaaaaaaaggccaatgagaactcaactcctggctcctgggactgcaccagactgctccaaactcacctcactggcttctgtgtcccaagactaggttgtgtacagtttaattatggaacattaaataattatttttgaaatgattgctatgcaggtttaaacttttttaatgatcaaaactattaaaaaccagagttctttgtttaatcaaaaaaaaaaaaaaaaa

SEQ ID NO: 383 - DNA, 9179 bp, Homo Sapiens
  NM_000130
gcaagaactgcaggggaggaggacgctgccacccacagcctctagagctcattgcagctgggacagcccggagtgtggttagcagctcggcaagcgctgcccaggtcctggggtggtggcagccagcgggagcaggaaaggaagcatgttcccaggctgcccacgcctctgggtcctggtggtcttgggcaccagctgggtaggctgggggagccaagggacagaagcggcacagctaaggcagttctacgtggctgctcagggcatcagttggagctaccgacctgagcccacaaactcaagtttgaatctttctgtaacttcctttaagaaaattgtctacagagagtatgaaccatattttaagaaagaaaaaccacaatctaccatttcaggacttcttgggcctactttatatgctgaagtcggagacatcataaaagttcactttaaaaataaggcagataagcccttgagcatccatcctcaaggaattaggtacagtaaattatcagaaggtgcttcttaccttgaccacacattccctgcggagaagatggacgacgctgtggctccaggccgagaatacacctatgaatggagtatcagtgaggacagtggacccacccatgatgaccctccatgcctcacacacatctattactcccatgaaaatctgatcgaggatttcaactcggggctgattgggcccctgcttatctgtaaaaaagggaccctaactgagggtgggacacagaagacgtttgacaagcaaatcgtgctactatttgctgtgtttgatgaaagcaagagctggagccagtcatcatccctaatgtacacagtcaatggatatgtgaatgggacaatgccagatataacagtttgtgcccatgaccacatcagctggcatctgctgggaatgagctcggggccagaattattctccattcatttcaacggccaggtcctggagcagaaccatcataaggtctcagccatcacccttgtcagtgctacatccactaccgcaaatatgactgtgggcccagagggaaagtggatcatatcttctctcaccccaaaacatttgcaagctgggatgcaggcttacattgacattaaaaactgcccaaagaaaaccaggaatcttaagaaaataactcgtgagcagaggcggcacatgaagaggtgggaatacttcattgctgcagaggaagtcatttgggactatgcacctgtaataccagcgaatatggacaaaaaatacaggtctcagcatttggataatttctcaaaccaaattggaaaacattataagaaagttatgtacacacagtacgaagatgagtccttcaccaaacatacagtgaatcccaatatgaaagaagatgggattttgggtcctattatcagagcccaggtcagagacacactcaaaatcgtgttcaaaaatatggccagccgcccctatagcatttaccctcatggagtgaccttctcgccttatgaagatgaagtcaactcttctttcacctcaggcaggaacaacaccatgatcagagcagttcaaccaggggaaacctatacttataagtggaacatcttagagtttgatgaacccacagaaaatgatgcccagtgcttaacaagaccatactacagtgacgtggacatcatgagagacatcgcctctgggctaataggactacttctaatctgtaagagcagatccctggacaggcgaggaatacagagggcagcagacatcgaacagcaggctgtgtttgctgtgtttgatgagaacaaaagctggtaccttgaggacaacatcaacaagttttgtgaaaatcctgatgaggtgaaacgtgatgaccccaagttttatgaatcaaacatcatgagcactatcaatggctatgtgcctgagagcataactactcttggattctgctttgatgacactgtccagtggcacttctgtagtgtggggacccagaatgaaattttgaccatccacttcactgggcactcattcatctatggaaagaggcatgaggacaccttgaccctcttccccatgcgtggagaatctgtgacggtcacaatggataatgttggaacttggatgttaacttccatgaattctagtccaagaagcaaaaagctgaggctgaaattcagggatgttaaatgtatcccagatgatgatgaagactcatatgagatttttgaacctccagaatctacagtcatggctacacggaaaatgcatgatcgtttagaacctgaagatgaagagagtgatgctgactatgattaccagaacagactggctgcagcattaggaatcaggtcattccgaaactcatcattgaatcaggaagaagaagagttcaatcttactgccctagctctggagaatggcactgaattcgtttcttcaaacacagatataattgttggttcaaattattcttccccaagtaatattagtaagttcactgtcaataaccttgcagaacctcagaaagccccttctcaccaacaagccaccacagctggttccccactgagacacctcattggcaagaactcagttctcaattcttccacagcagagcattccagcccatattctgaagaccctatagaggatcctctacagccagatgtcacagggatacgtctactttcacttggtgctggagaattcaaaagtcaagaacatgctaagcataagggacccaaggtagaaagagatcaagcagcaaagcacaggttctcctggatgaaattactagcacataaagttgggagacacctaagccaagacactggttctccttccggaatgaggccctgggaggaccttcctagccaagacactggttctccttccagaatgaggccctggaaggaccctcctagtgatctgttactcttaaaacaaagtaactcatctaagattttggttgggagatggcatttggcttctgagaaaggtagctatgaaataatccaagatactgatgaagacacagctgttaacaattggctgatcagcccccagaatgcctcacgtgcttggggagaaagcacccctcttgccaacaagcctggaaagcagagtggccacccaaagtttcctagagttagacataaatctctacaagtaagacaggatggaggaaagagtagactgaagaaaagccagtttctcattaagacacgaaaaaagaaaaaagagaagcacacacaccatgctcctttatctccgaggacctttcaccctctaagaagtgaagcctacaacacattttcagaaagaagacttaagcattcgttggtgcttcataaatccaatgaaacatctcttcccacagacctcaatcagacattgccctctatggattttggctggatagcctcacttcctgaccataatcagaattcctcaaatgacactggtcaggcaagctgtcctccaggtctttatcagacagtgcccccagaggaacactatcaaacattccccattcaagaccctgatcaaatgcactctacttcagaccccagtcacagatcctcttctccagagctcagtgaaatgcttgagtatgaccgaagtcacaagtccttccccacagatataagtcaaatgtccccttcctcagaacatgaagtctggcagacagtcatctctccagacctcagccaggtgaccctctctccagaactcagccagacaaacctctctccagacctcagccacacgactctctctccagaactcattcagagaaacctttccccagccctcggtcagatgcccatttctccagacctcagccatacaaccctttctccagacctcagccatacaaccctttctttagacctcagccagacaaacctctctccagaactcagtcagacaaacctttctccagccctcggtcagatgcccctttctccagacctcagccatacaaccctttctctagacttcagccagacaaacctctctccagaactcagccatatgactctctctccagaactcagtcagacaaacctttccccagccctcggtcagatgcccatttctccagacctcagccatacaaccctttctctagacttcagccagacaaacctctctccagaactcagtcaaacaaacctttccccagccctcggtcagatgcccctttctccagaccccagccatacaaccctttctctagacctcagccagacaaacctctctccagaactcagtcagacaaacctttccccagacctcagtgagatgcccctctttgcagatctcagtcaaattccccttaccccagacctcgaccagatgacactttctccagaccttggtgagacagatctttccccaaactttggtcagatgtccctttccccagacctcagccaggtgactctctctccagacatcagtgacaccacccttctcccggatctcagccagatatcacctcctccagaccttgatcagatattctacccttctgaatctagtcagtcattgcttcttcaagaatttaatgagtcttttccttatccagaccttggtcagatgccatctccttcatctcctactctcaatgatacttttctatcaaaggaatttaatccactggttatagtgggcctcagtaaagatggtacagattacattgagatcattccaaaggaagaggtccagagcagtgaagatgactatgctgaaattgattatgtgccctatgatgacccctacaaaactgatgttaggacaaacatcaactcctccagagatcctgacaacattgcagcatggtacctccgcagcaacaatggaaacagaagaaattattacattgctgctgaagaaatatcctgggattattcagaatttgtacaaagggaaacagatattgaagactctgatgatattccagaagataccacatataagaaagtagtttttcgaaagtacctcgacagcacttttaccaaacgtgatcctcgaggggagtatgaagagcatctcggaattcttggtcctattatcagagctgaagtggatgatgttatccaagttcgttttaaaaatttagcatccagaccgtattctctacatgcccatggactttcctatgaaaaatcatcagagggaaagacttatgaagatgactctcctgaatggtttaaggaagataatgctgttcagccaaatagcagttatacctacgtatggcatgccactgagcgatcagggccagaaagtcctggctctgcctgtcgggcttgggcctactactcagctgtgaacccagaaaaagatattcactcaggcttgataggtcccctcctaatctgccaaaaaggaatactacataaggacagcaacatgcctatggacatgagagaatttgtcttactatttatgacctttgatgaaaagaagagctggtactatgaaaagaagtcccgaagttcttggagactcacatcctcagaaatgaaaaaatcccatgagtttcacgccattaatgggatgatctacagcttgcctggcctgaaaatgtatgagcaagagtgggtgaggttacacctgctgaacataggcggctcccaagacattcacgtggttcactttcacggccagaccttgctggaaaatggcaataaacagcaccagttaggggtctggccccttctgcctggttcatttaaaactcttgaaatgaaggcatcaaaacctggctggtggctcctaaacacagaggttggagaaaaccagagagcagggatgcaaacgccatttcttatcatggacagagactgtaggatgccaatgggactaagcactggtatcatatctgattcacagatcaaggcttcagagtttctgggttactgggagcccagattagcaagattaaacaatggtggatcttataatgcttggagtgtagaaaaacttgcagcagaatttgcctctaaaccttggatccaggtggacatgcaaaaggaagtcataatcacagggatccagacccaaggtgccaaacactacctgaagtcctgctataccacagagttctatgtagcttacagttccaaccagatcaactggcagatcttcaaagggaacagcacaaggaatgtgatgtattttaatggcaattcagatgcctctacaataaaagagaatcagtttgacccacctattgtggctagatatattaggatctctccaactcgagcctataacagacctacccttcgattggaactgcaaggttgtgaggtaaatggatgttccacacccctgggtatggaaaatggaaagatagaaaacaagcaaatcacagcttcttcgtttaagaaatcttggtggggagattactgggaacccttccgtgcccgtctgaatgcccagggacgtgtgaatgcctggcaagccaaggcaaacaacaataagcagtggctagaaattgatctactcaagatcaagaagataacggcaattataacacagggctgcaagtctctgtcctctgaaatgtatgtaaagagctataccatccactacagtgagcagggagtggaatggaaaccatacaggctgaaatcctccatggtggacaagatttttgaaggaaatactaataccaaaggacatgtgaagaactttttcaaccccccaatcatttccaggtttatccgtgtcattcctaaaacatggaatcaaagtattgcacttcgcctggaactctttggctgtgatatttactagaattgaacattcaaaaacccctggaagagactctttaagacctcaaaccatttagaatgggcaatgtattttacgctgtgttaaatgttaacagttttccactatttctctttcttttctattagtgaataaaattttatacaagaagcttttataatgtaactccttgctaccagtaagtaagataatggctattacttctgcattaatttgaatacaggtaggaaaatatcaagaaccaacaagaaaagggcttatctttcttaatgattgaaaatgctatgaagtaatatttatgtagttaaaatgcttcattataactcttttaaatcctttacacactagtaaaacagatattactttaaataataattgatagacctggataactttcacaaacacatgattttttaatggtttttcttgagtgaagagaaaaacaatattatcaaatgaaataagtacttaaaatatcctgtctttcccatataacaatgatttttctgactttccatgagtaaaaaaacagccaagcatctttccagtagccccattgaaattgtgaatccgtcctggtctccctaaggactgcacacattgatattcaaggttggtggtcattagatatggaacagaactgaaataaccatggtagaactgaatgtgtaatgttggctttattctagctggtactacatggcacacagtttcaaaacataatttcacctactggaaagctcagacctgtaaaacagagcatgggaactgctggtctaaatgcagttgttcctgctcaaagagacctctggccaaactggcaagcagttaaagttttctttcagggccttcctctctatggcctcaacttcctcctctctcttcttccagcaacttcccctttcatcattcctttccctggggacttggcattcagtgatcctgtagatattgcacaactggggaacctttagacatccttaaaatcacatgagatagacagtcatttggggtgtctgaaataaaccaccccaaaacttagtgttaaaagagcaaccaaaaaaaatttatgtgagattatggatttgttacttagcttgatttaatcatcctgtaacgtgtacatatatcaaaatgttatgtataccataaatatataaaattttatcaacgaaattcataacaatctctcagaccacagagaaatcaaattagaactgaggactaagaaactcactcgaaaccacacaactacatggaaactgaacaacctgctcctgaatgactactgggtaaataatgaaattaaggcagaaataaataagttccttaaaaccaatgagaacaaagagacaacataccagaatctctaggagacagggctttgcttttgctgcattctattcgttgtgaacacaaattacaggccagtctcgattcagtgtagaagggaactgcataaggaccacataccaggaggcataattcactgggagcatctttagaaactaccagagttacctgttgcccataccagtggggtaagccctatgaatgtatatgagagtttcaaacatccacaaaacattggctttctaatattcgtattcccactattcctttcttttcatgattcatgtcattgtcccatcaacatttctaagatttccattccgttaagagcaaaagagaatgttggaaggtgggggaaaacatttctttgttttctacagggccagcttcttggatgtgtgtgatctgttcagttgcaaagggtcacatgctcagaaggaccgcatgctaaatttaatgctttgcagttaccctcttgaaatcctttattttttaagaaggaattcgacatttccatttttcaatgagccccacaaattacgcagctagtcctgggcttctctactctgaaattgggcaggatctctcttgatctagaatttactaaggcataataggggcaagaaaatcttatgaaataatggggggtagggaagagatgggaatggagcatgagatccagcttcgttattctctacttgagaaaaataaggccccaaagattaaacaacttgcccaaggatattgcttgttagtgtcagaactgaaaccagaaaccaaatgatcatatccctagacttttagtctgctttctcttccataaaatgaaacttataatgtttctaatccattgctcagacaggtagacatgaatattaattgataatgactattaattgatctggaaaatacttgtttggggatcaataatatgtttgggctattatctaatgctgtgtagaaatattaaaacccctgttattttgaaataaaaaagatacccactttt

SEQ ID NO: 384 - DNA, 9048 bp, Homo Sapiens
  NM_000132
gcttagtgctgagcacatccagtgggtaaagttccttaaaatgctctgcaaagaaattgggacttttcattaaatcagaaattttacttttttcccctcctgggagctaaagatattttagagaagaattaaccttttgcttctccagttgaacatttgtagcaataagtcatgcaaatagagctctccacctgcttctttctgtgccttttgcgattctgctttagtgccaccagaagatactacctgggtgcagtggaactgtcatgggactatatgcaaagtgatctcggtgagctgcctgtggacgcaagatttcctcctagagtgccaaaatcttttccattcaacacctcagtcgtgtacaaaaagactctgtttgtagaattcacggatcaccttttcaacatcgctaagccaaggccaccctggatgggtctgctaggtcctaccatccaggctgaggtttatgatacagtggtcattacacttaagaacatggcttcccatcctgtcagtcttcatgctgttggtgtatcctactggaaagcttctgagggagctgaatatgatgatcagaccagtcaaagggagaaagaagatgataaagtcttccctggtggaagccatacatatgtctggcaggtcctgaaagagaatggtccaatggcctctgacccactgtgccttacctactcatatctttctcatgtggacctggtaaaagacttgaattcaggcctcattggagccctactagtatgtagagaagggagtctggccaaggaaaagacacagaccttgcacaaatttatactactttttgctgtatttgatgaagggaaaagttggcactcagaaacaaagaactccttgatgcaggatagggatgctgcatctgctcgggcctggcctaaaatgcacacagtcaatggttatgtaaacaggtctctgccaggtctgattggatgccacaggaaatcagtctattggcatgtgattggaatgggcaccactcctgaagtgcactcaatattcctcgaaggtcacacatttcttgtgaggaaccatcgccaggcgtccttggaaatctcgccaataactttccttactgctcaaacactcttgatggaccttggacagtttctactgttttgtcatatctcttcccaccaacatgatggcatggaagcttatgtcaaagtagacagctgtccagaggaaccccaactacgaatgaaaaataatgaagaagcggaagactatgatgatgatcttactgattctgaaatggatgtggtcaggtttgatgatgacaactctccttcctttatccaaattcgctcagttgccaagaagcatcctaaaacttgggtacattacattgctgctgaagaggaggactgggactatgctcccttagtcctcgcccccgatgacagaagttataaaagtcaatatttgaacaatggccctcagcggattggtaggaagtacaaaaaagtccgatttatggcatacacagatgaaacctttaagactcgtgaagctattcagcatgaatcaggaatcttgggacctttactttatggggaagttggagacacactgttgattatatttaagaatcaagcaagcagaccatataacatctaccctcacggaatcactgatgtccgtcctttgtattcaaggagattaccaaaaggtgtaaaacatttgaaggattttccaattctgccaggagaaatattcaaatataaatggacagtgactgtagaagatgggccaactaaatcagatcctcggtgcctgacccgctattactctagtttcgttaatatggagagagatctagcttcaggactcattggccctctcctcatctgctacaaagaatctgtagatcaaagaggaaaccagataatgtcagacaagaggaatgtcatcctgttttctgtatttgatgagaaccgaagctggtacctcacagagaatatacaacgctttctccccaatccagctggagtgcagcttgaggatccagagttccaagcctccaacatcatgcacagcatcaatggctatgtttttgatagtttgcagttgtcagtttgtttgcatgaggtggcatactggtacattctaagcattggagcacagactgacttcctttctgtcttcttctctggatataccttcaaacacaaaatggtctatgaagacacactcaccctattcccattctcaggagaaactgtcttcatgtcgatggaaaacccaggtctatggattctggggtgccacaactcagactttcggaacagaggcatgaccgccttactgaaggtttctagttgtgacaagaacactggtgattattacgaggacagttatgaagatatttcagcatacttgctgagtaaaaacaatgccattgaaccaagaagcttctcccagaattcaagacaccctagcactaggcaaaagcaatttaatgccaccacaattccagaaaatgacatagagaagactgacccttggtttgcacacagaacacctatgcctaaaatacaaaatgtctcctctagtgatttgttgatgctcttgcgacagagtcctactccacatgggctatccttatctgatctccaagaagccaaatatgagactttttctgatgatccatcacctggagcaatagacagtaataacagcctgtctgaaatgacacacttcaggccacagctccatcacagtggggacatggtatttacccctgagtcaggcctccaattaagattaaatgagaaactggggacaactgcagcaacagagttgaagaaacttgatttcaaagtttctagtacatcaaataatctgatttcaacaattccatcagacaatttggcagcaggtactgataatacaagttccttaggacccccaagtatgccagttcattatgatagtcaattagataccactctatttggcaaaaagtcatctccccttactgagtctggtggacctctgagcttgagtgaagaaaataatgattcaaagttgttagaatcaggtttaatgaatagccaagaaagttcatggggaaaaaatgtatcgtcaacagagagtggtaggttatttaaagggaaaagagctcatggacctgctttgttgactaaagataatgccttattcaaagttagcatctctttgttaaagacaaacaaaacttccaataattcagcaactaatagaaagactcacattgatggcccatcattattaattgagaatagtccatcagtctggcaaaatatattagaaagtgacactgagtttaaaaaagtgacacctttgattcatgacagaatgcttatggacaaaaatgctacagctttgaggctaaatcatatgtcaaataaaactacttcatcaaaaaacatggaaatggtccaacagaaaaaagagggccccattccaccagatgcacaaaatccagatatgtcgttctttaagatgctattcttgccagaatcagcaaggtggatacaaaggactcatggaaagaactctctgaactctgggcaaggccccagtccaaagcaattagtatccttaggaccagaaaaatctgtggaaggtcagaatttcttgtctgagaaaaacaaagtggtagtaggaaagggtgaatttacaaaggacgtaggactcaaagagatggtttttccaagcagcagaaacctatttcttactaacttggataatttacatgaaaataatacacacaatcaagaaaaaaaaattcaggaagaaatagaaaagaaggaaacattaatccaagagaatgtagttttgcctcagatacatacagtgactggcactaagaatttcatgaagaaccttttcttactgagcactaggcaaaatgtagaaggttcatatgacggggcatatgctccagtacttcaagattttaggtcattaaatgattcaacaaatagaacaaagaaacacacagctcatttctcaaaaaaaggggaggaagaaaacttggaaggcttgggaaatcaaaccaagcaaattgtagagaaatatgcatgcaccacaaggatatctcctaatacaagccagcagaattttgtcacgcaacgtagtaagagagctttgaaacaattcagactcccactagaagaaacagaacttgaaaaaaggataattgtggatgacacctcaacccagtggtccaaaaacatgaaacatttgaccccgagcaccctcacacagatagactacaatgagaaggagaaaggggccattactcagtctcccttatcagattgccttacgaggagtcatagcatccctcaagcaaatagatctccattacccattgcaaaggtatcatcatttccatctattagacctatatatctgaccagggtcctattccaagacaactcttctcatcttccagcagcatcttatagaaagaaagattctggggtccaagaaagcagtcatttcttacaaggagccaaaaaaaataacctttctttagccattctaaccttggagatgactggtgatcaaagagaggttggctccctggggacaagtgccacaaattcagtcacatacaagaaagttgagaacactgttctcccgaaaccagacttgcccaaaacatctggcaaagttgaattgcttccaaaagttcacatttatcagaaggacctattccctacggaaactagcaatgggtctcctggccatctggatctcgtggaagggagccttcttcagggaacagagggagcgattaagtggaatgaagcaaacagacctggaaaagttccctttctgagagtagcaacagaaagctctgcaaagactccctccaagctattggatcctcttgcttgggataaccactatggtactcagataccaaaagaagagtggaaatcccaagagaagtcaccagaaaaaacagcttttaagaaaaaggataccattttgtccctgaacgcttgtgaaagcaatcatgcaatagcagcaataaatgagggacaaaataagcccgaaatagaagtcacctgggcaaagcaaggtaggactgaaaggctgtgctctcaaaacccaccagtcttgaaacgccatcaacgggaaataactcgtactactcttcagtcagatcaagaggaaattgactatgatgataccatatcagttgaaatgaagaaggaagattttgacatttatgatgaggatgaaaatcagagcccccgcagctttcaaaagaaaacacgacactattttattgctgcagtggagaggctctgggattatgggatgagtagctccccacatgttctaagaaacagggctcagagtggcagtgtccctcagttcaagaaagttgttttccaggaatttactgatggctcctttactcagcccttataccgtggagaactaaatgaacatttgggactcctggggccatatataagagcagaagttgaagataatatcatggtaactttcagaaatcaggcctctcgtccctattccttctattctagccttatttcttatgaggaagatcagaggcaaggagcagaacctagaaaaaactttgtcaagcctaatgaaaccaaaacttacttttggaaagtgcaacatcatatggcacccactaaagatgagtttgactgcaaagcctgggcttatttctctgatgttgacctggaaaaagatgtgcactcaggcctgattggaccccttctggtctgccacactaacacactgaaccctgctcatgggagacaagtgacagtacaggaatttgctctgtttttcaccatctttgatgagaccaaaagctggtacttcactgaaaatatggaaagaaactgcagggctccctgcaatatccagatggaagatcccacttttaaagagaattatcgcttccatgcaatcaatggctacataatggatacactacctggcttagtaatggctcaggatcaaaggattcgatggtatctgctcagcatgggcagcaatgaaaacatccattctattcatttcagtggacatgtgttcactgtacgaaaaaaagaggagtataaaatggcactgtacaatctctatccaggtgtttttgagacagtggaaatgttaccatccaaagctggaatttggcgggtggaatgccttattggcgagcatctacatgctgggatgagcacactttttctggtgtacagcaataagtgtcagactcccctgggaatggcttctggacacattagagattttcagattacagcttcaggacaatatggacagtgggccccaaagctggccagacttcattattccggatcaatcaatgcctggagcaccaaggagcccttttcttggatcaaggtggatctgttggcaccaatgattattcacggcatcaagacccagggtgcccgtcagaagttctccagcctctacatctctcagtttatcatcatgtatagtcttgatgggaagaagtggcagacttatcgaggaaattccactggaaccttaatggtcttctttggcaatgtggattcatctgggataaaacacaatatttttaaccctccaattattgctcgatacatccgtttgcacccaactcattatagcattcgcagcactcttcgcatggagttgatgggctgtgatttaaatagttgcagcatgccattgggaatggagagtaaagcaatatcagatgcacagattactgcttcatcctactttaccaatatgtttgccacctggtctccttcaaaagctcgacttcacctccaagggaggagtaatgcctggagacctcaggtgaataatccaaaagagtggctgcaagtggacttccagaagacaatgaaagtcacaggagtaactactcagggagtaaaatctctgcttaccagcatgtatgtgaaggagttcctcatctccagcagtcaagatggccatcagtggactctcttttttcagaatggcaaagtaaaggtttttcagggaaatcaagactccttcacacctgtggtgaactctctagacccaccgttactgactcgctaccttcgaattcacccccagagttgggtgcaccagattgccctgaggatggaggttctgggctgcgaggcacaggacctctactgagggtggccactgcagcacctgccactgccgtcacctctccctcctcagctccagggcagtgtccctccctggcttgccttctacctttgtgctaaatcctagcagacactgccttgaagcctcctgaattaactatcatcagtcctgcatttctttggtggggggccaggagggtgcatccaatttaacttaactcttacctattttctgcagctgctcccagattactccttccttccaatataactaggcaaaaagaagtgaggagaaacctgcatgaaagcattcttccctgaaaagttaggcctctcagagtcaccacttcctctgttgtagaaaaactatgtgatgaaactttgaaaaagatatttatgatgttaacatttcaggttaagcctcatacgtttaaaataaaactctcagttgtttattatcctgatcaagcatggaacaaagcatgtttcaggatcagatcaatacaatcttggagtcaaaaggcaaatcatttggacaatctgcaaaatggagagaatacaataactactacagtaaagtctgtttctgcttccttacacatagatataattatgttatttagtcattatgaggggcacattcttatctccaaaactagcattcttaaactgagaattatagatggggttcaagaatccctaagtcccctgaaattatataaggcattctgtataaatgcaaatgtgcatttttctgacgagtgtccatagatataaagccatttggtcttaattctgaccaataaaaaaataagtcaggaggatgcaattgttgaaagctttgaaataaaataacaatgtcttcttgaaatttgtgatggccaagaaagaaaatgatgatgacattaggcttctaaaggacatacatttaatatttctgtggaaatatgaggaaaatccatggttatctgagataggagatacaaactttgtaattctaataatgcactcagtttactctctccctctactaatttcctgctgaaaataacacaacaaaaatgtaacaggggaaattatataccgtgactgaaaactagagtcctacttacatagttgaaatatcaaggaggtcagaagaaaattggactggtgaaaacagaaaaaacactccagtctgccatatcaccacacaataggatcccccttcttgccctccacccccataagattgtgaagggtttactgctccttccatctgcctgaccccttcactatgactacacagaatctcctgatagtaaagggggctggaggcaaggataagttatagagcagttggaggaagcatccaaagattgcaacccagggcaaatggaaaacaggagatcctaatatgaaagaaaaatggatcccaatctgagaaaaggcaaaagaatggctacttttttctatgctggagtattttctaataatcctgcttgacccttatctgacctctttggaaactataacatagctgtcacagtatagtcacaatccacaaatgatgcaggtgcaaatggtttatagccctgtgaagttcttaaagtttagaggctaacttacagaaatgaataagttgttttgttttatagcccggtagaggagttaaccccaaaggtgatatggttttatttcctgttatgtttaacttgataatcttattttggcattcttttcccattgactatatacatctctatttctcaaatgttcatggaactagctcttttattttcctgctggtttcttcagtaatgagttaaataaaacattgacacatacaaacaaaaaaaaaaaaaaa

SEQ ID NO: 385 - DNA, 7277 bp, Homo Sapiens
  NM_000140
aggtcagggggctggggacgcgcgtggggatcgctacccggctcggccactgctgggcggacacctgggcgcgccgccgcgggaggagcccggactcgggccgaggctgcccaggcaatgcgttcactcggcgcaaacatggctgcggccctgcgcgccgcgggcgtcctgctccgcgatccgctggcatccagcagctggagggtctgtcagccatggaggtggaagtcaggtgcagctgcagcggccgtcaccacagaaacagcccagcatgcccagggtgcaaaacctcaagttcaaccgcagaagaggaagccgaaaactggaatattaatgctaaacatgggaggccctgaaactcttggagatgttcacgacttccttctgagactcttcttggaccgagacctcatgacacttcctattcagaataagctggcaccattcatcgccaaacgccgaacccccaagattcaagagcagtaccgcaggattggaggcggatcccccatcaagatatggacttccaagcagggagagggcatggtgaagctgctggatgaattgtcccccaacacagcccctcacaaatactatattggatttcggtacgtccatcctttaacagaagaagcaattgaagagatggagagagatggcctagaaagggctattgctttcacacagtatccacagtacagctgctccaccacaggcagcagcttaaatgccatttacagatactataatcaagtgggacggaagcccacgatgaagtggagcactattgacaggtggcccacacatcacctcctcatccagtgctttgcagatcatattctaaaggaactggaccattttccacttgagaagagaagcgaggtggtcattctgttttctgctcactcactgcccatgtctgtggtcaacagaggcgacccatatcctcaggaggtaagcgccactgtccaaaaagtcatggaaaggctggagtactgcaacccctaccgactggtgtggcaatccaaggttggtccaatgccctggttgggtcctcaaacagacgaatctatcaaagggctttgtgagagggggaggaagaatatcctcttggttccgatagcatttaccagtgaccatattgaaacgctgtatgagctggacatcgagtactctcaagttttagccaaggagtgtggagttgaaaacatcagaagagctgagtctcttaatggaaatccattgttctctaaggccctggccgacttggtgcattcacacatccagtcaaacgagctgtgttccaagcagctgaccctgagctgtccgctctgtgtcaatcctgtctgcagggagactaaatccttcttcaccagccagcagctgtgacccccgccggtggaccccgtggcgttaggcaaatgcccaacctccagatacctccgatgtggagagggtgttatttagagatcaaggaaggaagtcatccttccttgatatatatacagcctttgggtacaaattgtgtggtttcttgaggattggactcttgatggatttctatttttatataactatacagtaagcatttgtattttctctctctaggtataagttactagtttggaatgtccatcaggacctttaataaatgagttaaaaatttgtcttatgagacacacctatttaagtacagattttggctttattgcccaaaaccctcctgaaagggtacggagagtcccctctgtgggctggcagtgtgaatgagatctgtttagtctcgtgcatatagttgctgttttttaaatgaacacagttgagtatttgaagtgaatttgaaaaagaaatgttacttaatctttccctaagcccatgggttacagaatgctagggaggcaatttggttacctgcaatggctgcttttgccagcgaggccaccattcattggtcatcttggtatttgtgtgtgaatctcactttcctcaatgtaaaaaggaatcaagtatggatttcagaggtgctcttagattccccatacacccaagggtaataaacgtgtacaagtacagtgttcatgatacgtgccttggtgggagtccgtggtgccacagggaaggggctcccactgcttctggtctccagggacagtgctgctggaaaggctagtgatgagcttcaccctggagctcctcccgggaccttgcaagcctctccatccagcatcttctctatcttagttgaatgccttctttctgaacatttgttttaagaattattttataaagtcaacaatactttgcttgaattctttcttaatttacgattttttattataaaaatgtatagtgatacaatgggacatgtgaagaatacagaaaagtaaccactttaatgcaataactgttatcataatattgtatttcgtggtagtcctttcctgtagatatttttaatgccatttaatgccattgtcaccttggatttatgagtgaaaagtgtttctaaaaatatagaaataatgtcagatcagagtctgatcttctatgtttgtatttaaatggattaaaagatccccggtggttccatgaagaatttgtaaagatcactttctctttcctccaagccctgaaactttgttcttcaaaagagcgtttctttttttttttttttttagccagtttataaagtggaagtattaggagattcataaatcttctatattgagaattggctatgttaataaatattacaacatcattaaggttttagctaagtttgattcatgctgtctgttaaatcaaaactgatctaaatcagaattattaaatgtgaggagcttttttaatacaggaaaagaaacatgtcatccacttgagttaatagttttcctacgttgatgacagccctcatgagtagcatccacatttttaaaatttcaaattggtttttctactagtagattgtgtttctagagaaagatacaaggcataggtgattgtttaggattttcctctagcctttgccattacctttttggggatgaggttcacagtagactttgagtgaccgtcccaccgtgaagtgaattctctgagctggtggtgtggtgctggaaggaaggttatttttggagccactctctccccttaaggatatttcccaagggcctgcttcaattctttgatgactttagaggtgaaaaaatatttttatggagatgatgcagaaaactccaattcaggagcccttgcgagtatatctgaagcacttatttgctaaggaaacctgaattgatagcagtactgtgctgtctggaataatgtccttgatactgagttgggaccagactggcttttatagtgacaggcaaagaggaatttattgagatcactgctcatggcatttgttgctgtaagaagtgttgcctttgattgttactaaccacggatgggtaacggtcatacattaggctagtgtttggtaggacaaaatctttttagagctttgagaattgtcatcctgttggtcaactttgaaatacaaatgtttgccctggtaattagcaatgaactgctggcagtttcttcagctgtgtatatacggatctggcttttaattgatgaatcaacttctacagaaacttttgcagggacagtgttgatgaggcagtttagcttgccagggtgatgataaagcccaggtccctgcatgtatagtgctcttctaaagaatatgcattcttgaactacttaactttttaaaaatcacaataaatttttgcactcaaaatttgcttcgtatcaggagaaatgaactcattgttttgttttgtttttttttttttttaagatggagtcttgctatgtcacccaggctggagggcagtggtgcgatctcggctcactgctacttccacctcctgggctcaagtgatcctcccacctcagcctccaagtagctgggactacaggagtgcttcaccacgctgggctacttttttatattttttgtagagatggggttttgccatgttgtccaggctggtcttgaactcctgggctcaagggattctcctgcctcagtctcccaaagtgctgggattacaaggatgagcctctgcacctggccctgaactcattattaaaagccctttaaatgtgaggctgggtgccgtgccttacatgtgtaattccaatactttggaaggccaaggttggaggattgcttgatcccaagagttcaagaccagcctgggcaacatagggagaccctgactctacaaaaaataaagtaaaaattaactgggtgtagtgtcacatgcctgtagttccagctacttaggaggctgaggtggtaggattgcttgagcccagcagtttgaggttgcagtgaggtgtgattgcaccactgcactccagcctgggtgacagaggaagaccctgtcccaaaaccaaaaaaaagaaaagaaatacagagactgggtcatttacaaaggaaagaggtttaattgactcggttcggctttctgaggaagccttaggaaattgacaatcatggcagaaggggaagcagatgtcttacatggcagtgagtgagagcaagcaaaggggaagagcccccttataaaaccatcagatctcgtgagaactggctgtcacaagaacagcatgggggaactgtctccatgttccaatctccttccaccaggtccctccctcaacacgtggggattatggggattacaatttgaaatgagatttgggtggggaacagagccaaatcatatcattccaccctggcccctcccaaatcacatgtcctttttacatttcaaaaccaatcatgccttcacaacagtcctccagagtcttaactcattccagcattaacccaaaagtccaagttcaaagtctcatccaagacaaggcaagtcccttctgcctgtgagcctgtaacattaaaagcaagttagtgacttccaagatacaatgggagtacagacattggtaaatgttcccattccaaatgggagaaattggccaaaacacaggggctacaggccccatgcaccactgcactccactgtgcaagtctgaaacccggcagggcactccttaaattttttttttttttttttgagatggagtctcgctctgttgcccaagctggagtacagtggcacgatctcggctcactgcaacctccgcctcttgggttcaaaggatcatcctgcctcagcctccggagtagctgggctactcaggcgtgtgccaccatgcccggctaatttttgtatttttagtagagatggggcctgaccatgttggtcaggctggtctctaattcctgacctcgtgatccacccgcctcagcctctgaaagtgttgggattacaggcgtgagccaccatccccggcctactcaataaatcttaaagttccggaataatctcctttgactccatgtctcacctccaggtcacgctgatgcaagaggtgggctaatctttctagtaaattccatatttaattcaagaaaccataacttaaggcatgtaaaagagatcctttgctcaatgtgatgccattgtgcttatccaaagtatattattattacccacaaagggtgagagattaggctgcagccataccccaagtggagtgagcagcaagacctgccccctgctcagagtgtagatgactgggggcacctgcattcctaggggctctgccgtatgagctcctgtcgatgcggcaaaggaccaccttgcccaacgacagcgggaaggcagaatttaaagctggcagctgtaagcgaacgtctatgtgtgcgcacgggggcacgtgaaggcacaggtgcatcagccaagaacctccaattcacctcttaaccttctcacctcacctgaaaccccttctgccagaatcctgaaggtggcccaggaacagggctcctaacgttaggtggaaatgggaaattcattgagatgtcacaagctggaataagaaaattctgagctcacccggaaactaatgccctaaattaagattattcagcttctcaatttttaatagcaaaatggagacctgagtgtggataacttttagtatctgtgggggatcctggaaccaattccctgccaatatagaaggacaactgtctacagtacttgaagtattattaactacattcgccatgctgtatgttagatccccagaacatatttatcctgcatatctaaaattttgatcattttacaaactttctattttttttgtcaattttctccagctagacacttgtgcaatacggctattatctgatctttgccttaaatgttgtgcttcttttccatatgcacgtattttgcaaaatataaagtgtgtagagctatatagcactcagccaagtggtgggtacctgcaggtgcttcagagaagtaaattgatgctgctaatatttgttgaatggcacgaatatgatgagcaatagcaggtggtgcccttcagccagaccatcgctccgtgcgtctgatgcatcttgccaaagagtagttctgggaggtggttgcctctagagaacacattcctcctattctggggtcccgtgagagaaagaaatgcttttgcttttgatgtgggactcttactaagcctttcttcagagaaaaggaagtgaaaaatgcaccccatgataatcagtttcttacaacatactgtgatagtaccggcttcgttgtttttagctggaatcattagcttccatttttagaataacagctattggctaaattaggctacagtaggccattaagatggatgttggaattaaaaacatttttggaaaaaagcctgctttgagcctttgttataagcccttgggtagagatctgggtcctgtttctgatttcttgtgagccttcactctgacagttttgtttccagaaacacactcttagcctgctcctgaaatgggaacagacaggccaacttcccctctccagtctcccctgcgggtcaaagctttactttcctgtcatgttaagaaagaatagatttaaccttgataatccatgtagtattctgtatttttaccttttccttatctgaaaaaaagtgtatatatggcatggaattgattgcacaggcacatggcatgttggcttgtgaaccaattgttaaaatttcaagttaatcattaaaataatatctttcaaattaagttatattaaaaacaaaggtaacattctaaattcaaaaaaaaaaaaaaaaaa

SEQ ID NO: 386 - DNA, 1877 bp, Homo Sapiens
  NM_000143
gacaaccggcgtggaggcgtggccacagccgcccagaaattctacccaagctccctcagcaccatgtaccgagcacttcggctcctcgcgcgctcgcgtcccctcgtgcgggctccagccgcagccttagcttcggctcccggcttgggtggcgcggccgtgccctcgttttggcctccgaacgcggctcgaatggcaagccaaaattccttccggatagaatatgatacctttggtgaactaaaggtgccaaatgataagtattatggcgcccagaccgtgagatctacgatgaactttaagattggaggtgtgacagaacgcatgccaaccccagttattaaagcttttggcatcttgaagcgagcggccgctgaagtaaaccaggattatggtcttgatccaaagattgctaatgcaataatgaaggcagcagatgaggtagctgaaggtaaattaaatgatcattttcctctcgtggtatggcagactggatcaggaactcagacaaatatgaatgtaaatgaagtcattagcaatagagcaattgaaatgttaggaggtgaacttggcagcaagatacctgtgcatcccaacgatcatgttaataaaagccagagctcaaatgatacttttcccacagcaatgcacattgctgctgcaatagaagttcatgaagtactgttaccaggactacagaagttacatgatgctcttgatgcaaaatccaaagagtttgcacagatcatcaagattggacgtactcatactcaggatgctgttccacttactcttgggcaggaatttagtggttatgttcaacaagtaaaatatgcaatgacaagaataaaagctgccatgccaagaatctatgagctcgcagctggaggcactgctgttggtacaggtttaaatactagaattggctttgcagaaaaggttgctgcaaaagtggctgcacttacaggcttgccttttgtcactgctccgaataaatttgaagctctggctgctcatgacgctctggttgagctcagtggagccatgaacactactgcctgcagtctgatgaagatagcaaatgatattcgatttttgggttctggtcctcggtcaggtctgggagaattgatcttgcctgaaaatgaaccaggaagcagtatcatgccaggcaaggtgaaccctactcagtgtgaagcaatgaccatggttgcagcccaagtcatggggaaccatgttgctgtcactgtcggaggcagcaatggacattttgagttgaatgttttcaagccaatgatgattaaaaatgtgttacactcagccaggctgctgggggatgcttcagtttcctttacagaaaactgcgtggtgggaatccaggccaatacagaaaggatcaacaagctgatgaatgagtctctaatgttggtgacagctctcaatcctcatatagggtatgacaaggcagcaaagattgctaagacagcacacaaaaatggatcaaccttaaaggaaactgctatcgaacttggctatctcacagcagagcagtttgacgaatgggtaaaacctaaggacatgctgggtccaaagtgatttacataaatttataatgaaaataaacatgtataaaatttaaaaaaacagactcccatttcttaaaaacggataagtttgaaaggaaactgctattgaacttaagcatctctagcagagcaatttgatcagtatataaaaccctaggatgtgctaggtctaagatggattaaacaagtataaaataaaatacatttataaaataaaaaggaaaacagacttaaattttctcctatgttaattgacttgtattatagttgaatctatgataaaaaaaaaaa

SEQ ID NO: 387 - DNA, 7168 bp, Homo Sapiens
  NM_000144
agtctcccttgggtcaggggtcctggttgcactccgtgctttgcacaaagcaggctctccatttttgttaaatgcacgaatagtgctaagctgggaagttcttcctgaggtctaacctctagctgctcccccacagaagagtgcctgcggccagtggccaccaggggtcgccgcagcacccagcgctggagggcggagcgggcggcagacccggagcagcatgtggactctcgggcgccgcgcagtagccggcctcctggcgtcacccagcccagcccaggcccagaccctcacccgggtcccgcggccggcagagttggccccactctgcggccgccgtggcctgcgcaccgacatcgatgcgacctgcacgccccgccgcgcaagttcgaaccaacgtggcctcaaccagatttggaatgtcaaaaagcagagtgtctatttgatgaatttgaggaaatctggaactttgggccacccaggctctctagatgagaccacctatgaaagactagcagaggaaacgctggactctttagcagagttttttgaagaccttgcagacaagccatacacgtttgaggactatgatgtctcctttgggagtggtgtcttaactgtcaaactgggtggagatctaggaacctatgtgatcaacaagcagacgccaaacaagcaaatctggctatcttctccatccagtggacctaagcgttatgactggactgggaaaaactgggtgtactcccacgacggcgtgtccctccatgagctgctggccgcagagctcactaaagccttaaaaaccaaactggacttgtcttccttggcctattccggaaaagatgcttgatgcccagccccgttttaaggacattaaaagctatcaggccaagaccccagcttcattatgcagctgaggtctgttttttgttgttgttgttgtttattttttttattcctgcttttgaggacagttgggctatgtgtcacagctctgtagaaagaatgtgttgcctcctaccttgcccccaagttctgatttttaatttctatggaagattttttggattgtcggatttcctccctcacatgataccccttatcttttataatgtcttatgcctatacctgaatataacaacctttaaaaaagcaaaataataagaaggaaaaattccaggagggaaaatgaattgtcttcactcttcattctttgaaggatttactgcaagaagtacatgaagagcagctggtcaacctgctcactgttctatctccaaatgagacacattaaagggtagcctacaaatgttttcaggcttctttcaaagtgtaagcacttctgagctctttagcattgaagtgtcgaaagcaactcacacgggaagatcatttcttatttgtgctctgtgactgccaaggtgtggcctgcactgggttgtccagggagacctagtgctgtttctcccacatattcacatacgtgtctgtgtgtatatatattttttcaatttaaaggttagtatggaatcagctgctacaagaatgcaaaaaatcttccaaagacaagaaaagaggaaaaaaagccgttttcatgagctgagtgatgtagcgtaacaaacaaaatcatggagctgaggaggtgccttgtaaacatgaaggggcagataaaggaaggagatactcatgttgataaagagagccctggtcctagacatagttcagccacaaagtagttgtccctttgtggacaagtttcccaaattccctggacctctgcttccccatctgttaaatgagagaatagagtatggttgattcccagcattcagtggtcctgtcaagcaacctaacaggctagttctaattccctattgggtagatgaggggatgacaaagaacagtttttaagctatataggaaacattgttattggtgttgccctatcgtgatttcagttgaattcatgtgaaaataatagccatccttggcctggcgcggtggctcacacctgtaatcccagcacttttggaggccaaggtgggtggatcacctgaggtcaggagttcaagaccagcctggccaacatgatgaaaccccgtctctactaaaaatacaaaaaattagccgggcatgatggcaggtgcctgtaatcccagctacttgggaggctgaagcggaagaatcgcttgaacccagaggtggaggttgcagtgagccgagatcgtgccattgcactgtaacctgggtgactgagcaaaactctgtctcaaaataataataacaatataataataataatagccatcctttattgtacccttactgggttaatcgtattataccacattacctcattttaatttttactgacctgcactttatacaaagcaacaagcctccaggacattaaaattcatgcaaagttatgctcatgttatattattttcttacttaaagaaggatttattagtggctgggcatggtggcgtgcacctgtaatcccaggtactcaggaggctgagacgggagaattgcttgaccccaggcggaggaggttacagtgagtcgagatcgtacctgagcgacagagcgagactccgtctcaaaaaaaaaaaaaaggagggtttattaatgagaagtttgtattaatatgtagcaaaggcttttccaatgggtgaataaaaacacattccattaagtcaagctgggagcagtggcatatacctatagtcccagctgcacaggaggctgagacaggaggattgcttgaagccaggaattggagatcagcctgggcaacacagcaagatcctatctcttaaaaaaagaaaaaaaaacctattaataataaaacagtataaacaaaagctaaataggtaaaatattttttctgaaataaaattattttttgagtctgatggaaatgtttaagtgcagtaggccagtgccagtgagaaaataaataacatcatacatgtttgtatgtgtttgcatcttgcttctactgaaagtttcagtgcaccccacttacttagaactcggtgacatgatgtactcctttatctgggacacagcacaaaagaggtatgcagtggggctgctctgacatgaaagtggaagttaaggaatctgggctcttatggggtccttgtgggccagcccttcaggcctattttactttcattttacatatagctctaattggtttgattatctcgttcccaaggcagtgggagatccccatttaaggaaagaaaaggggcctggcacagtggctcatgcctgtaatcccagcactttgggaggctgaggcaagtgtatcacctgaggtcaggagttcaagaccagcctggccaacatggcaaaatcccgtctctactaaaaatattaaaaaattggctgggcgtggtggttcgtgcctataatttcagctactcaggaggctgaggcaggagaatcgctgtaacctggggggtggaggttgcagtgagacgagatcatgccacttcactccagcctggccaacagagccatactccgtctcaaataaataaataaataaataaagggacttcaaacacatgaacagcagccaggggaagaatcaaaatcatattctgtcaagcaaactggaaaagtaccactgtgtgtaccaatagcctccccaccacagaccctgggagcatcgcctcatttatggtgtggtccagtcatccatgtgaaggatgagtttccaggaaaaggttattaaatattcactgtaacatactggaggaggtgaggaattgcataatacaatcttagaaaacttttttttcccctttctattttttgagacaggatctcactttggcactcaggctggaggacagtggtacaatcaaagctcatggcagcctcgacctccctgggcttgggcaatcctcccacaggtgtgcacctccatagctggctaatttgtgtattttttgtagagatggggtttcaccatgttgcccaggctggtctctaacacttaggctcaagtgatccacctgcctcgtcctcccaagatgctgggattacaggtgtgtgccacaggtgttcatcagaaagctttttctattatttttaccttcttgagtgggtagaacctcagccacatagaaaataaaatgttctggcatgacttatttagctctctggaattacaaagaaggaatgaggtgtgtaaaagagaacctgggtttttgaatcacaaatttagaatttaatcgaaactctgcctcttacttgtttgtagacactgacagtggcctcatgttttttttttttttaatctataaaatggagatatctaacatgttgagcctgggcccacaggcaaagcacaatcctgatgtgagaagtactcagttcatgacaactgttgttctcacatgcatagcataatttcatattcacattggaggacttctcccaaaatatggatgacgttccctactcaaccttgaacttaatcaaaatactcagtttacttaacttcgtattagattctgattccctggaaccatttatcgtgtgccttaccatgcttatattttacttgatcttttgcataccttctaaaactattttagccaatttaaaatttgacagtttgcattaaattataggtttacaatatgctttatccagctatacctgccccaaattctgacagatgcttttgccacctctaaaggaagacccatgttcatagtgatggagtttgtgtggactaaccatgcaaggttgccaaggaaaaatcgctttacgcttccaaggtacacactaagatgaaagtaattttagtccgtgtccagttggattcttggcacatagttatcttctgctagaacaaactaaaacagctacatgccagcaagggagaaaggggaaggaggggcaaagttttgaaatttcatgtaaatttatgctgttcaaaacgacgagttcatgactttgtgtatagagtaagaaatgccttttcttttttgagacagagtcttgctctgtcacccaggctggagtgcagtggcacgatctgggctcactacaacctccgcctcctgggttcaagcaattctctgcctcagcctcccgagtagctgggattacaggtgcctgccaccacacccggctaatttttgtatttttagtagagacggggtttcaccatcatggccaggctggtcttgaactcctgacctagtaatccacctgcctccgcctcccaaagtgctgggattacaggcgtgagccactgcacccagccagaaatgccttctaatctttggtttatcttaattagccaggacacttggagtgcatcccgaagtacctgatcagtggcccctttggaatgtgtaaaactcagctcacttatatccctgcatccgctacagagacagaatccaagctcatatgttccatcttctctggctgtatagtttaaggaatggaaggcaccagaacagatttattgaaatgtttattagctgaagatttatttagacagttgaggaaaacatcagcacccagcagtaaaattggctctcaaagattttcttctcctgtggaaagtcagacctctgaggccccatccaggtagaagtactagtgcaagaagggcctctgctgtccacttgtgtttctgtgatctgtgggaacattgttaacgccacatcttgacctcaaattgtttagctcctggccagacacggtggctcacacctgtaatcccagcactttgagaggctgaggcaggtggatcacctgaggttaggagttcgaggccagcctggtcaacatggtaaaaccccgcctctactaaaaatacaaaaattagctggccgtagtggcgcacgcctgttatcccagctactcgggaggctgaggcaggagaattgcttgaacctgggtggtggaggttgcagtgagccgagattacaccactgcactccagcctgggtgacaagagggaaactccattaaaaaaatgtaattcccgtgtctgccatcttaagtgtaaaggtggctaaattatatagaaaaataagacaatatcatttcccaattacattcctttcctaccgcactctatgatgctagctgagatttttccaaaagaaaatggcttaaataaaaccctaagagaaagaaaaactttaaatccctccaaagctcaaaagtaatagaaacagatgagtttggagtcaggatttctctgtaagattgcctaggctgtgtactgcacatctccaggtgccactgttgacagagattataactacaatgtgaagtgaatggtgccactgacagttatgcaaaccgtccagagcatagccacctgatcctgctgggattcctcttgccagtccatcagcagttccccttgaaagtttcaccaaacatcccttaaatctgccctctcctgcccgtccccagtggaggtcctcatcatttttcacctgcatttttgcaggagctttcttatatccaccttcctccttttctctcagcccatcatctagctacacagtctccagggtaagctttcagaaaggcaatctcttgtctgtaaaacctaagcaggaccaaggccaagtttcttagcctgaaaaatgtgcttttctgactgaactgttcaggcactgactctacatataattatgcttttctaccccctcacactcaacactttgactccagcaatcccaaatccccagatccctaagtgtgctgtgctattttcacgtggctctcagacttggccagtgctgtttccattttggtctttattccccacatctctgcctggggggtagattctaccctgaaaaatgttcttggcacagccttgcaaactcctcctccactcagcctctgcctggatgcccttgattgttccatgtcctcagcataccatgtttgtctttcccagcactgacctaccatgtgtcacccctgcttggctgtaccttccatgaggctaggactatgtgtctcctttgttgactgctgttgccctagcatcttgcacagttccttgcacacaattagagctctataaatgtcaaataaatgtgttataattatatgtttaagatagttgttcaaataaactctaaataaccccaac

SEQ ID NO: 388 - DNA, 2133 bp, Homo Sapiens
  NM_000147
cgggccaatcgttagtcagagtgggcggagccgcccgcgggcacctgcgcgttaagagtgggccgcgtcgctgaggggtagcgatgcgggctccggggatgaggtcgcggccggcgggtcccgcgctgttgctgctgctgctcttcctcggagcggccgagtcggtgcgtcgggcccagcctccgcgccgctacaccccagactggccgagcctggattctcggccgctgccggcctggttcgacgaagccaagttcggggtgttcatccactggggcgtgttctcggtgcccgcctggggcagcgagtggttctggtggcactggcagggcgaggggcggccgcagtaccagcgcttcatgcgcgacaactacccgcccggcttcagctacgccgacttcggaccgcagttcactgcgcgcttcttccacccggaggagtgggccgacctcttccaggccgcgggcgccaagtatgtagttttgacgacaaagcatcacgaaggcttcacaaactggccgagtcctgtgtcttggaactggaactccaaagacgtggggcctcatcgggatttggttggtgaattgggaacagctctccggaagaggaacatccgctatggactataccactcactcttagagtggttccatccactctatctacttgataagaaaaatggcttcaaaacacagcattttgtcagtgcaaaaacaatgccagagctgtacgaccttgttaacagctataaacctgatctgatctggtctgatggggagtgggaatgtcctgatacttactggaactccacaaattttctttcatggctctacaatgacagccctgtcaaggatgaggtggtagtaaatgaccgatggggtcagaactgttcctgtcaccatggaggatactataactgtgaagataaattcaagccacagagcttgccagatcacaagtgggagatgtgcaccagcattgacaagttttcctggggctatcgtcgtgacatggcattgtctgatgttacagaagaatctgaaatcatttcggaactggttcagacagtaagtttgggaggcaactatcttctgaacattggaccaactaaagatggactgattgttcccatcttccaagaaaggcttcttgctgttgggaaatggctgagcatcaatggggaggctatctatgcctccaaaccatggcgggtgcaatgggaaaagaacacaacatctgtatggtatacctcaaagggatcggctgtttatgccatttttctgcactggccagaaaatggagtcttaaaccttgaatcccccataactacctcaactacaaagataacaatgctgggaattcaaggagatctgaagtggtccacagatccagataaaggtctcttcatctctctaccccagttgccaccctctgctgtccccgcagagtttgcttggactataaagctgacaggagtgaagtaatcatttgagtgcaagaagaaagaggcgctgctcactgttttcctgcttcagtttttctcttatagtaccatcactataatcaacgaacttctcttctccacccagagatggcttttccaacacattttaattaaaggaactgagtacattaccctgatgtctaaatggaccaaagatctgagatccattgtgattatatctgtatcaggtcagcagaagaaggaactgagcagttgaactctgagttcatcaattgtaatatttggaaattatctacaatggaatcttccctctgttctctgataacctacttgcttactcaatgcctttaagccaagtcaccctgttgcctatgggaggaggtggaaggatttggcaagctcaaccacatgctatttagttagcatcagttgtcaccaacagtctttctgcaaagggcaggagagctttgggggaaaggaaaaggcttaccaggctgctatggtcaactcttcagaaattttcagagcaatctaaaagcgccaaaattcgctatgtttacagtgatactattaagaaaatgaatgtgattctgctctgtctttttaagtatgatcaaataaaaaatttgtacatcacaatcatttctaccaaaaaaaaaaaaaaaaaa

SEQ ID NO: 389 - DNA, 3897 bp, Homo Sapiens
  NM_000153
actcaaaatggcggcggcggcgtcagcatcagcggcctcctgcccgtatctatcgtggcggcgacgggacccgcctccctgggcgccggagtcatgtgacccacacaatggctgagtggctactctcggcttcctggcaacgccgagcgaaagctatgactgcggccgcgggttcggcgggccgcgccgcggtgcccttgctgctgtgtgcgctgctggcgcccggcggcgcgtacgtgctcgacgactccgacgggctgggccgggagttcgacggcatcggcgcggtcagcggcggcggggcaacctcccgacttctagtaaattacccagagccctatcgttctcagatattggattatctctttaagccgaattttggtgcctctttgcatattttaaaagtggaaataggtggtgatgggcagacaacagacggcactgagccctcccacatgcattatgcactagatgagaattatttccgaggatacgagtggtggttgatgaaagaagctaagaagaggaatcccaatattacactcattgggttgccatggtcattccctggatggctgggaaaaggtttcgactggccttatgtcaatcttcagctgactgcctattatgtcgtgacctggattgtgggcgccaagcgttaccatgatttggacattgattatattggaatttggaatgagaggtcatataatgccaattatattaagatattaagaaaaatgctgaattatcaaggtctccagcgagtgaaaatcatagcaagtgataatctctgggagtccatctctgcatccatgctccttgatgccgaactcttcaaggtggttgatgttataggggctcattatcctggaacccattcagcaaaagatgcaaagttgactgggaagaagctttggtcttctgaagactttagcactttaaatagtgacatgggtgcaggctgctggggtcgcattttaaatcagaattatatcaatggctatatgacttccacaatcgcatggaatttagtggctagttactatgaacagttgccttatgggagatgcgggttgatgacggcccaggagccatggagtgggcactacgtggtagaatctcctgtctgggtatcagctcataccactcagtttactcaacctggctggtattacctgaagacagttggccatttagagaaaggaggaagctacgtagctctgactgatggcttagggaacctcaccatcatcattgaaaccatgagtcataaacattctaagtgcatacggccatttcttccttatttcaatgtgtcacaacaatttgccacctttgttcttaagggatcttttagtgaaataccagagctacaggtatggtataccaaacttggaaaaacatccgaaagatttctttttaagcagctggattctctatggctccttgacagcgatggcagtttcacactgagcctgcatgaagatgagctgttcacactcaccactctcaccactggtcgcaaaggcagctacccgcttcctccaaaatcccagcccttcccaagtacctataaggatgatttcaatgttgattacccattttttagtgaagctccaaactttgctgatcaaactggtgtatttgaatattttacaaatattgaagaccctggcgagcatcacttcacgctacgccaagttctcaaccagagacccattacgtgggctgccgatgcatccaacacaatcagtattataggagactacaactggaccaatctgactataaagtgtgatgtatacatagagacccctgacacaggaggtgtgttcattgcaggaagagtaaataaaggtggtattttgattagaagtgccagaggaattttcttctggatttttgcaaatggatcttacagggttacaggtgatttagctggatggattatatatgctttaggacgtgttgaagttacagcaaaaaaatggtatacactcacgttaactattaagggtcatttcacctctggcatgctgaatgacaagtctctgtggacagacatccctgtgaattttccaaagaatggctgggctgcaattggaactcactcctttgaatttgcacagtttgacaactttcttgtggaagccacacgctaatacttaacagggcatcatagaatactctggattttcttcccttctttttggttttggttcagagccaattcttgtttcattggaacagtatatgaggcttttgagactaaaaataatgaagagtaaaaggggagagaaatttatttttaatttaccctgtggaagattttattagaattaattccaaggggaaaactggtgaatctttaacattacctggtgtgttccctaacattcaaactgtgcattggccatacccttaggagtggtttgagtagtacagacctcgaagccttgctgctaacactgaggtagctctcttcatcttatttgcaagcggtcctgtagatggcagtaacttgatcatcactgagatgtatttatgcatgctgaccgtgtgtccaagtgagccagtgtcttcatcacaagatgatgctgccataatagaaagctgaagaacactagaagtagctttttgaaaaccacttcaacctgttatgctttatgctctaaaaagtatttttttattttcctttttaagatgatacttttgaaatgcaggatatgatgagtgggatgattttaaaaatgcctctttaataaactacctctaacactatttctgcagtaatagatattagcagattaattgggttatttgcattatttaatttttttgattccaagttttggtcttgtaaccactataactctctgtgaacgtttttccaggtggctggaagaaggaagaaaacctgatatagccaatgctgttgtagtcgtttcctcagcctcatctcactgtgctgtggtctgtcctcacatgtgcactggtaacagactcacacagctgatgaatgcttttctctccttatgtgtggaaggaggggagcacttagacatttgctaactcccagaattggatcatctcctaagatgtacttactttttaaagtccaaatatgtttatatttaaatatacgtgagcgtgttcatcatgttgtatgatttatactaagcattaatgtggctctatgtagcaaatcagttattcatgtaggtaaagtaaatctagaattatttataagaattactcattgaactaattctactatttaggaatttgtaagagtctaacataggcttagctacagtgaagttttgcattgcttttgaagacaagaagataagtgctagaataaataagattacagagaaaattttttgttaaaaccaagtgatttccagctgatgtatctaatattttttaaaacgaacattatagaggtgtaatttatttacaataaaatgttcctactttaaatatacaattcagtgagttttgataaattgatatacccatgtaaccaacactccagtcaagcttcagaatatttccatcaccccagaaggttctcttgtatacctgctcagtcagttcctttcactcccaattgttggcagccattgataggaattctatcactataggttagttttctttgttccagaacatcatgaaagcggcgtcatgtactgtgtattcttatgaatggtttctttccatcagcataatgatttgagatttgtccatgttgtgtgattcagtggtttgttccttcttatttctgaagagttttccattgtatgaatataccacaatttgtttcctccccaccagtttctgatactacaattaaaactgtctacatttacaaaaaaaaaaaaaaaa

SEQ ID NO: 390 - DNA, 1347 bp, Homo Sapiens
  NM_000155
gtggacggagaaagtgaaaggtgaggcacggccctgcagattttccagcggatcccccggtggcctcatgtcgcgcagtggaaccgatcctcagcaacgccagcaggcgtcagaggcggacgccgcagcagcaaccttccgggcaaacgaccatcagcatatccgctacaacccgctgcaggatgagtgggtgctggtgtcagctcaccgcatgaagcggccctggcagggtcaagtggagccccagcttctgaagacagtgccccgccatgaccctctcaaccctctgtgtcctggggccatccgagccaacggagaggtgaatccccagtacgatagcaccttcctgtttgacaacgacttcccagctctgcagcctgatgcccccagtccaggacccagtgatcatccccttttccaagcaaagtctgctcgaggagtctgtaaggtcatgtgcttccacccctggtcggatgtaacgctgccactcatgtcggtccctgagatccgggctgttgttgatgcatgggcctcagtcacagaggagctgggtgcccagtacccttgggtgcagatctttgaaaacaaaggtgccatgatgggctgttctaacccccacccccactgccaggtatgggccagcagtttcctgccagatattgcccagcgtgaggagcgatctcagcaggcctataagagtcagcatggagagcccctgctaatggagtacagccgccaggagctactcaggaaggaacgtctggtcctaaccagtgagcactggttagtactggtccccttctgggcaacatggccctaccagacactgctgctgccccgtcggcatgtgcggcggctacctgagctgacccctgctgagcgtgatgatctagcctccatcatgaagaagctcttgaccaagtatgacaacctctttgagacgtcctttccctactccatgggctggcatggggctcccacaggatcagaggctggggccaactggaaccattggcagctgcacgctcattactaccctccgctcctgcgctctgccactgtccggaaattcatggttggctacgaaatgcttgctcaggctcagagggacctcacccctgagcaggctgcagagagactaagggcacttcctgaggttcattaccacctggggcagaaggacagggagacagcaaccatcgcctgaccacgccgaccacagggccttgaatccttttttgttttcaacagtcttgctgaattaagcagaaagggccttgaatcctggcctggaatttgggcagatatagcattaataaaactgtgcatctcaaaaaaaaaaaaaaa

SEQ ID NO: 391 - DNA, 1086 bp, Homo Sapiens
  NM_000156
ccccggcccacaagcccctgcagggagcgggcccgggcggcgcgcgatcgaggtcgggtcgccgtccagcctgcagcatgagcgcccccagcgcgacccccatcttcgcgcccggcgagaactgcagccccgcgtggggggcggcgcccgcggcctacgacgcagcggacacgcacctgcgcatcctgggcaagccggtgatggagcgctgggagaccccctatatgcacgcgctggccgccgccgcctcctccaaagggggccgggtcctggaggtgggctttggcatggccatcgcagcgtcaaaggtgcaggaggcgcccattgatgagcattggatcatcgagtgcaatgacggcgtcttccagcggctccgggactgggccccacggcagacacacaaggtcatccccttgaaaggcctgtgggaggatgtggcacccaccctgcctgacggtcactttgatgggatcctgtacgacacgtacccactctcggaggagacctggcacacacaccagttcaacttcatcaagaaccacgcctttcgcctgctgaagccggggggcgtcctcacctactgcaacctcacctcctggggggagctgatgaagtccaagtactcagacatcaccatcatgtttgaggagacgcaggtgcccgcgctgctggaggccggcttccggagggagaacatccgtacggaggtgatggcgctggtcccaccggccgactgccgctactacgccttcccacagatgatcacgcccctggtgaccaaaggctgagcccccaccccggcccggccacacccatgccctcctccgtgccttcctggccgggagtccagggtgtcgcaccagccctgggctgatcccagctgtgtgtcaccagaagctttcccggcttctctgtgaggggtcccaccagcccagggctgatcccagctgtgtgtcaccagcagctttcccagcttctctgtgagggtcactgctgcccactgcagggtccctgaggtgaagtaaacgccggcgctgggcttggccagtcggcagtgaaaaaaaaaaaaaaaaaaaaaaaaaaaaa

SEQ ID NO: 392 - DNA, 3118 bp, Homo Sapiens
  NM_000158
gtgagtgggcggagaggcctcggtgcctcctacccgctccggacgtgcgtcccggcatcaccccgggatccgctcctccccgctggcggggggagaaagggcaggaggccttccgtcccggctataaagggccccggaccgccgcggctcgcctcggcttgcctcgacacgcctaggcgccctccggctccgccctagccgccgcgtcccagctagagctccagcgcccgctcaggccccactcgaccctctcgggcctcggctacttggactgcggcggaatatggcggctccgatgactcccgcggctcggcccgaggactacgaggcggcgctcaatgccgccctggctgacgtgcccgaactggccagactcctggagatcgacccgtacttgaagccctacgccgtggacttccagcgcaggtataagcagtttagccaaattttgaagaacattggagaaaatgaaggtggtattgataagttttccagaggctatgaatcatttggcgtccacagatgtgctgatggtggtttatactgcaaagaatgggccccgggagcagaaggagtttttcttactggagattttaatggttggaatccattttcgtacccatacaaaaaactggattatggaaaatgggagctgtatatcccaccaaagcagaataaatctgtactcgtgcctcatggatccaaattaaaggtagttattactagtaaaagcggagagatcttgtatcgtatttcaccgtgggcaaagtatgtggttcgtgaaggtgataatgtgaattatgattggatacactgggatccagaacactcatatgagtttaagcattccagaccaaagaagccacggagtctaagaatttatgaatctcatgtgggaatttcttcccatgaaggaaaagtagcttcttataaacattttacatgcaatgtactaccaagaatcaaaggccttggatacaactgcattcagttgatggcaatcatggagcatgcttactatgccagctttggttaccaaatcacaagcttctttgcagcttccagccgttatggaacacctgaagagctacaagaactggtagacacagctcattccatgggtatcatagtcctcttagatgtggtacacagccatgcttcaaaaaattcagcagatggattgaatatgtttgatgggacagattcctgttattttcattctggacctagagggactcatgatctttgggatagcagattgtttgcctactccagctgggaagttttaagattccttctgtcaaacataagatggtggttggaagaatatcgctttgatggatttcgttttgatggtgttacgtccatgctttatcatcaccatggagtgggtcaaggtttctcaggtgattacagtgaatatttcggactacaagtagatgaagatgccttgacttacctcatgttggcaaatcatttggttcacacgctgtgtcccgattctataacaatagctgaggatgtatcaggaatgccagctctgtgctctccaatttcccagggagggggtggttttgactatcgactagccatggcaattccagataagtggattcagctacttaaagagtttaaagatgaagactggaacatgggcgatatagtatacacgctcacaaacaggcgctaccttgaaaagtgcattgcttatgcagagagccatgatcaggcattggttggggataagtcgctggcattttggttgatggatgccgaaatgtatacaaacatgagtgtcctgactccttttactccagttattgatcgtggaatacagcttcataaaatgattcgactcattacgcatgggcttggtggagaaggctatctcaatttcatgggtaatgaatttgggcatcctgaatggttagacttcccaagaaaaggaaataatgagagttaccattatgccaggcggcagtttcatttaactgacgacgaccttcttcgctacaagttcctaaataattttgacagggatatgaatagattggaagaaagatatggttggcttgcagctccacaggcctacgtgagtgaaaaacatgaaggcaataagatcattgcttttgaaagagcaggtcttcttttcattttcaacttccatccaagcaagagctacactgactaccgagttggaacagcattgccagggaaattcaaaattgtgctagattcagatgcagcggaatatggagggcatcagagactggaccacagcactgactttttttctgaggcttttgaacataatgggcgtccctattctcttttggtgtacattccaagcagagtggccctcatccttcagaatgtggatctgccgaattgaagaggcctgatttcagctccaccagatgcagatttgtgttttgttttcttgttatcactgtcacacagcttataacatgtatgcttttcagaatacagttgtctagccaagccatcaagtgtctgaaattcaatattggtttatgcaaatacagcaaacttttatttaagtagatgggagaatatgtttaaaatattaggaatcctagaccatattttcaagtcatcttagcagctaggattctcaaatggaagtgttatatataatatgttaaaaacattttgctttcctggctaattatttgatccttttaaattcaaatttgaatcatttgtcatgtatgattatttctgttaaatgtacacagtatttaagatggatatttggtggctctatttgttctgatatcttttggtctaaattatgaggtaccaagattgtttctttgtttctttttttcaaattgtgtttagaaatactgtaataaatatgcagtagtgatataaagaattatatccaaggtaatataaaagccattacgtatgaactcatccgtgtctcattttgtgttttattttgtgatctcttgtccactaagtatcttgttaaatgccagtatctcagtctttctgaagccctgaaatggtaattgtagcatttcagaaaatgtctttcatttcaatcaataaaaagcttttgtaaaattgcaaaaaaaaaaaaaaaaaa

SEQ ID NO: 393 - DNA, 1839 bp, Homo Sapiens
  NM_000159
agttgcactgtagcctcggcagtgaaccgggaggtactaccaggtcgccgtcgttgctccgctcgctctgagagagcatggccctgagaggcgtctccgtgcggctgctgagccgcggacccggcctgcacgtccttcgcacgtgggtctcgtcggcggcgcagaccgagaaaggcgggagaacacagagccaactggctaagtcctcgcgtcccgagtttgactggcaggacccgctggtgctggaggagcagctgaccacagatgagatcctcatcagggacaccttccgcacctactgccaggagagactcatgcctcgcatcctgttggccaatcgcaacgaagtttttcatcgggagatcatttcggagatgggggagttgggtgtgctgggccccaccatcaaaggatatggctgtgctggggtttcgtctgtggcctatgggctcctggcccgagagctggagcgggtggacagtggctacaggtcggcgatgagtgtccagtcctccctcgtcatgcaccctatctatgcctatggcagcgaggaacagcggcagaagtacctgccccagctggccaagggggagctcctgggctgcttcgggctcacagagcccaacagcggaagtgaccccagcagcatggagaccagagcccactacaactcatccaacaagagctacaccctcaatgggaccaagacctggatcacgaactcgcctatggccgatctgtttgtagtgtgggctcggtgtgaagatggctgcattcggggcttcctgctggagaaggggatgcggggtctctcggcccccaggatccagggcaagttctcgctgcgggcctcagccacaggcatgatcatcatggacggtgtggaggtgccagaggagaatgtgctccctggtgcatccagcctggggggtcccttcggctgcctgaacaacgcccggtacggcatcgcgtggggcgtgcttggagcttcggagttctgcttgcacacagcccggcagtacgccctcgacaggatgcagtttggtgtcccactggccaggaaccagctgattcagaagaagctggcagacatgctcactgagattaccctgggccttcacgcctgcctgcagctcggccgcttgaaggaccaggacaaggctgcccccgagatggtttctctgctgaagaggaataactgtgggaaagccctggacatcgcccgccaggcccgagacatgctgggggggaatgggatttctgacgagtatcacgtgatccggcacgccatgaacctggaggccgtgaacacctacgaaggtacacatgacattcacgccctgatccttgggagagctatcacgggaatccaggcgttcacggccagcaagtgagccgctccatcaggggcccgaaactctcaagcccctttctggagagatgcctggctggaccgtaggagcgctgtgctctgagcttagaaagggaggtggcggatggagtgggaagtgagagacactgatttttaaatatcaaaatttcccttctgaagtcgttcagatgtgttccttaaaaagaagatggaattctctgtagagcgtctcaatccacttttaaccatggatgagagcagactccatttaccctgaaatagcagcttctcttgagaggagagtgacatggaagcaactccgtctgctgcagctgaccccctcacactgagttcacagtgcgccctccctccctcccatctgggggtagtgccttatgctgggtgttggagcagagtgagggagaggaaaataaagacctgcacatctgaaaaaaaaaaaaaaaaaa

SEQ ID NO: 394 - DNA, 3620 bp, Homo Sapiens
  NM_000167
gggccggaggggcggggtgagaaggctgcgcgcgggtaaaggggccgcctcgagcgcggtccgagcgttcagcggacgcgcgcggcctcgatctctggactcgtcacctgcccctccccctcccgccgccgtcacccaggaaaccggccgcaatcgccggccgacctgaagctggtttcatggcagcctcaaagaaggcagttttggggccattggtgggggcggtggaccagggcaccagttcgacgcgctttttggttttcaattcaaaaacagctgaactacttagtcatcatcaagtagaaataaaacaagagttcccaagagaaggatgggtggaacaggaccctaaggaaattctacattctgtctatgagtgtatagagaaaacatgtgagaaacttggacagctcaatattgatatttccaacataaaagctattggtgtcagcaaccagagggaaaccactgtagtctgggacaagataactggagagcctctctacaatgctgtggtgtggcttgatctaagaacccagtctaccgttgagagtcttagtaaaagaattccaggaaataataactttgtcaagtccaagacaggccttccacttagcacttacttcagtgcagtgaaacttcgttggctccttgacaatgtgagaaaagttcaaaaggccgttgaagaaaaacgagctctttttgggactattgattcatggcttatttggagtttgacaggaggagtcaatggaggtgtccactgtacagatgtaacaaatgcaagtaggactatgcttttcaacattcattctttggaatgggataaacaactctgcgaattttttggaattccaatggaaattcttccaaatgtccggagttcttctgagatctatggcctaatgaaagctggggccttggaaggtgtgccaatatctgggtgtttaggggaccagtctgctgcattggtgggacaaatgtgcttccagattggacaagccaaaaatacgtatggaacaggatgtttcttactatgtaatacaggccataagtgtgtattttctgatcatggccttctcaccacagtggcttacaaacttggcagagacaaaccagtatattatgctttggaaggttctgtagctatagctggtgctgttattcgctggctaagagacaatcttggaattataaagacctcagaagaaattgaaaaacttgctaaagaagtaggtacttcttatggctgctacttcgtcccagcattttcggggttatatgcaccttattgggagcccagcgcaagagggataatctgtggactcactcagttcaccaataaatgccatattgcttttgctgcattagaagctgtttgtttccaaactcgagagattttggatgccatgaatcgagactgtggaattccactcagtcatttgcaggtagatggaggaatgaccagcaacaaaattcttatgcagctacaagcagacattctgtatataccagtagtgaagccctcaatgcccgaaaccactgcactgggtgcggctatggcggcaggggctgcagaaggagtcggcgtatggagtctcgaacccgaggatttgtctgccgtcacgatggagcggtttgaacctcagattaatgcggaggaaagtgaaattcgttattctacatggaagaaagctgtgatgaagtcaatgggttgggttacaactcaatctccagaaagtggtattccataaaacctaccaactcatggattcccaagatgtgagctttttacataatgaaagaacccagcaattctgtctcttaatgcaatgacactattcatagactttgattttatttataagccacttgctgcatgaccctccaagtagacctgtggcttaaaataaagaaaatgcagcaaaaagaatgctatagaaatatttggtggttttttttttttttaaacatccacagttaaggttgggccagctacctttggggctgaccccctccattgccataacatcctgctccattccctctaagatgtaggaagaattcggatccttaccattggaatcttccatcgaacatactcaaacacttttggaccaggatttgagtctctgcatgacatatacttgattaaaaggttattactaacctgttaaaaatcagcagctctttgcttttaacagacaccctaaaagtcttcttttctacatagttgaagacagcaacatcttcactgaatgtttgaatagaaacctctactaaattattaaaatagacatttagtgttctcacagcttggatatttttctgaaaagttatttgccaaaactgaaatccttcagatgttttccatggtcccactaattataatgactttctgtctggatcttataggaaaagatactttcttttttcttccatctttcctttttatattttttactttgtatgtataacatacatgcctatatattttatacactgagggtagcccatttataaattaagagcacattatattcagaaggttctaacagggctggtcttaagtgaaccactgtgtatataaatatgttggaaaacagctgtatacatttttgggcaacggttatgcataatatttaccaggagaatttttttcttaacaagccaacatttaaaatttatgttttatgtcaataaaagaaaatatactttattgtgacttcaactatatttcttatcccttacatttttatttaattgtcttagcttaaaaaaagaagaaactgtggaatactacagtaaatattgttttcaaacacaagcaataattcaaatagttatttttcttttgaattaattttagacatattttggatcctattgaggggataagaggatgtcaaaaaagttaaatacctaagtagaaaaaaatatagaaataaagccaagaatctctttcagttcaaatgttatcaattgttaataagaaattgctatctgggatgacagaattacctctgcttagtatctcattataactgaaagaaggtttatcattacaaataccttccaatgaaaccaagaatttctcaaaatatttaatgtcacatattataagaagttacctaatcctgcttcttaacatcaatttttaaaaatatcttaaaattactttgttttgtagtaaacagtgaagaaaagattgcctcctaattatttttttcaatgagtgctgaatgggaaaacatttatatcttactataaaaggttctgttttgtttggaatcaatggtagctttattgactgttctgattgtgctgtttctaatttattgaatctgctaggttttattgatgcagccaccacttaagtgacataaatattatagaaaggtactgtgaaatgatcactttgtggcaggggtacttttaaacataaatgtttctacaaaagtaggttgagttcattgtaaataattgtgaaagccactgttcaaataattttaagattacattaatttttctataaattggaagatttataaatgtttgaaattgtacacattgatatttaatgacaaatttacttaaaataaattgaccccttgttctta

SEQ ID NO: 395 - DNA, 1418 bp, Homo Sapiens
  NM_000169
aaacaataacgtcattatttaataagtcatcggtgattggtccgcccctgaggttaatcttaaaagcccaggttacccgcggaaatttatgctgtccggtcaccgtgacaatgcagctgaggaacccagaactacatctgggctgcgcgcttgcgcttcgcttcctggccctcgtttcctgggacatccctggggctagagcactggacaatggattggcaaggacgcctaccatgggctggctgcactgggagcgcttcatgtgcaaccttgactgccaggaagagccagattcctgcatcagtgagaagctcttcatggagatggcagagctcatggtctcagaaggctggaaggatgcaggttatgagtacctctgcattgatgactgttggatggctccccaaagagattcagaaggcagacttcaggcagaccctcagcgctttcctcatgggattcgccagctagctaattatgttcacagcaaaggactgaagctagggatttatgcagatgttggaaataaaacctgcgcaggcttccctgggagttttggatactacgacattgatgcccagacctttgctgactggggagtagatctgctaaaatttgatggttgttactgtgacagtttggaaaatttggcagatggttataagcacatgtccttggccctgaataggactggcagaagcattgtgtactcctgtgagtggcctctttatatgtggccctttcaaaagcccaattatacagaaatccgacagtactgcaatcactggcgaaattttgctgacattgatgattcctggaaaagtataaagagtatcttggactggacatcttttaaccaggagagaattgttgatgttgctggaccagggggttggaatgacccagatatgttagtgattggcaactttggcctcagctggaatcagcaagtaactcagatggccctctgggctatcatggctgctcctttattcatgtctaatgacctccgacacatcagccctcaagccaaagctctccttcaggataaggacgtaattgccatcaatcaggaccccttgggcaagcaagggtaccagcttagacagggagacaactttgaagtgtgggaacgacctctctcaggcttagcctgggctgtagctatgataaaccggcaggagattggtggacctcgctcttataccatcgcagttgcttccctgggtaaaggagtggcctgtaatcctgcctgcttcatcacacagctcctccctgtgaaaaggaagctagggttctatgaatggacttcaaggttaagaagtcacataaatcccacaggcactgttttgcttcagctagaaaatacaatgcagatgtcattaaaagacttactttaaaatgtttattttattgcc

SEQ ID NO: 396 - DNA, 2501 bp, Homo Sapiens
  NM_000173
gagagaaggacggagtcgagtggcaccctagaagacgctctgtgccttcggaggtctttctgcctgcctgtcctcatgcctctcctcctcttgctgctcctgctgccaagccccttacacccccaccccatctgtgaggtctccaaagtggccagccacctagaagtgaactgtgacaagaggaatctgacagcgctgcctccagacctgccgaaagacacaaccatcctccacctgagtgagaacctcctgtacaccttctccctggcaaccctgatgccttacactcgcctcactcagctgaacctagataggtgcgagctcaccaagctccaggtcgatgggacgctgccagtgctggggaccctggatctatcccacaatcagctgcaaagcctgcccttgctagggcagacactgcctgctctcaccgtcctggacgtctccttcaaccggctgacctcgctgcctcttggtgccctgcgtggtcttggcgaactccaagagctctacctgaaaggcaatgagctgaagaccctgcccccagggctcctgacgcccacacccaagctggagaagctcagtctggctaacaacaacttgactgagctccccgctgggctcctgaatgggctggagaatctcgacacccttctcctccaagagaactcgctgtatacaataccaaagggcttttttgggtcccacctcctgccttttgcttttctccacgggaacccctggttatgcaactgtgagatcctctattttcgtcgctggctgcaggacaatgctgaaaatgtctacgtatggaagcaaggtgtggacgtcaaggccatgacctctaacgtggccagtgtgcagtgtgacaattcagacaagtttcccgtctacaaatacccaggaaaggggtgccccacccttggtgatgaaggtgacacagacctatatgattactacccagaagaggacactgagggcgataaggtgcgtgccacaaggactgtggtcaagttccccaccaaagcccatacaaccccctggggtctattctactcatggtccactgcttctctagacagccaaatgccctcctccttgcatccaacacaagaatccactaaggagcagaccacattcccacctagatggaccccaaatttcacacttcacatggaatccatcacattctccaaaactccaaaatccactactgaaccaaccccaagcccgaccacctcagagcccgtcccggagcccgccccaaacatgaccaccctggagcccactccaagcccgaccaccccagagcccacctcagagcccgcccccagcccgaccaccccggagcccacctcagagcccgcccccagcccgaccaccccagagcccacctcagagcccgcccccagcccgaccaccccggagcccaccccaatcccgaccatcgccacaagcccgaccatcctggtgtctgccacaagcctgatcactccaaaaagcacatttttaactaccacaaaacccgtatcactcttagaatccaccaaaaaaaccatccctgaacttgatcagccaccaaagctccgtggggtgctccaagggcatttggagagctccagaaatgacccttttctccaccccgacttttgctgcctcctccccctgggcttctatgtcttgggtctcttctggctgctctttgcctctgtggtcctcatcctgctgctgagctgggttgggcatgtgaaaccacaggccctggactctggccaaggtgctgctctgaccacagccacacaaaccacacacctggagctgcagaggggacggcaagtgacagtgccccgggcctggctgctcttccttcgaggttcgcttcccactttccgctccagcctcttcctgtgggtacggcctaatggccgtgtggggcctctagtggcaggaaggaggccctcagctctgagtcagggtcgtggtcaggacctgctgagcacagtgagcattaggtactctggccacagcctctgagggtgggaggtttggggaccttgagagaagagcctgtgggctctcctattggaatctagttgggggttggaggggtaaggaacacagggtgatagggaggggtcttagttcctttttctgtatcagaagccctgtcttcacaacacaggcacacaatttcagtcccagccaaagcagaaggggtaatgacatggacttggcggggggacaagacaaagctcccgatgctgcatggggcgctgccagatctcacggtgaaccattttggcagaatacagcatggttcccacatgcatctatgcacagaagaaaatctggaaagtgatttatcaggatgtgagcactcgttgtgtctggatgttacaaatatgggtggttttattttctttttccctgtttagcattttctagttttccactattattgtatattatctgtataataaaaaataattttagggttggga

SEQ ID NO: 397 - DNA, 858 bp, Homo Sapiens
  NM_000174
gccaggacctttcaggccagacaggagcacctgaccaaaggcttcacagccgccctcaccgcccggccttctacggtgtccagagacagttagccaggcctgggctgggcacactccaccttccctagtcaccagctggtttcccagaggagaaggctgagacccgagaagggagccagcctgtcccatgcctgcctggggagccctgttcctgctctgggccacagcagaggccaccaaggactgccccagcccatgtacctgccgcgccctggaaaccatggggctgtgggtggactgcaggggccacggactcacggccctgcctgccctgccggcccgcacccgccaccttctgctggccaacaacagccttcagtccgtgcccccgggagcctttgaccacctgccccagctgcagaccctcgatgtgacgcagaacccctggcactgtgactgcagcctcacctatctgcgcctctggctggaggaccgcacgcccgaggccctgctgcaggtccgctgtgccagccccagcctcgctgcccatggcccgctgggccggctgacaggctaccagctgggcagctgtggctggcagctgcaggcgtcctgggtgcgcccgggggtcttgtgggacgtggcgctggtcgccgtggccgcgctgggcctggctcttctggctggcctgctgtgtgccaccacagaggccctggattgagccaggcccccagaacccctggctccaggccagggggccagtccctgaggcaggtccccagactccaccaagcctggtcagcccaaaccaccagaagcccagaataaactggcagctcagctgttttatataagctc

SEQ ID NO: 398 - DNA, 1918 bp, Homo Sapiens
  NM_000178
gaggccccgccccctgagcctgggtagcggcgcgagggccgggagaaccgttcgcggaggaaaggcgaactagtgttgggatggccaccaactgggggagcctcttgcaggataaacagcagctagaggagctggcacggcaggccgtggaccgggccctggctgagggagtattgctgaggacctcacaggagcccacttcctcggaggtggtgagctatgccccattcacgctcttcccctcactggtccccagtgccctgctggagcaagcctatgctgtgcagatggacttcaacctgctagtggatgctgtcagccagaacgctgccttcctggagcaaactctttccagcaccatcaaacaggatgactttaccgctcgtctctttgacatccacaagcaagtcctaaaagagggcattgcccagactgtgttcctgggcctgaatcgctcagactacatgttccagcgcagcgcagatggctccccagccctgaaacagatcgaaatcaacaccatctctgccagctttgggggcctggcctcccggaccccagctgtgcaccgacatgttctcagtgtcctgagtaagaccaaagaagctggcaagatcctctctaataatcccagcaagggactggccctgggaattgccaaagcctgggagctctacggctcacccaatgctctggtgctactgattgctcaagagaaggaaagaaacatatttgaccagcgtgccatagagaatgagctactggccaggaacatccatgtgatccgacgaacatttgaagatatctctgaaaaggggtctctggaccaagaccgaaggctgtttgtggatggccaggaaattgctgtggtttacttccgggatggctacatgcctcgtcagtacagtctacagaattgggaagcacgtctactgctggagaggtcacatgctgccaagtgcccagacattgccacccagctggctgggactaagaaggtgcagcaggagctaagcaggccgggcatgctggagatgttgctccctggccagcctgaggctgtggcccgcctccgcgccacctttgctggcctctactcactggatgtgggtgaagaaggggaccaggccatcgccgaggcccttgctgcccctagccggtttgtgctaaagccccagagagagggtggaggtaacaacctatatggggaggaaatggtacaggccctgaaacagctgaaggacagtgaggagagggcctcctacatcctcatggagaagatcgaacctgagccttttgagaattgcctgctacggcctggcagccctgcccgagtggtccagtgcatttcagagctgggcatctttggggtctatgtcaggcaggaaaagacactcgtgatgaacaagcacgtggggcatctacttcgaaccaaagccatcgagcatgcagatggtggtgtggcagcgggagtggcagtcctggacaacccataccctgtgtgagggcacaaccaggccacgggaccttctatcctctgtatttgtcattcctctcctagccctcctgaggggtatcctcctaaagacctccaaagtttttatggaagggtaaatactggtaccttcccccagctttccatctgaggaccagaaaagttgtgtctcccttagatgagatctagacgcccccaaatccttgagatgtgggtatagctcagggtaagctgctctgaggtaaaggtccatgaaccctgccccactcctgtcagcccctcatcagccttttcagcaggttccagtgcctgacttgggataggactgagtggtaggaggagggggagtggaggggcatagcctttccctaattctgccttaaataaaactgcattgctgattcaaaaaaaaaaaaaaaaaaa

SEQ ID NO: 399 - DNA, 7109 bp, Homo Sapiens
  NM_000189
tggattatgatttttgtttatttttcctgtttatccatatattatttttcaacaatgagtattgattacttatataataattttaaggctgtacacattgcagacagcaccccactgtttgaaaaactcctcctcagtagaacatggcagaccttcatcttccttccctgaaccttttccaaccttaggcttgccattctccaccagtgctaatgtcatgtctcttgaaatctgtattgaagtcagtatttcattcttgccagtttccactgtgtgtttaaatttggagtctggtgtctagcattagctggggttggagcttccactcctctcagcattggtaagcctcctcacccaccccatcccatgtccaagatcacccagttacacacttaccatctacccagttcattcacatcatcagtcccagagctgcagagatgctctttttctacctcctacttctctggctcttagagaggcagcatgggataatggggcaagcgaatagggccttaaagtagagggacaagggttctcttccctatctgccacttattagctatgtgacctcgtgtaagtctcttttctttttgagacagggtctccctctgtcacctaggctggagtacagtggtatgatcatagctcactgcagcctcgaactcctgggctcaagctatccttccaccttagccttctgagcagcagggactacaggcacatgccaccatgtccggctgatttatttatttttatttgggaagatgggggtctcactatgtcgcccaggctggtcatgaactcctggtctcaagcaaccctccaaccttggactcccaaagtgctgggattacaggtgtgagccctggccttgcctcaatttcctcatctgtaaaacggggttagtgaaactcacatcctatcagtggttttgaggatgggccgactcttgtattgcctgctctagtacaatcagcagctaaggcggctcactttccggccgtgctacaataggtaagaactaggatgctttagacgtgtgactgggcagtgggagcccctcacatgatcccgagatgccagacagtgtctctccgcacagggcgtgtgctggtccagaggcccgtttttccagtcgccccacaccccgggtccgcgatcacgctccccccacccatagccgagcctgacgcggcggtggctcatgcgcctttccgtcccagcctttagccacggaccacacgtcccatctcaggcgccccgcccctcccccgccccccgcccccggcgcgcctccccaggctgccggctccggtgtctgagcggccgcgcccgcgagccgtgagcgatgattggctgcgccacggcggcgggcggtccgtgggcgcacacaccctccccgcgcagccaatgggcgtgcgcacgtcactgatccggaggcccgcgggccggcagcccctcaataagccacattgttgcatgaaactccggcgcaggagtcccgggctgccgctggcaacatcgtgtcacccagctaagaaaatccgcgggcccgagccacgcgcctgtgaatcggagaggtcccactgcccgagtggagccgggctgagattcttctcaagttgagcctcagtgatcctgtggccgaagttagcgccttgacgtgggacaaccggacacgtcgccaggagagaactgaggcgccttctagcagttgtgacgccaaaatcacgtctccggagacccgcgccctccgccagccgggcgcaccctcgccggtagccttctttgtgcgccgtccggactcccagctcccggcccggcagccgagccccagcacaaagcagtcggaccgcgccgcccgcctcccctctcgcgtctccgcctcggtttcccaactctgcgccgtcgggccgcggcaggatgattgcctcgcatctgcttgcctacttcttcacggagctcaaccatgaccaagtgcagaaggttgaccagtatctctaccacatgcgcctctctgatgagaccctcttggagatctctaagcggttccgcaaggagatggagaaagggcttggagccaccactcaccctactgcagcagtgaagatgctgcccacctttgtgaggtccactccagatgggacagaacacggagagttcctggctctggatcttggagggaccaacttccgtgtgctttgggtgaaagtaacggacaatgggctccagaaggtggagatggagaatcagatctatgccatccctgaggacatcatgcgaggcagtggcacccagctgtttgaccacattgccgaatgcctggctaacttcatggataagctacaaatcaaagacaagaagctcccactgggttttaccttctcgttcccctgccaccagactaaactagacgagagtttcctggtctcatggaccaagggattcaagtccagtggagtggaaggcagagacgttgtggctctgatccggaaggccatccagaggagaggggactttgatatcgacattgtggctgtggtgaatgacacagttgggaccatgatgacctgtggttatgatgaccacaactgtgagattggtctcattgtgggcacgggcagcaacgcctgctacatggaagagatgcgccacatcgacatggtggaaggcgatgaggggcggatgtgtatcaatatggagtggggggccttcggggacgatggctcgctcaacgacattcgcactgagtttgaccaggagattgacatgggctcactgaacccgggaaagcaactgtttgagaagatgatcagtgggatgtacatgggggagctggtgaggcttatcctggtgaagatggccaaggaggagctgctctttggggggaagctcagcccagagcttctcaacaccggtcgctttgagaccaaagacatctcagacattgaaggggagaaggatggcatccggaaggcccgtgaggtcctgatgcggttgggcctggacccgactcaggaggactgcgtggccactcaccggatctgccagatcgtgtccacacgctccgccagcctgtgcgcagccaccctggccgccgtgctgcagcgcatcaaggagaacaaaggcgaggagcggctgcgctctactattggggtcgacggttccgtctacaagaaacacccccattttgccaagcgtctacataagaccgtgcggcggctggtgcccggctgcgatgtccgcttcctccgctccgaggatggcagtggcaaaggtgcagccatggtgacagcagtggcttaccggctggccgatcaacaccgtgcccgccagaagacattagagcatctgcagctgagccatgaccagctgctggaggtcaagaggaggatgaaggtagaaatggagcgaggtctgagcaaggagactcatgccagtgcccccgtcaagatgctgcccacctacgtgtgtgctaccccggacggcacagagaaaggggacttcttggccttggaccttggaggaacaaatttccgggtcctgctggtccgtgttcggaatgggaagtggggtggagtggagatgcacaacaagatctacgccatcccgcaggaggtcatgcacggcaccggggacgagctctttgaccacattgtccagtgcatcgcggacttcctcgagtacatgggcatgaagggcgtgtccctgcctctgggttttaccttctccttcccctgccagcagaacagcctggacgagagcatcctcctcaagtggacaaaaggcttcaaggcatctggctgcgagggcgaggacgtggtgaccctgctgaaggaagcgatccaccggcgagaggagtttgacctggatgtggttgctgtggtgaacgacacagtcggaactatgatgacctgtggctttgaagaccctcactgtgaagttggcctcattgttggcacgggcagcaatgcctgctacatggaggagatgcgcaacgtggaactggtggaaggagaagaggggcggatgtgtgtgaacatggaatggggggccttcggggacaatggatgcctagatgacttccgcacagaatttgatgtggctgtggatgagctttcactcaaccccggcaagcagaggttcgagaaaatgatcagtggaatgtacctgggtgagattgtccgtaacattctcatcgatttcaccaagcgtggactactcttccgaggccgcatctcagagcggctcaagacaaggggcatctttgaaaccaagttcttgtctcagattgagagtgactgcctggccctgctgcaagtccgagccatcctgcaacacttagggcttgagagcacctgtgacgacagcatcattgttaaggaggtgtgcactgtggtggcccggcgggcagcccagctctgtggcgcaggcatggccgctgtggtggacaggatacgagaaaaccgtgggctggacgctctcaaagtgacagtgggtgtggatgggaccctctacaagctacatcctcactttgccaaagtcatgcatgagacagtgaaggacctggctccgaaatgtgatgtgtctttcctgcagtcagaggatggcagcgggaagggggcggcgctcatcactgctgtggcctgccgcatccgtgaggctggacagcgatagaacccctgaaatcggaagggacttcctctttctctccttcttccctgttttaaattataagatgtcatccccttgtgtcagagacagaccccttggcttttgcttggcagagaggaccccactggactgggttttgtctctgcatctcattgtagagcttggtggctgagcttggccctattaagataaatagagttccaaataaggatttgttcacatgcatcataaccattcccattggttctcctaaaacatgaaaattatctcccttagtaatcccccttgccaaattccatgtccctgtataattctacaggatggggacactaatgaagatacggttgcttcaccttggagcctgaacatgacatttctaagtggggtgcatcccccagcactgatgttgttactgattctcctgtcagagatctgggaggtctccactgaggatgtgagcctgattatcctataggcagacgtggggagggtggaggggtgacagtggaggaaaatccatggatatccacgcagcagcccctctttaacctcatctacaagcatttgccctgtggattccagcatttgccattcctggaatcaaggaatcctgagtctgggcaatgaaaccaaagccaggagttgacgcatcctgcagttgggccagctgtcgcatctcagcggggcgcacatgttatccacaagcaatggacctttggggaagggggagtttttagtttgttttacaaatttttcctgcaaaagtggaatcactgtattttcattttaatttatatttgaaattttatttagttcttgagtagatctgcttcttcatcttgacatgtaatgaatggtcagttgtacgtaatgtatttatatgttaatttgttatgtatatagatgtgcaagtcttgtcagaattggcctcagtgtagttaaagggcagaaggggaagatactgactagtcatagaaatacctcattcgcctgtgggaagagaagggaagcctcttcagggtgagtgaatggcaaagcggttgcttctggctcctccttcccctgtggtcttggaagtgtgtggaaggcagggacagagatggaggccgagccaatagactgaagagaccacagcaattggctcctccatctagagattttcttggcagtattccatgggatgttaagcaaaggaaaccaaaggaatcgtttcaaatggactcatggcttagaaatctttattcttagggcagtcagtagtattctaaagctttctgacaagataaaggaagtcaccaaaatttctttttttaaattgtatctaatcctcaacaacaaaccaaaacagaacaattaaacagccaaataaaacctcagggacaacatttttggtgtatttgagccctcccagcaagtttcaccttgggtttgtattttaaatgttttacaagaattgtccatgtgcttccctaggctgagctggcattggtctgctgacctgtttttgtgtttttcttttttttatacacaacatttatttcaaactattgggagggatgagagtggcttaaaaacttccatccctacttttcaagagtgcagttgattctgaatctgaaagcccgcctctgtcctaaaatacaaacaagcacagacattaaacctggatactatatgataaagagggatgtaactattgaattggatacaaggatcagaatggaaagaaactcacgatgaaattgaacctggtttttgtatatttatcaaacttgtgctgagaatagtgtctgattatacgacttttaagcaaagttgggtgtaattaggtgaaaacagcccaggtcctcccgggagcacagaggggctaggggctggtccttctcgtttgctctagtcttgctttgctgtctggtgtagctcctctgctgctcccatctgcactaattgacccaaaacgtgggtatttcctgctacacaaaagccaaaaggtttcatgtagattttagttcactaaagggtgcccacaaaatagagattaattttaacttaaattttaagcttgaagattaggtactatctgtgaagttacacttttttttttttttttaaaggtagagatgtgtgtgtgtgtaggtattaaagatgtgttgttggtttccaaaaaggaacactggaaaataaattttgaatgtttatgttctcagaatcaggttgacagtcccttgctgacatggctttgctttgtgtaaatacagtggatctcaatcttcggggtgtgatgaatagcgaatcatctcaaatccttgagcactcagtctagtgaagatgttgtcattatgtacaatacataactagtttaattaactatgtgatgttaactattattaataaattttaacattttccaaaataaaaaaaaaaaaaaaaaa

SEQ ID NO: 400 - DNA, 2770 bp, Homo Sapiens
  NM_000199
gaccggggtcggggcagggggcggggccgagcgggagaccagagagccggagccggatcccgatcccgagtccgagccgccgccgccatgagctgccccgtgcccgcctgctgcgcgctgctgctagtcctggggctctgccgggcgcgtccccggaacgcactgctgctcctcgcggatgacggaggctttgagagtggcgcgtacaacaacagcgccatcgccaccccgcacctggacgccttggcccgccgcagcctcctctttcgcaatgccttcacctcggtcagcagctgctctcccagccgcgccagcctcctcactggcctgccccagcatcagaatgggatgtacgggctgcaccaggacgtgcaccacttcaactccttcgacaaggtgcggagcctgccgctgctgctcagccaagctggtgtgcgcacaggcatcatcgggaagaagcacgtggggccggagaccgtgtacccgtttgactttgcgtacacggaggagaatggctccgtcctccaggtggggcggaacatcactagaattaagctgctcgtccggaaattcctgcagactcaggatgaccggcctttcttcctctacgtcgccttccacgacccccaccgctgtgggcactcccagccccagtacggaaccttctgtgagaagtttggcaacggagagagcggcatgggtcgtatcccagactggaccccccaggcctacgacccactggacgtgctggtgccttacttcgtccccaacaccccggcagcccgagccgacctggccgctcagtacaccaccgtcggccgcatggaccaaggagttggactggtgctccaggagctgcgtgacgccggtgtcctgaacgacacactggtgatcttcacgtccgacaacgggatccccttccccagcggcaggaccaacctgtactggccgggcactgctgaacccttactggtgtcatccccggagcacccaaaacgctggggccaagtcagcgaggcctacgtgagcctcctagacctcacgcccaccatcttggattggttctcgatcccgtaccccagctacgccatctttggctcgaagaccatccacctcactggccggtccctcctgccggcgctggaggccgagcccctctgggccaccgtctttggcagccagagccaccacgaggtcaccatgtcctaccccatgcgctccgtgcagcaccggcacttccgcctcgtgcacaacctcaacttcaagatgccctttcccatcgaccaggacttctacgtctcacccaccttccaggacctcctgaaccgcaccacagctggtcagcccacgggctggtacaaggacctccgtcattactactaccgggcgcgctgggagctctacgaccggagccgggacccccacgagacccagaacctggccaccgacccgcgctttgctcagcttctggagatgcttcgggaccagctggccaagtggcagtgggagacccacgacccctgggtgtgcgcccccgacggcgtcctggaggagaagctctctccccagtgccagcccctccacaatgagctgtgaccatcccaggaggcctgtgcacacatcccaggcatgtcccagacacatcccacacgtgtccgtgtggccggccagcctggggagtagtggcaacagcccttccgtccacactcccatccaaggagggttcttccttcctgtggggtcactcttgccattgcctggagggggaccagagcatgtgaccagagcatgtgcccagcccctccaccaccaggggcactgccgtcatggcaggggacacagttgtccttgtgtctgaaccatgtcccagcacgggaattctagacatacgtggtctgcggacagggcagcgcccccagcccatgacaagggagtcttgttttctggcttggtttggggacctgcaaatgggaggcctgaggccctcttcaggctttggcagccacagatacttctgaacccttcacagagagcaggcaggggcttcggtgccgcgtgggcagtacgcaggtcccaccgacactcacctgggagcacggcgcctggctcttaccagcgtctggcctagaggaagcctttgagcgacctttgggcaggtttctgcttcttctgttttgccccatggtcaagtccctgttccccaggcaggtttcagctgattggcagcaggctccctgagtgatgagcttgaacctgtggtgtttctgggcagaagcttatcttttttgagagtgtccgaagatgaaggcatggcgatgcccgtcctctggcttgggttaattcttcggtgacactggcattgctgggtggtgatgcccgtcctctggcttgggttaattcttcggtgacactggcgttgctgggtggcaatgcccatcctctgccttgggttaattcttcggtgacactggcgttgctgggtggcgatgcccgtcctctggcttgggttaattcttggatgacgtcggcgttgctgggagaatgtgccgttcctgccctgcctccacccacctcgggagcagaagcccggcctggacacccctcggcctggacacccctcgaaggagagggcgcttccttgagtaggtgggctccccttgcccttccctccctatcactccatactggggtgggctggaggaggccacaggccagctattgtaaaagctttttattttagtaaaatatacagaagttctttttctgaaaa

SEQ ID NO: 401 - DNA, 2203 bp, Homo Sapiens
  NM_000203
gtcacatggggtgcgcgcccagactccgacccggaggcggaaccggcagtgcagcccgaagccccgcagtccccgagcacgcgtggccatgcgtcccctgcgcccccgcgccgcgctgctggcgctcctggcctcgctcctggccgcgcccccggtggccccggccgaggccccgcacctggtgcatgtggacgcggcccgcgcgctgtggcccctgcggcgcttctggaggagcacaggcttctgccccccgctgccacacagccaggctgaccagtacgtcctcagctgggaccagcagctcaacctcgcctatgtgggcgccgtccctcaccgcggcatcaagcaggtccggacccactggctgctggagcttgtcaccaccagggggtccactggacggggcctgagctacaacttcacccacctggacgggtacctggaccttctcagggagaaccagctcctcccagggtttgagctgatgggcagcgcctcgggccacttcactgactttgaggacaagcagcaggtgtttgagtggaaggacttggtctccagcctggccaggagatacatcggtaggtacggactggcgcatgtttccaagtggaacttcgagacgtggaatgagccagaccaccacgactttgacaacgtctccatgaccatgcaaggcttcctgaactactacgatgcctgctcggagggtctgcgcgccgccagccccgccctgcggctgggaggccccggcgactccttccacaccccaccgcgatccccgctgagctggggcctcctgcgccactgccacgacggtaccaacttcttcactggggaggcgggcgtgcggctggactacatctccctccacaggaagggtgcgcgcagctccatctccatcctggagcaggagaaggtcgtcgcgcagcagatccggcagctcttccccaagttcgcggacacccccatttacaacgacgaggcggacccgctggtgggctggtccctgccacagccgtggagggcggacgtgacctacgcggccatggtggtgaaggtcatcgcgcagcatcagaacctgctactggccaacaccacctccgccttcccctacgcgctcctgagcaacgacaatgccttcctgagctaccacccgcaccccttcgcgcagcgcacgctcaccgcgcgcttccaggtcaacaacacccgcccgccgcacgtgcagctgttgcgcaagccggtgctcacggccatggggctgctggcgctgctggatgaggagcagctctgggccgaagtgtcgcaggccgggaccgtcctggacagcaaccacacggtgggcgtcctggccagcgcccaccgcccccagggcccggccgacgcctggcgcgccgcggtgctgatctacgcgagcgacgacacccgcgcccaccccaaccgcagcgtcgcggtgaccctgcggctgcgcggggtgccccccggcccgggcctggtctacgtcacgcgctacctggacaacgggctctgcagccccgacggcgagtggcggcgcctgggccggcccgtcttccccacggcagagcagttccggcgcatgcgcgcggctgaggacccggtggccgcggcgccccgccccttacccgccggcggccgcctgaccctgcgccccgcgctgcggctgccgtcgcttttgctggtgcacgtgtgtgcgcgccccgagaagccgcccgggcaggtcacgcggctccgcgccctgcccctgacccaagggcagctggttctggtctggtcggatgaacacgtgggctccaagtgcctgtggacatacgagatccagttctctcaggacggtaaggcgtacaccccggtcagcaggaagccatcgaccttcaacctctttgtgttcagcccagacacaggtgctgtctctggctcctaccgagttcgagccctggactactgggcccgaccaggccccttctcggaccctgtgccgtacctggaggtccctgtgccaagagggcccccatccccgggcaatccatgagcctgtgctgagccccagtgggttgcacctccaccggcagtcagcgagctggggctgcactgtgcccatgctgccctcccatcaccccctttgcaatatatttttatattttattattttcttttatatcttggtaaaaaaaaaaaaaaaaaa

SEQ ID NO: 402 - DNA, 5810 bp, Homo Sapiens
  NM_000210
aacgggctcattcagcggtcgcgagctgcccgcgagggggagcggccggacggagagcgcgacccgtcccgggggtggggccgggcgcagcggcgagaggaggcgaaggtggctgcggtagcagcagcgcggcagcctcggacccagcccggagcgcagggcggccgctgcaggtccccgctcccctccccgtgcgtccgcccatggccgccgccgggcagctgtgcttgctctacctgtcggcggggctcctgtcccggctcggcgcagccttcaacttggacactcgggaggacaacgtgatccggaaatatggagaccccgggagcctcttcggcttctcgctggccatgcactggcaactgcagcccgaggacaagcggctgttgctcgtgggggccccgcgggcagaagcgcttccactgcagagagccaacagaacgggagggctgtacagctgcgacatcaccgcccgggggccatgcacgcggatcgagtttgataacgatgctgaccccacgtcagaaagcaaggaagatcagtggatgggggtcaccgtccagagccaaggtccagggggcaaggtcgtgacatgtgctcaccgatatgaaaaaaggcagcatgttaatacgaagcaggaatcccgagacatctttgggcggtgttatgtcctgagtcagaatctcaggattgaagacgatatggatgggggagattggagcttttgtgatgggcgattgagaggccatgagaaatttggctcttgccagcaaggtgtagcagctacttttactaaagactttcattacattgtatttggagccccgggtacttataactggaaagggattgttcgtgtagagcaaaagaataacactttttttgacatgaacatctttgaagatgggccttatgaagttggtggagagactgagcatgatgaaagtctcgttcctgttcctgctaacagttacttaggtttttctttggactcagggaaaggtattgtttctaaagatgagatcacttttgtatctggtgctcccagagccaatcacagtggagccgtggttttgctgaagagagacatgaagtctgcacatctcctccctgagcacatattcgatggagaaggtctggcctcttcatttggctatgatgtggcggtggtggacctcaacaaggatgggtggcaagatatagttattggagccccacagtattttgatagagatggagaagttggaggtgcagtgtatgtctacatgaaccagcaaggcagatggaataatgtgaagccaattcgtcttaatggaaccaaagattctatgtttggcattgcagtaaaaaatattggagatattaatcaagatggctacccagatattgcagttggagctccgtatgatgacttgggaaaggtttttatctatcatggatctgcaaatggaataaataccaaaccaacacaggttctcaagggtatatcaccttattttggatattcaattgctggaaacatggaccttgatcgaaattcctaccctgatgttgctgttggttccctctcagattcagtaactattttcagatcccggcctgtgattaatattcagaaaaccatcacagtaactcctaacagaattgacctccgccagaaaacagcgtgtggggcgcctagtgggatatgcctccaggttaaatcctgttttgaatatactgctaaccccgctggttataatccttcaatatcaattgtgggcacacttgaagctgaaaaagaaagaagaaaatctgggctatcctcaagagttcagtttcgaaaccaaggttctgagcccaaatatactcaagaactaactctgaagaggcagaaacagaaagtgtgcatggaggaaaccctgtggctacaggataatatcagagataaactgcgtcccattcccataactgcctcagtggagatccaagagccaagctctcgtaggcgagtgaattcacttccagaagttcttccaattctgaattcagatgaacccaagacagctcatattgatgttcacttcttaaaagagggatgtggagacgacaatgtatgtaacagcaaccttaaactagaatataaattttgcacccgagaaggaaatcaagacaaattttcttatttaccaattcaaaaaggtgtaccagaactagttctaaaagatcagaaggatattgctttagaaataacagtgacaaacagcccttccaacccaaggaatcccacaaaagatggcgatgacgcccatgaggctaaactgattgcaacgtttccagacactttaacctattctgcatatagagaactgagggctttccctgagaaacagttgagttgtgttgccaaccagaatggctcgcaagctgactgtgagctcggaaatccttttaaaagaaattcaaatgtcactttttatttggttttaagtacaactgaagtcacctttgacaccccagatctggatattaatctgaagttagaaacaacaagcaatcaagataatttggctccaattacagctaaagcaaaagtggttattgaactgcttttatcggtctcgggagttgctaaaccttcccaggtgtattttggaggtacagttgttggcgagcaagctatgaaatctgaagatgaagtgggaagtttaatagagtatgaattcagggtaataaacttaggtaaacctcttacaaacctcggcacagcaaccttgaacattcagtggccaaaagaaattagcaatgggaaatggttgctttatttggtgaaagtagaatccaaaggattggaaaaggtaacttgtgagccacaaaaggagataaactccctgaacctaacggagtctcacaactcaagaaagaaacgggaaattactgaaaaacagatagatgataacagaaaattttctttatttgctgaaagaaaataccagactcttaactgtagcgtgaacgtgaactgtgtgaacatcagatgcccgctgcgggggctggacagcaaggcgtctcttattttgcgctcgaggttatggaacagcacatttctagaggaatattccaaactgaactacttggacattctcatgcgagccttcattgatgtgactgctgctgccgaaaatatcaggctgccaaatgcaggcactcaggttcgagtgactgtgtttccctcaaagactgtagctcagtattcgggagtaccttggtggatcatcctagtggctattctcgctgggatcttgatgcttgctttattagtgtttatactatggaagtgtggtttcttcaagagaaataagaaagatcattatgatgccacatatcacaaggctgagatccatgctcagccatctgataaagagaggcttacttctgatgcatagtattgatctacttctgtaattgtgtggattctttaaacgctctaggtacgatgacagtgttccccgataccatgctgtaaggatccggaaagaagagcgagagatcaaagatgaaaagtatattgataaccttgaaaaaaaacagtggatcacaaagtggaacgaaaatgaaagctactcatagcgggggcctaaaaaaaaaaagcttcacagtacccaaactgctttttccaactcagaaattcaatttggatttaaaagcctgctcaatccctgaggactgatttcagagtgactacacacagtacgaacctacagttttaactgtggatattgttacgtagcctaaggctcctgttttgcacagccaaatttaaaactgttggaatggatttttctttaactgccgtaatttaactttctgggttgcctttatttttggcgtggctgacttacatcatgtgttggggaagggcctgcccagttgcactcaggtgacatcctccagatagtgtagctgaggaggcacctacactcacctgcactaacagagtggccgtcctaacctcgggcctgctgcgcagacgtccatcacgttagctgtcccacatcacaagactatgccattggggtagttgtgtttcaacggaaagtgctgtcttaaactaaatgtgcaatagaaggtgatgttgccatcctaccgtcttttcctgtttcctagctgtgtgaatacctgctcacgtcaaatgcatacaagtttcattctccctttcactaaaacacacaggtgcaacagacttgaatgctagttatacttatttgtatatggtatttattttttcttttctttacaaaccattttgttattgactaacaggccaaagagtctccagtttacccttcaggttggtttaatcaatcagaattagagcatgggaggtcatcactttgacctaaattatttactgcaaaaagaaaatctttataaatgtaccagagagagttgttttaataacttatctataaactataacctctccttcatgacagcctccaccccacaacccaaaaggtttaagaaatagaattataactgtaaagatgtttatttcaggcattggatattttttactttagaagcctgcataatgtttctggatttcatactgtaacattcaggaattcttggagaaaatgggtttattcactgaactctagtgcggtttactcactgctgcaaatactgtatattcaggacttgaaagaaatggtgaatgcctatggtggatccaaactgatccagtataagactactgaatctgctaccaaaacagttaatcagtgagtcgatgttctattttttgttttgtttcctcccctatctgtattcccaaaaattactttggggctaatttaacaagaactttaaattgtgttttaattgtaaaaatggcagggggtggaattattactctatacattcaacagagactgaatagatatgaaagctgattttttttaattaccatgcttcacaatgttaagttatatggggagcaacagcaaacaggtgctaatttgttttggatatagtataagcagtgtctgtgttttgaaagaatagaacacagtttgtagtgccactgttgttttgggggggcttttttcttttcggaaatcttaaaccttaagatactaaggacgttgttttggttgtactttggaattcttagtcacaaaatatattttgtttacaaaaatttctgtaaaacaggttataacagtgtttaaagtctcagtttcttgcttggggaacttgtgtccctaatgtgtttagattgctagattgctaaggagctgatactttgacagtgtttttagacctgtgttactaaaaaaaagatgaatgtcctgaaaagggtgttgggagggtggttcaacaaagaaacaaagatgttatggtgtttagatttatggttgttaaaaatgtcatctcaagtcaagtcactggtctgtttgcatttgatacatttttgtactaactagcattgtaaaattatttcatgattagaaattacctgtggatatttgtataaaagtgtgaaataaattttttataaaagtgttcattgtttcgtaacacagcattgtatatgtgaagcaaactctaaaattataaatgacaacctgaattatctatttcatcaaaccaaagttcagtgtttttatttttggtgtctcatgtaatctcagatcagccaaagatactagtgccaaagcaatgggattcggggtttttttctgttttcgctctatgtaggtgatcctcaagtctttcattttccttctttatgattaaaagaaacctacaggtatttaacaacc

SEQ ID NO: 403 - DNA, 2977 bp, Homo Sapiens
  NM_000211
gggccgctctctgacatcagagctgctgtagagcggagaggggcaggggtgaagggccacggtggtgcaacccaccacttcctccaaggaggagctgagaggaacaggaagtgtcaggactttacgacccgcgcctccagctgaggtttctagacgtgacccagggcagactggtagcaaagcccccacgcccagccaggagcaccgccgaggactccagcacaccgagggacatgctgggcctgcgccccccactgctcgccctggtggggctgctctccctcgggtgcgtcctctctcaggagtgcacgaagttcaaggtcagcagctgccgggaatgcatcgagtcggggcccggctgcacctggtgccagaagctgaacttcacagggccgggggatcctgactccattcgctgcgacacccggccacagctgctcatgaggggctgtgcggctgacgacatcatggaccccacaagcctcgctgaaacccaggaagaccacaatgggggccagaagcagctgtccccacaaaaagtgacgctttacctgcgaccaggccaggcagcagcgttcaacgtgaccttccggcgggccaagggctaccccatcgacctgtactatctgatggacctctcctactccatgcttgatgacctcaggaatgtcaagaagctaggtggcgacctgctccgggccctcaacgagatcaccgagtccggccgcattggcttcgggtccttcgtggacaagaccgtgctgccgttcgtgaacacgcaccctgataagctgcgaaacccatgccccaacaaggagaaagagtgccagcccccgtttgccttcaggcacgtgctgaagctgaccaacaactccaaccagtttcagaccgaggtcgggaagcagctgatttccggaaacctggatgcacccgagggtgggctggacgccatgatgcaggtcgccgcctgcccggaggaaatcggctggcgcaacgtcacgcggctgctggtgtttgccactgatgacggcttccatttcgcgggcgacgggaagctgggcgccatcctgacccccaacgacggccgctgtcacctggaggacaacttgtacaagaggagcaacgaattcgactacccatcggtgggccagctggcgcacaagctggctgaaaacaacatccagcccatcttcgcggtgaccagtaggatggtgaagacctacgagaaactcaccgagatcatccccaagtcagccgtgggggagctgtctgaggactccagcaatgtggtccaactcattaagaatgcttacaataaactctcctccagggtcttcctggatcacaacgccctccccgacaccctgaaagtcacctacgactccttctgcagcaatggagtgacgcacaggaaccagcccagaggtgactgtgatggcgtgcagatcaatgtcccgatcaccttccaggtgaaggtcacggccacagagtgcatccaggagcagtcgtttgtcatccgggcgctgggcttcacggacatagtgaccgtgcaggttcttccccagtgtgagtgccggtgccgggaccagagcagagaccgcagcctctgccatggcaagggcttcttggagtgcggcatctgcaggtgtgacactggctacattgggaaaaactgtgagtgccagacacagggccggagcagccaggagctggaaggaagctgccggaaggacaacaactccatcatctgctcagggctgggggactgtgtctgcgggcagtgcctgtgccacaccagcgacgtccccggcaagctgatatacgggcagtactgcgagtgtgacaccatcaactgtgagcgctacaacggccaggtctgcggcggcccggggagggggctctgcttctgcgggaagtgccgctgccacccgggctttgagggctcagcgtgccagtgcgagaggaccactgagggctgcctgaacccgcggcgtgttgagtgtagtggtcgtggccggtgccgctgcaacgtatgcgagtgccattcaggctaccagctgcctctgtgccaggagtgccccggctgcccctcaccctgtggcaagtacatctcctgcgccgagtgcctgaagttcgaaaagggcccctttgggaagaactgcagcgcggcgtgtccgggcctgcagctgtcgaacaaccccgtgaagggcaggacctgcaaggagagggactcagagggctgctgggtggcctacacgctggagcagcaggacgggatggaccgctacctcatctatgtggatgagagccgagagtgtgtggcaggccccaacatcgccgccatcgtcgggggcaccgtggcaggcatcgtgctgatcggcattctcctgctggtcatctggaaggctctgatccacctgagcgacctccgggagtacaggcgctttgagaaggagaagctcaagtcccagtggaacaatgataatccccttttcaagagcgccaccacgacggtcatgaaccccaagtttgctgagagttaggagcacttggtgaagacaaggccgtcaggacccaccatgtctgccccatcacgcggccgagacatggcttgccacagctcttgaggatgtcaccaattaaccagaaatccagttattttccgccctcaaaatgacagccatggccggccgggtgcttctgggggctcgtcggggggacagctccactctgactggcacagtctttgcatggagacttgaggagggagggcttgaggttggtgaggttaggtgcgtgtttcctgtgcaagtcaggacatcagtctgattaaaggtggtgccaatttatttacatttaaacttgtcagggtataaaatgacatcccattaattatattgttaatcaatcacgtgtatagaaaaaaaataaaacttcaatacaggctgtccatggaaaaaaaaaaaaaaaaaaaaaa

SEQ ID NO: 404 - DNA, 4894 bp, Homo Sapiens
  NM_000212
cgccgcgggaggcggacgagatgcgagcgcggccgcggccccggccgctctgggcgactgtgctggcgctgggggcgctggcgggcgttggcgtaggagggcccaacatctgtaccacgcgaggtgtgagctcctgccagcagtgcctggctgtgagccccatgtgtgcctggtgctctgatgaggccctgcctctgggctcacctcgctgtgacctgaaggagaatctgctgaaggataactgtgccccagaatccatcgagttcccagtgagtgaggcccgagtactagaggacaggcccctcagcgacaagggctctggagacagctcccaggtcactcaagtcagtccccagaggattgcactccggctccggccagatgattcgaagaatttctccatccaagtgcggcaggtggaggattaccctgtggacatctactacttgatggacctgtcttactccatgaaggatgatctgtggagcatccagaacctgggtaccaagctggccacccagatgcgaaagctcaccagtaacctgcggattggcttcggggcatttgtggacaagcctgtgtcaccatacatgtatatctccccaccagaggccctcgaaaacccctgctatgatatgaagaccacctgcttgcccatgtttggctacaaacacgtgctgacgctaactgaccaggtgacccgcttcaatgaggaagtgaagaagcagagtgtgtcacggaaccgagatgccccagagggtggctttgatgccatcatgcaggctacagtctgtgatgaaaagattggctggaggaatgatgcatcccacttgctggtgtttaccactgatgccaagactcatatagcattggacggaaggctggcaggcattgtccagcctaatgacgggcagtgtcatgttggtagtgacaatcattactctgcctccactaccatggattatccctctttggggctgatgactgagaagctatcccagaaaaacatcaatttgatctttgcagtgactgaaaatgtagtcaatctctatcagaactatagtgagctcatcccagggaccacagttggggttctgtccatggattccagcaatgtcctccagctcattgttgatgcttatgggaaaatccgttctaaagtagagctggaagtgcgtgacctccctgaagagttgtctctatccttcaatgccacctgcctcaacaatgaggtcatccctggcctcaagtcttgtatgggactcaagattggagacacggtgagcttcagcattgaggccaaggtgcgaggctgtccccaggagaaggagaagtcctttaccataaagcccgtgggcttcaaggacagcctgatcgtccaggtcacctttgattgtgactgtgcctgccaggcccaagctgaacctaatagccatcgctgcaacaatggcaatgggacctttgagtgtggggtatgccgttgtgggcctggctggctgggatcccagtgtgagtgctcagaggaggactatcgcccttcccagcaggacgaatgcagcccccgggagggtcagcccgtctgcagccagcggggcgagtgcctctgtggtcaatgtgtctgccacagcagtgactttggcaagatcacgggcaagtactgcgagtgtgacgacttctcctgtgtccgctacaagggggagatgtgctcaggccatggccagtgcagctgtggggactgcctgtgtgactccgactggaccggctactactgcaactgtaccacgcgtactgacacctgcatgtccagcaatgggctgctgtgcagcggccgcggcaagtgtgaatgtggcagctgtgtctgtatccagccgggctcctatggggacacctgtgagaagtgccccacctgcccagatgcctgcacctttaagaaagaatgtgtggagtgtaagaagtttgaccggggagccctacatgacgaaaatacctgcaaccgttactgccgtgacgagattgagtcagtgaaagagcttaaggacactggcaaggatgcagtgaattgtacctataagaatgaggatgactgtgtcgtcagattccagtactatgaagattctagtggaaagtccatcctgtatgtggtagaagagccagagtgtcccaagggccctgacatcctggtggtcctgctctcagtgatgggggccattctgctcattggccttgccgccctgctcatctggaaactcctcatcaccatccacgaccgaaaagaattcgctaaatttgaggaagaacgcgccagagcaaaatgggacacagccaacaacccactgtataaagaggccacgtctaccttcaccaatatcacgtaccggggcacttaatgataagcagtcatcctcagatcattatcagcctgtgccacgattgcaggagtccctgccatcatgtttacagaggacagtatttgtggggagggatttggggctcagagtggggtaggttgggagaatgtcagtatgtggaagtgtgggtctgtgtgtgtgtatgtgggggtctgtgtgtttatgtgtgtgtgttgtgtgtgggagtgtgtaatttaaaattgtgatgtgtcctgataagctgagctccttagcctttgtcccagaatgcctcctgcagggattcttcctgcttagcttgagggtgactatggagctgagcaggtgttcttcattacctcagtgagaagccagctttcctcatcaggccattgtccctgaagagaagggcagggctgaggcctctcattccagaggaagggacaccaagccttggctctaccctgagttcataaatttatggttctcaggcctgactctcagcagctatggtaggaactgctgggcttggcagcccgggtcatctgtacctctgcctcctttcccctccctcaggccgaaggaggagtcagggagagctgaactattagagctgcctgtgccttttgccatcccctcaacccagctatggttctctcgcaagggaagtccttgcaagctaattctttgacctgttgggagtgaggatgtctgggccactcaggggtcattcatggcctgggggatgtaccagcatctcccagttcataatcacaacccttcagatttgccttattggcagctctactctggaggtttgtttagaagaagtgtgtcacccttaggccagcaccatctctttacctcctaattccacaccctcactgctgtagacatttgctatgagctggggatgtctctcatgaccaaatgcttttcctcaaagggagagagtgctattgtagagccagaggtctggccctatgcttccggcctcctgtccctcatccatagcacctccacatacctggccctgtgccttggtgtgctgtatccatccatggggctgattgtatttaccttctacctcttggctgccttgtgaaggaattattcccatgagttggctgggaataagtgccaggatggaatgatgggtcagttgtatcagcacgtgtggcctgttcttctatgggttggacaacctcattttaactcagtctttaatctgagaggccacagtgcaattttattttatttttctcatgatgaggttttcttaacttaaaagaacatgtatataaacatgcttgcattatatttgtaaatttatgtgatggcaaagaaggagagcataggaaaccacacagacttgggcagggtacagacactcccacttggcatcattcacagcaagtcactggccagtggctggatctgtgaggggctctctcatgatagaaggctatggggatagatgtgtggacacattggacctttcctgaggaagagggactgttcttttgtcccagaaaagcagtggctccattggtgttgacatacatccaacattaaaagccacccccaaatgcccaagaaaaaaagaaagacttatcaacatttgttccatgagcagaaaactggagctctggcctcagtgttacagctaaataatctttaattaaggcaagtcactttcttcttcttaaagctgttttctagtttgagaaatgatgggattttagcagccagtcttgaaggtctctttcagtatcaacattctaagatgctgggacttactgtgtcatcaaatgtgcggttaagattctctgggatattgatactgtttgtgtttttagttgggagatctgagagacctggctttggcaagagcagatgtcattccatatcacctttctcaatgaaagtctcattctatcctctctccaaacccgttttccaacatttgttaatagttacgtctctcctgatgtagcacttaagcttcatttagttattatttctttcttcactttgcacacatttgcatccacatattagggaagaggaatccataagtagctgaaatatctattctgtattattgtgttaacattgagaataagccttggaattagatatggggcaatgactgagccctgtctcacccatggattactccttactgtagggaatggcagtatggtagagggataaatagggggcggggagggatagtcatggatccaagaagtccttagaaatagtggcagggaacaggtgtggaagctcatgcctgtaattataaccttcagctactaagacaggtgtggtggctcacgcctgtgattataatcttcagttactaagacagagtccatgagagtgttaatgggacattttctttagataagatgttttatatgaagaaactgtatcaaagggggaagaaaatgtatttaacaggtgaatcaaatcaggaatcttgtctgagctactggaatgaagttcacaggtcttgaagacca

SEQ ID NO: 405 - DNA, 5988 bp, Homo Sapiens
  NM_000214
ctgcccggcgtgctgggtagaggtggccagccccggccgctgctgccagacgggctctccgggtccttctccgagagccgggcgggcacgcgtcattgtgttacctgcggccggcccgcgagctaggctggtttttttttttctcccctccctcccccctttttccatgcagctgatctaaaagggaataaaaggctgcgcataatcataataataaaagaaggggagcgcgagagaaggaaagaaagccgggaggtggaagaggagggggagcgtctcaaagaagcgatcagaataataaaaggaggccgggctctttgccttctggaacgggccgctcttgaaagggcttttgaaaagtggtgttgttttccagtcgtgcatgctccaatcggcggagtatattagagccgggacgcggcggccgcaggggcagcggcgacggcagcaccggcggcagcaccagcgcgaacagcagcggcggcgtcccgagtgcccgcggcgcgcggcgcagcgatgcgttccccacggacgcgcggccggtccgggcgccccctaagcctcctgctcgccctgctctgtgccctgcgagccaaggtgtgtggggcctcgggtcagttcgagttggagatcctgtccatgcagaacgtgaacggggagctgcagaacgggaactgctgcggcggcgcccggaacccgggagaccgcaagtgcacccgcgacgagtgtgacacatacttcaaagtgtgcctcaaggagtatcagtcccgcgtcacggccggggggccctgcagcttcggctcagggtccacgcctgtcatcgggggcaacaccttcaacctcaaggccagccgcggcaacgaccgcaaccgcatcgtgctgcctttcagtttcgcctggccgaggtcctatacgttgcttgtggaggcgtgggattccagtaatgacaccgttcaacctgacagtattattgaaaaggcttctcactcgggcatgatcaaccccagccggcagtggcagacgctgaagcagaacacgggcgttgcccactttgagtatcagatccgcgtgacctgtgatgactactactatggctttggctgcaataagttctgccgccccagagatgacttctttggacactatgcctgtgaccagaatggcaacaaaacttgcatggaaggctggatgggccccgaatgtaacagagctatttgccgacaaggctgcagtcctaagcatgggtcttgcaaactcccaggtgactgcaggtgccagtacggctggcaaggcctgtactgtgataagtgcatcccacacccgggatgcgtccacggcatctgtaatgagccctggcagtgcctctgtgagaccaactggggcggccagctctgtgacaaagatctcaattactgtgggactcatcagccgtgtctcaacgggggaacttgtagcaacacaggccctgacaaatatcagtgttcctgccctgaggggtattcaggacccaactgtgaaattgctgagcacgcctgcctctctgatccctgtcacaacagaggcagctgtaaggagacctccctgggctttgagtgtgagtgttccccaggctggaccggccccacatgctctacaaacattgatgactgttctcctaataactgttcccacgggggcacctgccaggacctggttaacggatttaagtgtgtgtgccccccacagtggactgggaaaacgtgccagttagatgcaaatgaatgtgaggccaaaccttgtgtaaacgccaaatcctgtaagaatctcattgccagctactactgcgactgtcttcccggctggatgggtcagaattgtgacataaatattaatgactgccttggccagtgtcagaatgacgcctcctgtcgggatttggttaatggttatcgctgtatctgtccacctggctatgcaggcgatcactgtgagagagacatcgatgaatgtgccagcaacccctgtttgaatgggggtcactgtcagaatgaaatcaacagattccagtgtctgtgtcccactggtttctctggaaacctctgtcagctggacatcgattattgtgagcctaatccctgccagaacggtgcccagtgctacaaccgtgccagtgactatttctgcaagtgccccgaggactatgagggcaagaactgctcacacctgaaagaccactgccgcacgaccccctgtgaagtgattgacagctgcacagtggccatggcttccaacgacacacctgaaggggtgcggtatatttcctccaacgtctgtggtcctcacgggaagtgcaagagtcagtcgggaggcaaattcacctgtgactgtaacaaaggcttcacgggaacatactgccatgaaaatattaatgactgtgagagcaacccttgtagaaacggtggcacttgcatcgatggtgtcaactcctacaagtgcatctgtagtgacggctgggagggggcctactgtgaaaccaatattaatgactgcagccagaacccctgccacaatgggggcacgtgtcgcgacctggtcaatgacttctactgtgactgtaaaaatgggtggaaaggaaagacctgccactcacgtgacagtcagtgtgatgaggccacgtgcaacaacggtggcacctgctatgatgagggggatgcttttaagtgcatgtgtcctggcggctgggaaggaacaacctgtaacatagcccgaaacagtagctgcctgcccaacccctgccataatgggggcacatgtgtggtcaacggcgagtcctttacgtgcgtctgcaaggaaggctgggaggggcccatctgtgctcagaataccaatgactgcagccctcatccctgttacaacagcggcacctgtgtggatggagacaactggtaccggtgcgaatgtgccccgggttttgctgggcccgactgcagaataaacatcaatgaatgccagtcttcaccttgtgcctttggagcgacctgtgtggatgagatcaatggctaccggtgtgtctgccctccagggcacagtggtgccaagtgccaggaagtttcagggagaccttgcatcaccatggggagtgtgataccagatggggccaaatgggatgatgactgtaatacctgccagtgcctgaatggacggatcgcctgctcaaaggtctggtgtggccctcgaccttgcctgctccacaaagggcacagcgagtgccccagcgggcagagctgcatccccatcctggacgaccagtgcttcgtccacccctgcactggtgtgggcgagtgtcggtcttccagtctccagccggtgaagacaaagtgcacctctgactcctattaccaggataactgtgcgaacatcacatttacctttaacaaggagatgatgtcaccaggtcttactacggagcacatttgcagtgaattgaggaatttgaatattttgaagaatgtttccgctgaatattcaatctacatcgcttgcgagccttccccttcagcgaacaatgaaatacatgtggccatttctgctgaagatatacgggatgatgggaacccgatcaaggaaatcactgacaaaataatcgatcttgttagtaaacgtgatggaaacagctcgctgattgctgccgttgcagaagtaagagttcagaggcggcctctgaagaacagaacagatttccttgttcccttgctgagctctgtcttaactgtggcttggatctgttgcttggtgacggccttctactggtgcctgcggaagcggcggaagccgggcagccacacacactcagcctctgaggacaacaccaccaacaacgtgcgggagcagctgaaccagatcaaaaaccccattgagaaacatggggccaacacggtccccatcaaggattatgagaacaagaactccaaaatgtctaaaataaggacacacaattctgaagtagaagaggacgacatggacaaacaccagcagaaagcccggtttgccaagcagccggcgtacacgctggtagacagagaagagaagccccccaacggcacgccgacaaaacacccaaactggacaaacaaacaggacaacagagacttggaaagtgcccagagcttaaaccgaatggagtacatcgtatagcagaccgcgggcactgccgccgctaggtagagtctgagggcttgtagttctttaaactgtcgtgtcatactcgagtctgaggccgttgctgacttagaatccctgtgttaatttaagttttgacaagctggcttacactggcaatggtagtttctgtggttggctgggaaatcgagtgccgcatctcacagctatgcaaaaagctagtcaacagtaccctggttgtgtgtccccttgcagccgacacggtctcggatcaggctcccaggagcctgcccagccccctggtctttgagctcccacttctgccagatgtcctaatggtgatgcagtcttagatcatagttttatttatatttattgactcttgagttgtttttgtatattggttttatgatgacgtacaagtagttctgtatttgaaagtgcctttgcagctcagaaccacagcaacgatcacaaatgactttattatttattttttttaattgtatttttgttgttgggggaggggagactttgatgtcagcagttgctggtaaaatgaagaatttaaagaaaaaaatgtcaaaagtagaactttgtatagttatgtaaataattcttttttattaatcactgtgtatatttgatttattaacttaataatcaagagccttaaaacatcattcctttttatttatatgtatgtgtttagaattgaaggtttttgatagcattgtaagcgtatggctttatttttttgaactcttctcattacttgttgcctataagccaaaattaaggtgtttgaaaatagtttattttaaaacaataggatgggcttctgtgcccagaatactgatggaatttttttgtacgacgtcagatgtttaaaacaccttctatagcatcacttaaaacacgttttaaggactgactgaggcagtttgaggattagtttagaacaggtttttttgtttgtttgttttttgtttttctgctttagacttgaaaagagacaggcaggtgatctgctgcagagcagtaagggaacaagttgagctatgacttaacatagccaaaatgtgagtggttgaatatgattaaaaatatcaaattaattgtgtgaacttggaagcacaccaatcttactttgtaaattctgatttcttttcaccattcgtacataatactgaaccacttgtagatttgatttttttttttaatctactgcatttagggagtattctaataagctagttgaatacttgaaccataaaatgtccagtaagatcactgtttagatttgccatagagtacactgcctgccttaagtgaggaaatcaaagtgctattacgaagttcaagatcaaaaaggcttataaaacagagtaatcttgttggttcaccattgagaccgtgaagatactttgtattgtcctattagtgttatatgaacatacaaatgcatctttgatgtgttgttcttggcaataaattttgaaaagtaatatttattaaatttttttgtatgaaaacatggaacagtgtggcctcttctgagcttacgtagttctaccggctttgccatgtgcttctgccaccctgctgagtctgttctggtaatcggggtataataggctctgcctgacagagggatggaggaagaactgaaaggcttttcaaccacaaaactcatctggagttctcaaagacctggggctgctgtgaagctggaactgcgggagccccatctaggggagccttgattcccttgttattcaacagcaagtgtgaatactgcttgaataaacaccactggattaatggcca

SEQ ID NO: 406 - DNA, 5449 bp, Homo Sapiens
  NM_000215
cacacaggaaggagccgagtgggactttcctctcgctgcctcccggctctgcccgcccttcgaaagtccagggtccctgcccgctaggcaagttgcactcatggcacctccaagtgaagagacgcccctgatccctcagcgttcatgcagcctcttgtccacggaggctggtgccctgcatgtgctgctgcccgctcggggccccgggcccccccagcgcctatctttctcctttggggaccacttggctgaggacctgtgcgtgcaggctgccaaggccagcggcatcctgcctgtgtaccactccctctttgctctggccacggaggacctgtcctgctggttccccccgagccacatcttctccgtggaggatgccagcacccaagtcctgctgtacaggattcgcttttacttccccaattggtttgggctggagaagtgccaccgcttcgggctacgcaaggatttggccagtgctatccttgacctgccagtcctggagcacctctttgcccagcaccgcagtgacctggtgagtgggcgcctccccgtgggcctcagtctcaaggagcagggtgagtgtctcagcctggccgtgttggacctggcccggatggcgcgagagcaggcccagcggccgggagagctgctgaagactgtcagctacaaggcctgcctacccccaagcctgcgcgacctgatccagggcctgagcttcgtgacgcggaggcgtattcggaggacggtgcgcagagccctgcgccgcgtggccgcctgccaggcagaccggcactcgctcatggccaagtacatcatggacctggagcggctggatccagccggggccgccgagaccttccacgtgggcctccctggggcccttggtggccacgacgggctggggctgctccgcgtggctggtgacggcggcatcgcctggacccagggagaacaggaggtcctccagcccttctgcgactttccagaaatcgtagacattagcatcaagcaggccccgcgcgttggcccggccggagagcaccgcctggtcactgttaccaggacagacaaccagattttagaggccgagttcccagggctgcccgaggctctgtcgttcgtggcgctcgtggacggctacttccggctgaccacggactcccagcacttcttctgcaaggaggtggcaccgccgaggctgctggaggaagtggccgagcagtgccacggccccatcactctggactttgccatcaacaagctcaagactgggggctcacgtcctggctcctatgttctccgccgcagcccccaggactttgacagcttcctcctcactgtctgtgtccagaacccccttggtcctgattataagggctgcctcatccggcgcagccccacaggaaccttccttctggttggcctcagccgaccccacagcagtcttcgagagctcctggcaacctgctgggatggggggctgcacgtagatggggtggcagtgaccctcacttcctgctgtatccccagacccaaagaaaagtccaacctgatcgtggtccagagaggtcacagcccacccacatcatccttggttcagccccaatcccaataccagctgagtcagatgacatttcacaagatccctgctgacagcctggagtggcatgagaacctgggccatgggtccttcaccaagatttaccggggctgtcgccatgaggtggtggatggggaggcccgaaagacagaggtgctgctgaaggtcatggatgccaagcacaagaactgcatggagtcattcctggaagcagcgagcttgatgagccaagtgtcgtaccggcatctcgtgctgctccacggcgtgtgcatggctggagacagcaccatggtgcaggaatttgtacacctgggggccatagacatgtatctgcgaaaacgtggccacctggtgccagccagctggaagctgcaggtggtcaaacagctggcctacgccctcaactatctggaggacaaaggcctgccccatggcaatgtctctgcccggaaggtgctcctggctcgggagggggctgatgggagcccgcccttcatcaagctgagtgaccctggggtcagccccgctgtgttaagcctggagatgctcaccgacaggatcccctgggtggcccccgagtgtctccgggaggcgcagacacttagcttggaagctgacaagtggggcttcggcgccacggtctgggaagtgtttagtggcgtcaccatgcccatcagtgccctggatcctgctaagaaactccaattttatgaggaccggcagcagctgccggcccccaagtggacagagctggccctgctgattcaacagtgcatggcctatgagccggtccagaggccctccttccgagccgtcattcgtgacctcaatagcctcatctcttcagactatgagctcctctcagaccccacacctggtgccctggcacctcgtgatgggctgtggaatggtgcccagctctatgcctgccaagaccccacgatcttcgaggagagacacctcaagtacatctcacagctgggcaagggcaactttggcagcgtggagctgtgccgctatgacccgctaggcgacaatacaggtgccctggtggccgtgaaacagctgcagcacagcgggccagaccagcagagggactttcagcgggagattcagatcctcaaagcactgcacagtgatttcattgtcaagtatcgtggtgtcagctatggcccgggccgccagagcctgcggctggtcatggagtacctgcccagcggctgcttgcgcgacttcctgcagcggcaccgcgcgcgcctcgatgccagccgcctccttctctattcctcgcagatctgcaagggcatggagtacctgggctcccgccgctgcgtgcaccgcgacctggccgcccgaaacatcctcgtggagagcgaggcacacgtcaagatcgctgacttcggcctagctaagctgctgccgcttgacaaagactactacgtggtccgcgagccaggccagagccccattttctggtatgcccccgaatccctctcggacaacatcttctctcgccagtcagacgtctggagcttcggggtcgtcctgtacgagctcttcacctactgcgacaaaagctgcagcccctcggccgagttcctgcggatgatgggatgtgagcgggatgtccccgccctctgccgcctcttggaactgctggaggagggccagaggctgccggcgcctcctgcctgccctgctgaggttcacgagctcatgaagctgtgctgggcccctagcccacaggaccggccatcattcagcgccctgggcccccagctggacatgctgtggagcggaagccgggggtgtgagactcatgccttcactgctcacccagagggcaaacaccactccctgtccttttcatagctcctgcccgcagacctctggattaggtctctgttgactggctgtgtgaccttaggcccggagctgcccctctctgggcctcagaggccttatgagggtcctctacttcaggaacacccccatgacattgcatttgggggggctcccgtggcctgtagaatagcctgtggcctttgcaatttgttaaggttcaagacagatgggcatatgtgtcagtggggctctctgagtcctggcccaaagaagcaaggaaccaaatttaagactctcgcatcttcccaaccccttaagccctggccccctgagtttccttttctgtctctctctttttattttttttatttttatttttatttttgagacagagcctcgctctgttacccagggtggagtgcagtggtgcgatctcggctcagtgcaacctctgcttcccaggttcaagcgattctcctgcctcagcctcccgagtagctgggattacaggtgtgcaccaccacacccggctaattttttttatttttaatagagatgaggtttcaccatgatggccaggctgatctcgaactcctaacctcaagtgatcctcccacctcagcctcccaaagtgttggaataataggcatgagccactgcacccaggcttttttttttttaaatttattattattatttttaagagacaggatcttgctacgttgcccaggctggtcttgaactcctgggctacagtgatcctcctgccttatcctcctaaatagctgggactacagcacctagttttgagtttcctgtcttatttccaatggggacattcatgtagctttttttttttttttttttttgagacggagtctcgctctgtcgcccaggctggagtacagtggcgcaatctaggctcactgcaagctccgcctcctgggttcacaccattctctcgcctcagcctcccaagtagctgggactacaggcgcccgccaccacacccggctaattttttgtatttttagtagagacggggtttcaccttgttagccaggatggtttccatctcctgacctcgtgatctgcccgtctcggcctcccaaagtgctgggattacaggcatgagccactgcgcccggccctcatgtagctttaaatgtatgatctgacttctgctccccgatctctgtttctctggaggaagccaaggacaagagcagttgctgtggctgggactctgccttttaggggagcccgtgtatctctttgggatcctgaaagggggcaggaaaggctggggtcccagtccaccctaatggtatctgagtgtcctagggcttcagttttcccacctgtccaatgggaccctttctgtcctcaccctacaaggggcacaaagggatgacaccaaacctggcaggaacttttcacgcaatcaagggaaggaaaggcattcctggcagagggaacagcatgccaagcgtgagaaggctcagagtaaggaggttaagagcccaagtattggagcctacagttttgccccttccatgcagtgtgacagtgggcaagttcctttccctctctgggtctcagttctgtcccctgcaaaatggtcagagcttaccccttggctgtgcagggtcaactttctgactggtgagagggattctcatgcaggttaagcttctgctgctcctcctcacctgcaaagcttttctgccacttttgcctccttggaaaactcttatccatctctcaaaactccagctaccacatccttgcagccttccctcatatacccccactactactgtagccctgtccttccctccagccccactctggccctggggctggggaagtgtctgtgtccagctgtctcccctgacctcagggttccttgggggctgggctgaggcctcagtacagagggggctctggaaatgtttgttgactgaataaaggaattcagtggaaaaaaaaaaaaaaaaa

SEQ ID NO: 407 - DNA, 3338 bp, Homo Sapiens
  NM_000219
caaccaccaaacagacaagcccttcggcctgtcctggagggcgttgaatggcatggcctggagctcaaccaggagaaccgtgctcaggaggaagagaccagaaggataactcaaaaagttctgagaagttcctaagaccacctgaagagaaggagcctgctgccaatggtgtggacaccgcagtgtgcttgaggagacttcagaaacgagaactggaaaaatccctctgctttctctggccagtttcacacaatcatcaggtgagccgaggatccattggaggaaggcattatctgtatccagaggaaatagccaaggatattcagaggtgtgcctgggaagtttgagctgcagcagtggaaccttaatgcccaggatgatcctgtctaacaccacagcggtgacgccctttctgaccaagctgtggcaggagacagttcagcagggtggcaacatgtcgggcctggcccgcaggtccccccgcagcagtgacggcaagctggaggccctctacgtcctcatggtactgggattcttcggcttcttcaccctgggcatcatgctgagctacatccgctccaagaagctggagcactcgaacgacccattcaacgtctacatcgagtccgatgcctggcaagagaaggacaaggcctatgtccaggcccgggtcctggagagctacaggtcgtgctatgtcgttgaaaaccatctggccatagaacaacccaacacacaccttcctgagacgaagccttccccatgaaccccaccactggctaaaactggacacatcctgcctggcaacctgattttctaatcacattcctctcatactctttattgtgatggataccactggatttctttttggctgttgtaaggggtgaggggtggattaatgacactgtttcactgtttctctaaaatcacgttcttttgtgatagactgtcagtggttcccccatatctgtccctgccttgctaaatttagcagaatccctgaggacatggcctctgagaatagcagctgcatttcccagactcccttgcagctagcaaggttgtgtgactaagccctggccagtaggcatggaagtgaagactgtaatgtccaagtaatccttggaaagaaaagaacgtgcccttaactaactttgtcctgcttcccagtggctggatgtggaggaggtggagagcagttatgagactgggaaagaacggggcactcaaagagccacacacatctgggcctgggcgacgtggatcctccttaccacccaccaggccagatttacaggagagagaaatccactccactcttccttaagccactgttattctgatctctgttaaggtcgcagaatcaatgcccttactgatacacctaccttataggactgaacctaaaggcatgacatttccatacttgtcacaagcacacactgattctgcccttgtcacttctgtgctcactcttgtggctctatcctcctcctgcccttccgccttccactcctcccttgcacccatcctgcacacatctccctgaaaacacacaggcacatacactcatatacatagacacacatacacacctcaatctagaaagaacttgctttgtacagggctgagatggaggagaaaaaaatgcccccttcagaatgcataccaaggggaaggtgctcggtcactgtgggagcagggaaaggtgcccccactccccgagagccaggggaaggagtggctctgggcagagagggacacatagcactggggtggcaggtccttttgaggtgatgggccggttttgtgagatgaattgtatcccccaaaaagacaggtaccttcaatgtgacctaattgggaaatagagtctttgcagatgatctagttgagatgaggtcattggggtgggccctcacccaatatgactggagtccttatcggaagagggaaattcagacacagatgcatagggaggacaccatgccgtgacagaggcagagggtgcagtgacacagccacaaaccaaggaaggccgaggatggatgcgcatccccatcccaagaagtcgggaagaagccaggaaggctcctctcccacaggtttcagaggaagcacagccctgcttgaattcaaacttttggcctccagaactgtgagtcagtacctgttgttgaagccacccagcttaggatactctggcagcctactgccatacagtattgggatactatagtgagcccatgcagcacctctcacccacccagagatggagctgctctgccttccagcggggcacccggagggctgccccagcagatagagagggcctccgttctgccacctgccttgaaagggtctccagctgccatatgtagcattggagtcctctgcaatgcgacatcctgaaagctcagctgcctgggcattcctgaagagtatggaatatttaaatgaaacatatttttttaaaacctgcgcataagataaaagcagcccgtgtgcatcttgggccatcctcaaatggacagacttggtcttgtgaggttccagtccttgtttcacataataaacactggcatggctcagcccctgagttaccacagtccttgagatgagtggttctttgggttacaaagtcctctgaaagtctagtgagagctgtgatctttgccccacccgaataatgcatatggacaccacaccttgcctgccgtgtccaggattcatgaccagtagcagcccagctatgcctgccacgtctcatggcccctgtgtaagccagacccttcttaggcagttgcatattcccagactgaggcagggcaggtttgcagagagagacccagagtgcacgtgacccgcagtgtgatccctggcacgcactgactttgatattccaggcacacggactggctatttatcaccacttctttttccccactaagattcctgtgccttttaaggcagagggagatccctatggcgttagtcttcccaggccttaaagggcccttgtcttcactcacaaacctcttatctcttcttctccttcctctacattttaaagggggagagggaaaagtaaccgggagacaaattgagccacatattttcagacacttgttaccatattttaaaatctggcttcacatacacagagtctttgctatgcaccatgtactgttctaagcttcttaaaaatagaatctcaattattattttgcaggcaatactctatgcattcattagctaggacaacaatgcatttgcagtagtgagatttcgctaaaaaattaaagccatttactatgaaaaaaaaaaaaaaaaaa

SEQ ID NO: 408 - DNA, 1354 bp, Homo Sapiens
  NM_000229
ccagggctggaatggggccgcccggctccccatggcagtgggtgacgctgctgctggggctgctgctccctcctgccgcccccttctggctcctcaatgtgctcttccccccgcacaccacgcccaaggctgagctcagtaaccacacacggcccgtcatcctcgtgcccggctgcctggggaatcagctagaagccaagctggacaaaccagatgtggtgaactggatgtgctaccgcaagacagaggacttcttcaccatctggctggatctcaacatgttcctaccccttggggtagactgctggatcgataacaccagggttgtctacaaccggagctctgggctcgtgtccaacgcccctggtgtccagatccgcgtccctggctttggcaagacctactctgtggagtacctggacagcagcaagctggcagggtacctgcacacactggtgcagaacctggtcaacaatggctacgtgcgggacgagactgtgcgcgccgccccctatgactggcggctggagcccggccagcaggaggagtactaccgcaagctcgcagggctggtggaggagatgcacgctgcctatgggaagcctgtcttcctcattggccacagcctcggctgtctacacttgctctatttcctgctgcgccagccccaggcctggaaggaccgctttattgatggcttcatctctcttggggctccctggggtggctccatcaagcccatgctggtcttggcctcaggtgacaaccagggcatccccatcatgtccagcatcaagctgaaagaggagcagcgcataaccaccacctccccctggatgtttccctctcgcatggcgtggcctgaggaccacgtgttcatttccacacccagcttcaactacacaggccgtgacttccaacgcttctttgcagacctgcactttgaggaaggctggtacatgtggctgcagtcacgtgacctcctggcaggactcccagcacctggtgtggaagtatactgtctttacggcgtgggcctgcccacgccccgcacctacatctacgaccacggcttcccctacacggaccctgtgggtgtgctctatgaggatggtgatgacacggtggcgacccgcagcaccgagctctgtggcctgtggcagggccgccagccacagcctgtgcacctgctgcccctgcacgggatacagcatctcaacatggtcttcagcaacctgaccctggagcacatcaatgccatcctgctgggtgcctaccgccagggtccccctgcatccccgactgccagcccagagcccccgcctcctgaataaagaccttcctttgctaccgt

SEQ ID NO: 409 - DNA, 3083 bp, Homo Sapiens
  NM_000234
cagaggcgcgcctggcggatctgagtgtgttgcccgggcagcggcgcgcgggaccaacgcaaggagcagctgacagacgaagaaaagtgctggacaggaagggagaattctgacgccaacatgcagcgaagtatcatgtcatttttccaccccaagaaagagggtaaagcaaagaagcctgagaaggaggcatccaatagcagcagagagacggagccccctccaaaggcggcactgaaggagtggaatggagtggtgtccgagagtgactctccggtgaagaggccagggaggaaggcggcccgggtcctgggcagcgaaggggaagaggaggatgaagcccttagccctgctaaaggccagaagcctgccctggactgctcacaggtctccccgccccgtcctgccacatctcctgagaacaatgcttccctctctgacacctctcccatggacagttccccatcagggattccgaagcgtcgcacagctcggaagcagctcccgaaacggaccattcaggaagtcctggaagagcagagtgaggacgaggacagagaagccaagaggaagaaggaggaggaagaagaggagaccccgaaagaaagcctcacagaggctgaagtggcaacagagaaggaaggagaagacggggaccagcccaccacgcctcccaagcccctaaagacctccaaagcagagaccccgacggaaagcgtttcagagcctgaggtggccacgaagcaggaactgcaggaggaggaagagcagaccaagcctccccgcagagctcccaagacgctcagcagcttcttcaccccccggaagccagcagtcaaaaaagaagtgaaggaagaggagccaggggctccaggaaaggagggagctgctgagggacccctggatccatctggttacaatcctgccaagaacaactatcatcccgtggaagatgcctgctggaaaccgggccagaaggttccttacctggctgtggcccggacgtttgagaagatcgaggaggtgtctgctcggctccggatggtggagacgctgagcaacttgctgcgctccgtggtggccctgtcgcctccagacctcctccctgtcctctacctcagcctcaaccaccttgggccaccccagcagggcctggagcttggcgtgggtgatggtgtccttctcaaggcagtggcccaggccacaggtcggcagctggagtccgtccgggctgaggcagccgagaaaggcgacgtggggctggtggccgagaacagccgcagcacccagaggctcatgctgccaccacctccgctcactgcctccggggtcttcagcaagttccgcgacatcgccaggctcactggcagtgcttccacagccaagaagatagacatcatcaaaggcctctttgtggcctgccgccactcagaagcccggttcatcgctaggtccctgagcggacggctgcgccttgggctggcagagcagtcggtgctggctgccctctcccaggcagtgagcctcacgcccccgggccaagaattcccaccagccatggtggatgctgggaagggcaagacagcagaggccagaaagacgtggctggaggagcaaggcatgatcctgaagcagacgttctgcgaggttcccgacctggaccgaattatccccgtgctgctggagcacggcctggaacgtctcccggagcactgcaagctgagcccagggattcccctgaaaccaatgttggcccatcccacccggggcatcagcgaggtcctgaaacgctttgaggaggcagctttcacctgcgaatacaaatatgacgggcagagggcacagatccacgccctggaaggcggggaggtgaagatcttcagcaggaatcaggaagacaacactgggaagtacccggacatcatcagccgcatccccaagattaaactcccatcggtcacatccttcatcctggacaccgaagccgtggcttgggaccgggaaaagaagcagatccagccattccaagtgctcaccacccgcaaacgcaaggaggtggatgcgtctgagatccaggtgcaggtgtgtttgtacgccttcgacctcatctacctcaatggagagtccctggtacgtgagcccctttcccggcgccggcagctgctccgggagaactttgtggagacagagggcgagtttgtcttcgccacctccctggacaccaaggacatcgagcagatcgccgagttcctggagcagtcagtgaaagactcctgcgaggggctgatggtgaagaccctggatgttgatgccacctacgagatcgccaagagatcgcacaactggctcaagctgaagaaggactaccttgatggcgtgggtgacaccctggacctggtggtgatcggcgcctacctgggccgggggaagcgggccggccggtacgggggcttcctgctggcctcctacgacgaggacagtgaggagctgcaggccatatgcaagcttggaactggcttcagtgatgaggagctggaggagcatcaccagagcctcaaggcgctggtgctgcccagcccacgcccttacgtgcggatagatggcgctgtgattcccgaccactggctggaccccagcgctgtgtgggaggtgaagtgcgctgacctctccctctctcccatctaccctgctgcgcggggcctggtggatagtgacaagggcatctcccttcgcttccctcggtttattcgagtccgtgaagacaagcagccggagcaggccaccaccagtgctcaggtggcctgtttgtaccggaagcaaagtcagattcagaaccaacaaggcgaggactcaggctctgaccctgaagatacctactaagccctcgccctcctagggcctgggtacagggcatgagttggacggaccccagggttattattgcctttgctttttagcaaatctgctgtggcaggctgtggattttgagagtcaggggaggggtgtgtgtgtgagggggtggcttactccggagtctgggattcatcccgtcatttctttcaataaataattattggatagct

SEQ ID NO: 410 - DNA, 2654 bp, Homo Sapiens
  NM_000235
ttcccggtggctggctgctctgattggctgaacaaatagtccgagggtggtgggcatccgccctcccgacaaggcagaccaggccccctgcaggtcccctatccgcaccccggcccctgagagctggcactgcgactcgagacagcggcccggcaggacagctccagaatgaaaatgcggttcttggggttggtggtctgtttggttctctggaccctgcattctgaggggtctggagggaaactgacagctgtggatcctgaaacaaacatgaatgtgagtgaaattatctcttactggggattccctagtgaggaatacctagttgagacagaagatggatatattctgtgccttaaccgaattcctcatgggaggaagaaccattctgacaaaggtcccaaaccagttgtcttcctgcaacatggcttgctggcagattctagtaactgggtcacaaaccttgccaacagcagcctgggcttcattcttgctgatgctggttttgacgtgtggatgggcaacagcagaggaaatacctggtctcggaaacataagacactctcagtttctcaggatgaattctgggctttcagttatgatgagatggcaaaatatgacctaccagcttccattaacttcattctgaataaaactggccaagaacaagtgtattatgtgggtcattctcaaggcaccactataggttttatagcattttcacagatccctgagctggctaaaaggattaaaatgttttttgccctgggtcctgtggcttccgtcgccttctgtactagccctatggccaaattaggacgattaccagatcatctcattaaggacttatttggagacaaagaatttcttccccagagtgcgtttttgaagtggctgggtacccacgtttgcactcatgtcatactgaaggagctctgtggaaatctctgttttcttctgtgtggatttaatgagagaaatttaaatatgtctagagtggatgtatatacaacacattctcctgctggaacttctgtgcaaaacatgttacactggagccaggctgttaaattccaaaagtttcaagcctttgactggggaagcagtgccaagaattattttcattacaaccagagttatcctcccacatacaatgtgaaggacatgcttgtgccgactgcagtctggagcgggggtcacgactggcttgcagatgtctacgacgtcaatatcttactgactcagatcaccaacttggtgttccatgagagcattccggaatgggagcatcttgacttcatttggggcctggatgccccttggaggctttataataaaattattaatctaatgaggaaatatcagtgaaagctggacttgagctgtgtaccaccaagtcaatgattatgtcatgtgaaaatgtgtttgcttcatttctgtaaaacacttgtttttctttcccaggtcttttgtttttttatatccaagaaaatgataactttgaagatgcccagttcactctagtttcaattagaaacatactagctattttttctttaattagggctggaataggaagccagtgtctcaaccatagtattgtctctttaagtcttttaaatatcactgatgtgtaaaaaggtcattatatccattctgtttttaaaatttaaaatatattgactttttgcccttcataggacaaagtaatatatgtgttggaattttaaaattgtgttgtcattggtaaatctgtcactgacttaagcgaggtataaaagtacgcagttttcatgtccttgccttaaagagctctctagtctaacggtcttgtagttagagatctaaatgacattttatcatgttttcctgcagcaggtgcatagtcaaatccagaaatatcacagctgtgccagtaataaggatgctaacaattaattttatcaaacctaactgtgacagctgtgatttgacacgttttaattgctcaggttaaatgaaatagttttccggcgtcttcaaaaacaaattgcactgataaaacaaaaacaaaagtatgttttaaatgctttgaagactgatacactcaaccatctatattcatgagctctcaatttcatggcaggccatagttctacttatctgagaagcaaatccctgtggagactataccactattttttctgagattaatgtactcttggagcccgctactgtcgttattgatcacatctgtgtgaagccaaagccccgtggttgcccatgagaagtgtccttgttcattttcacccaaatgaagtgtgaacgtgatgttttcggatgcaaactcagctcagggattcattttgtgtcttagttttatatgcatccttatttttaatacacctgcttcacgtccctatgttgggaagtccatatttgtctgcttttcttgcagcatcatttccttacaatactgtccggtggacaaaatgacaattgatatgtttttctgatataattactttagctgcactaacagtacaatgcttgttaatggttaatataggcagggcgaatactactttgtaacttttaaagtcttaaacttttcaataaaattgagtgagacttataggcccaaaaaaaaaaaaaaaaaaaaaaaaaaaaaaaaa

SEQ ID NO: 411 - DNA, 4090 bp, Homo Sapiens
  NM_000240
gggcgctcccggagtatcagcaaaagggttcgccccgcccacagtgcccggctccccccgggtatcaaaagaaggatcggctccgcccccgggctccccgggggagttgatagaagggtccttcccaccctttgccgtccccactcctgtgcctacgacccaggagcgtgtcagccaaagcatggagaatcaagagaaggcgagtatcgcgggccacatgttcgacgtagtcgtgatcggaggtggcatttcaggactatctgctgccaaactcttgactgaatatggcgttagtgttttggttttagaagctcgggacagggttggaggaagaacatatactataaggaatgagcatgttgattacgtagatgttggtggagcttatgtgggaccaacccaaaacagaatcttacgcttgtctaaggagctgggcatagagacttacaaagtgaatgtcagtgagcgtctcgttcaatatgtcaaggggaaaacatatccatttcggggcgcctttccaccagtatggaatcccattgcatatttggattacaataatctgtggaggacaatagataacatggggaaggagattccaactgatgcaccctgggaggctcaacatgctgacaaatgggacaaaatgaccatgaaagagctcattgacaaaatctgctggacaaagactgctaggcggtttgcttatctttttgtgaatatcaatgtgacctctgagcctcacgaagtgtctgccctgtggttcttgtggtatgtgaagcagtgcgggggcaccactcggatattctctgtcaccaatggtggccaggaacggaagtttgtaggtggatctggtcaagtgagcgaacggataatggacctcctcggagaccaagtgaagctgaaccatcctgtcactcacgttgaccagtcaagtgacaacatcatcatagagacgctgaaccatgaacattatgagtgcaaatacgtaattaatgcgatccctccgaccttgactgccaagattcacttcagaccagagcttccagcagagagaaaccagttaattcagcggcttccaatgggagctgtcattaagtgcatgatgtattacaaggaggccttctggaagaagaaggattactgtggctgcatgatcattgaagatgaagatgctccaatttcaataaccttggatgacaccaagccagatgggtcactgcctgccatcatgggcttcattcttgcccggaaagctgatcgacttgctaagctacataaggaaataaggaagaagaaaatctgtgagctctatgccaaagtgctgggatcccaagaagctttacatccagtgcattatgaagagaagaactggtgtgaggagcagtactctgggggctgctacacggcctacttccctcctgggatcatgactcaatatggaagggtgattcgtcaacccgtgggcaggattttctttgcgggcacagagactgccacaaagtggagcggctacatggaaggggcagttgaggctggagaacgagcagctagggaggtcttaaatggtctcgggaaggtgaccgagaaagatatctgggtacaagaacctgaatcaaaggacgttccagcggtagaaatcacccacaccttctgggaaaggaacctgccctctgtttctggcctgctgaagatcattggattttccacatcagtaactgccctggggtttgtgctgtacaaatacaagctcctgccacggtcttgaagttctgttcttatgctctctgctcactggttttcaataccaccaagaggaaaatattgacaagtttaaaggctgtgtcattgggccatgtttaagtgtactggatttaactacctttggcttaattccaatcattgttaaagtaaaaacaattcaaagaatcacctaattaatttcagtaagatcaagctccatcttatttgtcagtgtagatcaactcatgttaattgatagaataaagccttgtgatcactttctgaaattcacaaagttaaacgtgatgtgctcatcagaaacaatttctgtgtcctgtttttattcccttcaatgcaaaatacatgatgatttcagaaacaaagcatttgactttctgtctgtggaggtggagtaggtgaaggcccagcctgtaactgtcctttttcttcccttaggcaatggtgaactgtcattacagagcctagaggctcacagcctcctggaggaagcagcctccactttggatcaggaaatagtaaaggaaagcagtgttgggggtagcggcatgcagaccctcagaccagaatggggacatcttgtggtctgctgcctcaggaatctcctgaccacttgtagtccctccgacttctctagacatctagtctcagtgctagcttatttgtatttttcctctttcacttcttatggaggagagtgtttaactgagttagaatgttgaaactgacttgctgtgacttatgtgcagctttccagttgagcagaggaaaatagtggcaggactgtcccccaggaggactccctgcttagctctgtgggagaccaactacgactggcatcttctcttccccctggaaggcagctagacaccaatggatccttgtcagttgtaacattctatttcaacttcaggaaagcagcagttttcttttaatttttcctatgaccataaaattagacatacctctcaacttacatatgtcttcaacatggttacctctgcataaatattagcaaagcatgccaatttctcttaagtactgaaatacatatgataaatttgactgttatttgttgagactatcaaacagaaaagaaattagggctctaatttccttaaagcaagctcacttgctttagttgttaagttttataaaagacatgaaattgagtcattttatatatgaaaactaagttctctatcttaggagtaatgtcggcccacaagggtgcccacctcttgttttccccttttaaaaactcagatttttaaaagccctttccaaaggtttcaactgtaaaatacttctttttacaatgtatcaacatatttttatttaaggggaattaacaattgccagggaaaccagccaacccaagtttattatatcattaaccttatcataaattcaaacctaagttgctggaccctggtgtgaggacataaatcttccaaagttttgcctatcctaagagctgcatttttctactgctctttaccttgcattttagctaatttaggagttttgagaatgtattggatacgctccagtacataaggagttgccgcatattatatcagactgctttgagaaatctcatccctagtctattgcagttgtttctattagcttactgattaactcagtcctgacacaccttttgggaaatgctgatttaaacttcttaactggcaacagttggaacagtaatcagtttgctaacatatttaaagtcttgaatgttgaagaactcatgtgatttacccttttcaactttttggaaaacgatttaatttattctaattagattaaccctattaatctatggattgggtatcaaaatgaatgccagtccagatgtgcctagacacgaaattggagctgaggactctcacgatatgcaagttcatccaacgtgaagataccataagctttttctctgaaccagagaaatgaaagtcagtttaagaggctgatagatcttggccctgttaaggcatccacttcacagttctgaaggctgagtcagccccactccacagttaggccaagaattagattttaaaacttcatctgtctgtcccagttaactgttaaataaggcctcatcctccactgaagagtatggattgaaggattgtgaactatgtttagtgtgattgtgaacttggtgcctaatgttccatgtctgaagtttgccccagtgctacacgttggagtatacctatgtgtgtgctttgccactgaagtaagattttgcctgtatggtactgttttgtttgttaataaagtgcactgccacccccaatgcaaaaaaaaaaaaaaaaaa

SEQ ID NO: 412 - DNA, 4654 bp, Homo Sapiens
  NM_000246
ggttagtgatgaggctagtgatgaggctgtgtgcttctgagctgggcatccgaaggcatccttggggaagctgagggcacgaggaggggctgccagactccgggagctgctgcctggctgggattcctacacaatgcgttgcctggctccacgccctgctgggtcctacctgtcagagccccaaggcagctcacagtgtgccaccatggagttggggcccctagaaggtggctacctggagcttcttaacagcgatgctgaccccctgtgcctctaccacttctatgaccagatggacctggctggagaagaagagattgagctctactcagaacccgacacagacaccatcaactgcgaccagttcagcaggctgttgtgtgacatggaaggtgatgaagagaccagggaggcttatgccaatatcgcggaactggaccagtatgtcttccaggactcccagctggagggcctgagcaaggacattttcaagcacataggaccagatgaagtgatcggtgagagtatggagatgccagcagaagttgggcagaaaagtcagaaaagacccttcccagaggagcttccggcagacctgaagcactggaagccagctgagccccccactgtggtgactggcagtctcctagtgggaccagtgagcgactgctccaccctgccctgcctgccactgcctgcgctgttcaaccaggagccagcctccggccagatgcgcctggagaaaaccgaccagattcccatgcctttctccagttcctcgttgagctgcctgaatctccctgagggacccatccagtttgtccccaccatctccactctgccccatgggctctggcaaatctctgaggctggaacaggggtctccagtatattcatctaccatggtgaggtgccccaggccagccaagtaccccctcccagtggattcactgtccacggcctcccaacatctccagaccggccaggctccaccagccccttcgctccatcagccactgacctgcccagcatgcctgaacctgccctgacctcccgagcaaacatgacagagcacaagacgtcccccacccaatgcccggcagctggagaggtctccaacaagcttccaaaatggcctgagccggtggagcagttctaccgctcactgcaggacacgtatggtgccgagcccgcaggcccggatggcatcctagtggaggtggatctggtgcaggccaggctggagaggagcagcagcaagagcctggagcgggaactggccaccccggactgggcagaacggcagctggcccaaggaggcctggctgaggtgctgttggctgccaaggagcaccggcggccgcgtgagacacgagtgattgctgtgctgggcaaagctggtcagggcaagagctattgggctggggcagtgagccgggcctgggcttgtggccggcttccccagtacgactttgtcttctctgtcccctgccattgcttgaaccgtccgggggatgcctatggcctgcaggatctgctcttctccctgggcccacagccactcgtggcggccgatgaggttttcagccacatcttgaagagacctgaccgcgttctgctcatcctagacggcttcgaggagctggaagcgcaagatggcttcctgcacagcacgtgcggaccggcaccggcggagccctgctccctccgggggctgctggccggccttttccagaagaagctgctccgaggttgcaccctcctcctcacagcccggccccggggccgcctggtccagagcctgagcaaggccgacgccctatttgagctgtccggcttctccatggagcaggcccaggcatacgtgatgcgctactttgagagctcagggatgacagagcaccaagacagagccctgacgctcctccgggaccggccacttcttctcagtcacagccacagccctactttgtgccgggcagtgtgccagctctcagaggccctgctggagcttggggaggacgccaagctgccctccacgctcacgggactctatgtcggcctgctgggccgtgcagccctcgacagcccccccggggccctggcagagctggccaagctggcctgggagctgggccgcagacatcaaagtaccctacaggaggaccagttcccatccgcagacgtgaggacctgggcgatggccaaaggcttagtccaacacccaccgcgggccgcagagtccgagctggccttccccagcttcctcctgcaatgcttcctgggggccctgtggctggctctgagtggcgaaatcaaggacaaggagctcccgcagtacctagcattgaccccaaggaagaagaggccctatgacaactggctggagggcgtgccacgctttctggctgggctgatcttccagcctcccgcccgctgcctgggagccctactcgggccatcggcggctgcctcggtggacaggaagcagaaggtgcttgcgaggtacctgaagcggctgcagccggggacactgcgggcgcggcagctgctggagctgctgcactgcgcccacgaggccgaggaggctggaatttggcagcacgtggtacaggagctccccggccgcctctcttttctgggcacccgcctcacgcctcctgatgcacatgtactgggcaaggccttggaggcggcgggccaagacttctccctggacctccgcagcactggcatttgcccctctggattggggagcctcgtgggactcagctgtgtcacccgtttcagggctgccttgagcgacacggtggcgctgtgggagtccctgcagcagcatggggagaccaagctacttcaggcagcagaggagaagttcaccatcgagcctttcaaagccaagtccctgaaggatgtggaagacctgggaaagcttgtgcagactcagaggacgagaagttcctcggaagacacagctggggagctccctgctgttcgggacctaaagaaactggagtttgcgctgggccctgtctcaggcccccaggctttccccaaactggtgcggatcctcacggccttttcctccctgcagcatctggacctggatgcgctgagtgagaacaagatcggggacgagggtgtctcgcagctctcagccaccttcccccagctgaagtccttggaaaccctcaatctgtcccagaacaacatcactgacctgggtgcctacaaactcgccgaggccctgccttcgctcgctgcatccctgctcaggctaagcttgtacaataactgcatctgcgacgtgggagccgagagcttggctcgtgtgcttccggacatggtgtccctccgggtgatggacgtccagtacaacaagttcacggctgccggggcccagcagctcgctgccagccttcggaggtgtcctcatgtggagacgctggcgatgtggacgcccaccatcccattcagtgtccaggaacacctgcaacaacaggattcacggatcagcctgagatgatcccagctgtgctctggacaggcatgttctctgaggacactaaccacgctggaccttgaactgggtacttgtggacacagctcttctccaggctgtatcccatgagcctcagcatcctggcacccggcccctgctggttcagggttggcccctgcccggctgcggaatgaaccacatcttgctctgctgacagacacaggcccggctccaggctcctttagcgcccagttgggtggatgcctggtggcagctgcggtccacccaggagccccgaggccttctctgaaggacattgcggacagccacggccaggccagagggagtgacagaggcagccccattctgcctgcccaggcccctgccaccctggggagaaagtacttctttttttttatttttagacagagtctcactgttgcccaggctggcgtgcagtggtgcgatctgggttcactgcaacctccgcctcttgggttcaagcgattcttctgcttcagcctcccgagtagctgggactacaggcacccaccatcatgtctggctaatttttcatttttagtagagacagggttttgccatgttggccaggctggtctcaaactcttgacctcaggtgatccacccacctcagcctcccaaagtgctgggattacaagcgtgagccactgcaccgggccacagagaaagtacttctccaccctgctctccgaccagacaccttgacagggcacaccgggcactcagaagacactgatgggcaacccccagcctgctaattccccagattgcaacaggctgggcttcagtggcagctgcttttgtctatgggactcaatgcactgacattgttggccaaagccaaagctaggcctggccagatgcaccagcccttagcagggaaacagctaatgggacactaatggggcggtgagaggggaacagactggaagcacagcttcatttcctgtgtcttttttcactacattataaatgtctctttaatgtcacaggcaggtccagggtttgagttcataccctgttaccattttggggtacccactgctctggttatctaatatgtaacaagccaccccaaatcatagtggcttaaaacaacactcacattta

SEQ ID NO: 413 - DNA, 2662 bp, Homo Sapiens
  NM_000249
gaagagacccagcaacccacagagttgagaaatttgactggcattcaagctgtccaatcaatagctgccgctgaagggtggggctggatggcgtaagctacagctgaaggaagaacgtgagcacgaggcactgaggtgattggctgaaggcacttccgttgagcatctagacgtttccttggctcttctggcgccaaaatgtcgttcgtggcaggggttattcggcggctggacgagacagtggtgaaccgcatcgcggcgggggaagttatccagcggccagctaatgctatcaaagagatgattgagaactgtttagatgcaaaatccacaagtattcaagtgattgttaaagagggaggcctgaagttgattcagatccaagacaatggcaccgggatcaggaaagaagatctggatattgtatgtgaaaggttcactactagtaaactgcagtcctttgaggatttagccagtatttctacctatggctttcgaggtgaggctttggccagcataagccatgtggctcatgttactattacaacgaaaacagctgatggaaagtgtgcatacagagcaagttactcagatggaaaactgaaagcccctcctaaaccatgtgctggcaatcaagggacccagatcacggtggaggaccttttttacaacatagccacgaggagaaaagctttaaaaaatccaagtgaagaatatgggaaaattttggaagttgttggcaggtattcagtacacaatgcaggcattagtttctcagttaaaaaacaaggagagacagtagctgatgttaggacactacccaatgcctcaaccgtggacaatattcgctccatctttggaaatgctgttagtcgagaactgatagaaattggatgtgaggataaaaccctagccttcaaaatgaatggttacatatccaatgcaaactactcagtgaagaagtgcatcttcttactcttcatcaaccatcgtctggtagaatcaacttccttgagaaaagccatagaaacagtgtatgcagcctatttgcccaaaaacacacacccattcctgtacctcagtttagaaatcagtccccagaatgtggatgttaatgtgcaccccacaaagcatgaagttcacttcctgcacgaggagagcatcctggagcgggtgcagcagcacatcgagagcaagctcctgggctccaattcctccaggatgtacttcacccagactttgctaccaggacttgctggcccctctggggagatggttaaatccacaacaagtctgacctcgtcttctacttctggaagtagtgataaggtctatgcccaccagatggttcgtacagattcccgggaacagaagcttgatgcatttctgcagcctctgagcaaacccctgtccagtcagccccaggccattgtcacagaggataagacagatatttctagtggcagggctaggcagcaagatgaggagatgcttgaactcccagcccctgctgaagtggctgccaaaaatcagagcttggagggggatacaacaaaggggacttcagaaatgtcagagaagagaggacctacttccagcaaccccagaaagagacatcgggaagattctgatgtggaaatggtggaagatgattcccgaaaggaaatgactgcagcttgtaccccccggagaaggatcattaacctcactagtgttttgagtctccaggaagaaattaatgagcagggacatgaggttctccgggagatgttgcataaccactccttcgtgggctgtgtgaatcctcagtgggccttggcacagcatcaaaccaagttataccttctcaacaccaccaagcttagtgaagaactgttctaccagatactcatttatgattttgccaattttggtgttctcaggttatcggagccagcaccgctctttgaccttgccatgcttgccttagatagtccagagagtggctggacagaggaagatggtcccaaagaaggacttgctgaatacattgttgagtttctgaagaagaaggctgagatgcttgcagactatttctctttggaaattgatgaggaagggaacctgattggattaccccttctgattgacaactatgtgccccctttggagggactgcctatcttcattcttcgactagccactgaggtgaattgggacgaagaaaaggaatgttttgaaagcctcagtaaagaatgcgctatgttctattccatccggaagcagtacatatctgaggagtcgaccctctcaggccagcagagtgaagtgcctggctccattccaaactcctggaagtggactgtggaacacattgtctataaagccttgcgctcacacattctgcctcctaaacatttcacagaagatggaaatatcctgcagcttgctaacctgcctgatctatacaaagtctttgagaggtgttaaatatggttatttatgcactgtgggatgtgttcttctttctctgtattccgatacaaagtgttgtatcaaagtgtgatatacaaagtgtaccaacataagtgttggtagcacttaagacttatacttgccttctgatagtattcctttatacacagtggattgattataaataaatagatgtgtcttaacataa

SEQ ID NO: 414 - DNA, 3215 bp, Homo Sapiens
  NM_000250
gacaatatcaggtgagctgtggaggtggggtccttggaagctggatgacagcagctggcaaggggataagagagcagtgagcccctccctcaaggaggtctggctttatccatagacagggccctctgaggtggggctgaggtacaaagggggattgagcagcccaggagaagagagatgggggttcccttcttctcttctctcagatgcatggtggacttaggaccttgctgggctgggggtctcactgcagagatgaagctgcttctggccctagcagggctcctggccattctggccacgccccagccctctgaaggtgctgctccagctgtcctgggggaggtggacacctcgttggtgctgagctccatggaggaggccaagcagctggtggacaaggcctacaaggagcggcgggaaagcatcaagcagcggcttcgcagcggctcagccagccccatggaactcctatcctacttcaagcagccggtggcagccaccaggacggcggtgagggccgctgactacctgcacgtggctctagacctgctggagaggaagctgcggtccctgtggcgaaggccattcaatgtcactgatgtgctgacgcccgcccagctgaatgtgttgtccaagtcaagcggctgcgcctaccaggacgtgggggtgacttgcccggagcaggacaaataccgcaccatcaccgggatgtgcaacaacagacgcagccccacgctgggggcctccaaccgtgcctttgtgcgctggctgccggcggagtatgaggacggcttctctcttccctacggctggacgcccggggtcaagcgcaacggcttcccggtggctctggctcgcgcggtctccaacgagatcgtgcgcttccccactgatcagctgactccggaccaggagcgctcactcatgttcatgcaatggggccagctgttggaccacgacctcgacttcacccctgagccggccgcccgggcctccttcgtcactggcgtcaactgcgagaccagctgcgttcagcagccgccctgcttcccgctcaagatcccgcccaatgacccccgcatcaagaaccaagccgactgcatcccgttcttccgctcctgcccggcttgccccgggagcaacatcaccatccgcaaccagatcaacgcgctcacttccttcgtggacgccagcatggtgtacggcagcgaggagcccctggccaggaacctgcgcaacatgtccaaccagctggggctgctggccgtcaaccagcgcttccaagacaacggccgggccctgctgccctttgacaacctgcacgatgacccctgtctcctcaccaaccgctcagcgcgcatcccctgcttcctggcaggggacacccgttccagtgagatgcccgagctcacctccatgcacaccctcttacttcgggagcacaaccggctggccacagagctcaagagcctgaaccctaggtgggatggggagaggctctaccaggaagcccggaagatcgtgggggccatggtccagatcatcacttaccgggactacctgcccctggtgctggggccaacggccatgaggaagtacctgcccacgtaccgttcctacaatgactcagtggacccacgcatcgccaacgtcttcaccaatgccttccgctacggccacaccctcatccaacccttcatgttccgcctggacaatcggtaccagcccatggaacccaacccccgtgtccccctcagcagggtcttttttgcctcctggagggtcgtgctggaaggtggcattgaccccatcctccggggcctcatggccacccctgccaagctgaatcgtcagaaccaaattgcagtggatgagatccgggagcgattgtttgagcaggtcatgaggattgggctggacctgcctgctctgaacatgcagcgcagcagggaccacggcctcccaggatacaatgcctggaggcgcttctgtgggctcccgcagcctgaaactgtgggccagctgggcacggtgctgaggaacctgaaattggcgaggaaactgatggagcagtatggcacgcccaacaacatcgacatctggatgggcggcgtgtccgagcctctgaagcgcaaaggccgcgtgggcccactcctcgcctgcatcatcggtacccagttcaggaagctccgggatggtgatcggttttggtgggagaacgagggtgtgttcagcatgcagcagcgacaggccctggcccagatctcattgccccggatcatctgcgacaacacaggcatcaccaccgtgtctaagaacaacatcttcatgtccaactcatatccccgggactttgtcaactgcagtacacttcctgcattgaacctggcttcctggagggaagcctcctagaggccaggtaagggggtgcagcagtgaggggtatatctgggctggccagttggaaccacggagatctccttgccctagatgagcccagccctgttctgggtgcagctgagaaaatgagtgactagacgttcatttgtgtgctcatgtatgtgcgaagtatataaattggcttttcatgcgtgtgtgttgtctgaacatggggagtgtttcatgggttatgtgtatgtgccatttatgtgagtgtgtgtttgtgctgatgagaatactgagtatgtggaaggcagcagagcggactggtgaggagcacagctcaggaactagactgcctgggttccaatcctggctctgtggcttgctagctatgtgaccttgagcaaattaccctccttaaacaagagttttcttccttgtaaattacatctgtcatggtttcttggagggcccacttgtatcctctggttcttcatttattgagcacctactacatgcaaggcactgtactaggcgtgagaagcatatagaggcaagaaagagataccaagatgccatctgtgtcctggttagcagagctggaccagtggtgccttggagggataagccagctgcagctgggctgtgtggttgacttatgggcccagccagccaggctcaggccatggctcccctttttcttcctcaccctgatttcttgcttattcactgaagttctcctgaagaggaactgggcctgttgccctttctgtaccatttatttgctcccaatgtttatgataataaaggcaccgctgatggggacctcc

SEQ ID NO: 415 - DNA, 10558 bp, Homo Sapiens
  NM_000254
agattgagcgcagaactaaccgcgctctgaaaggttctaaatgtctgcggggctcagagccggatgtcacgtcgtcctcctctgccggttttctcttgggtccttttccgtgccgtcccgcgactccgcctctggccgcgcgtgtctggctgctaggccgacaccaaggactggccgggtacccgggaagaaagcacgtgctccagcagttgccgcgcccagccccgagagaggccctagggcgctgcgggctttcggggtccgcagtccccccgcgacgcgagccaacgggaggcgtcaaaagacccgggccttgtgtggcaggctcgcctggcgctggctggcgtggcccttggccgtcgtcacctgtggagagcacgtcttctctgccgcgccctctgcgcaaggaggagactcgacaacatgtcacccgcgctccaagacctgtcgcaacccgaaggtctgaagaaaaccctgcgggatgagatcaatgccattctgcagaagaggattatggtgctggatggagggatggggaccatgatccagcgggagaagctaaacgaagaacacttccgaggtcaggaatttaaagatcatgccaggccgctgaaaggcaacaatgacattttaagtataactcagcctgatgtcatttaccaaatccataaggaatacttgctggctggggcagatatcattgaaacaaatacttttagcagcactagtattgcccaagctgactatggccttgaacacttggcctaccggatgaacatgtgctctgcaggagtggccagaaaagctgccgaggaggtaactctccagacaggaattaagaggtttgtggcaggggctctgggtccgactaataagacactctctgtgtccccatctgtggaaaggccggattataggaacatcacatttgatgagcttgttgaagcataccaagagcaggccaaaggacttctggatggcggggttgatatcttactcattgaaactatttttgatactgccaatgccaaggcagccttgtttgcactccaaaatctttttgaggagaaatatgctccccggcctatctttatttcagggacgatcgttgataaaagtgggcggactctttccggacagacaggagagggatttgtcatcagcgtgtctcatggagaaccactctgcattggattaaattgtgctttgggtgcagctgaaatgagaccttttattgaaataattggaaaatgtacaacagcctatgtcctctgttatcccaatgcaggtcttcccaacacctttggtgactatgatgaaacgccttctatgatggccaagcacctaaaggattttgctatggatggcttggtcaatatagttggaggatgctgtgggtcaacaccagatcatatcagggaaattgctgaagctgtgaaaaattgtaagcctagagttccacctgccactgcttttgaaggacatatgttactgtctggtctagagcccttcaggattggaccgtacaccaactttgttaacattggagagcgctgtaatgttgcaggatcaaggaagtttgctaaactcatcatggcaggaaactatgaagaagccttgtgtgttgccaaagtgcaggtggaaatgggagcccaggtgttggatgtcaacatggatgatggcatgctagatggtccaagtgcaatgaccagattttgcaacttaattgcttccgagccagacatcgcaaaggtacctttgtgcatcgactcctccaattttgctgtgattgaagctgggttaaagtgctgccaagggaagtgcattgtcaatagcattagtctgaaggaaggagaggacgacttcttggagaaggccaggaagattaaaaagtatggagctgctatggtggtcatggcttttgatgaagaaggacaggcaacagaaacagacacaaaaatcagagtgtgcacccgggcctaccatctgcttgtgaaaaaactgggctttaatccaaatgacattatttttgaccctaatatcctaaccattgggactggaatggaggaacacaacttgtatgccattaattttatccatgcaacaaaagtcattaaagaaacattacctggagccagaataagtggaggtctttccaacttgtccttctccttccgaggaatggaagccattcgagaagcaatgcatggggttttcctttaccatgcaatcaagtctggcatggacatggggatagtgaatgctggaaacctccctgtgtatgatgatatccataaggaacttctgcagctctgtgaagatctcatctggaataaagaccctgaggccactgagaagctcttacgttatgcccagactcaaggcacaggagggaagaaagtcattcagactgatgagtggagaaatggccctgtcgaagaacgccttgagtatgcccttgtgaagggcattgaaaaacatattattgaggatactgaggaagccaggttaaaccaaaaaaaatatccccgacctctcaatataattgaaggacccctgatgaatggaatgaaaattgttggtgatctttttggagctggaaaaatgtttctacctcaggttataaagtcagcccgggttatgaagaaggctgttggccaccttatccctttcatggaaaaagaaagagaagaaaccagagtgcttaacggcacagtagaagaagaggacccttaccagggcaccatcgtgctggccactgttaaaggcgacgtgcacgacataggcaagaacatagttggagtagtccttggctgcaataatttccgagttattgatttaggagtcatgactccatgtgataagatactgaaagctgctcttgaccacaaagcagatataattggcctgtcaggactcatcactccttccctggatgaaatgatttttgttgccaaggaaatggagagattagctataaggattccattgttgattggaggagcaaccacttcaaaaacccacacagcagttaaaatagctccgagatacagtgcacctgtaatccatgtcctggacgcgtccaagagtgtggtggtgtgttcccagctgttagatgaaaatctaaaggatgaatactttgaggaaatcatggaagaatatgaagatattagacaggaccattatgagtctctcaaggagaggagatacttacccttaagtcaagccagaaaaagtggtttccaaatggattggctgtctgaacctcacccagtgaagcccacgtttattgggacccaggtctttgaagactatgacctgcagaagctggtggactacattgactggaagcctttctttgatgtctggcagctccggggcaagtacccgaatcgaggctttcccaagatatttaacgacaaaacagtaggtggagaggccaggaaggtctacgatgatgcccacaatatgctgaacacactgattagtcaaaagaaactccgggcccggggtgtggttgggttctggccagcacagagtatccaagacgacattcacctgtacgcagaggctgctgtgccccaggctgcagagcccatagccaccttctatgggttaaggcaacaggctgagaaggactctgccagcacggagccatactactgcctctcagacttcatcgctcccttgcattctggcatccgtgactacctgggcctgtttgccgttgcctgctttggggtagaagagctgagcaaggcctatgaggatgatggtgacgactacagcagcatcatggtcaaggcgctgggggaccggctggcagaggcctttgcagaagagctccatgaaagagttcgccgagaactgtgggcctactgtggcagtgagcagctggacgtcgcagacctgcgcaggctgcggtacaagggcatccgcccggctcctggctaccccagccagcccgaccacaccgagaagctcaccatgtggagactcgcagacatcgagcagtctacaggcattaggttaacagaatcattagcaatggcacctgcttcagcagtctcaggcctctacttctccaatttgaagtccaaatattttgctgtggggaagatttccaaggatcaggttgaggattatgcattgaggaagaacatatctgtggctgaggttgagaaatggcttggacccattttgggatatgatacagactaactttttttttttttttgccttttttattcttgatgatcctcaaggaaatacaacctagggtgccttaaaaataacaacaacaaaaaacctgtgtgcatctggctgacacttacctgcttctggttttcgaagactatttagtggaaccttgtagaggagcagggtcttcctgcagtgcctggaaaacaggcgctgtttttttgggaccttgcgtgaagagcagtgagcagggttcctgtggtttccctggtccctctgagatggggacagactgaagacagaggtcgtttgatttcaaagcaagtcaacctgcttttttctgtttttacagtggaatctaggaggccacttagtcgtctttttttcctcttagaagaaaagcctgaaactgagttgaatagagaagtgtgaccctgtgacaaaatgatactgtgagaaatggggcattttaatctaagtggttataacagtggattctgacggggaaggtgtagctctgttctcttcggaagacctcgttttctaaaggctggactaaatggctgcagaactccctttggcaaaaggcatgcgctcactgcttgcttgtcagaaacactgaagccatttgccccagtgtggtcaagcagccatgctttctgggcattttcgtcctcccataatttcatatttccgtacccctgaggaaacaaaaaggaaatgaggagagaaagttactgttaagggtggttaacattttttttgttttgttttgttttggtttttttttttttgagacagagtctggctctgtcgcccaggctggagtgcaggggcgcaatctcggctcatagcaagctccgcctcctgggttcatgccattctcctgcctcagcctccagagtagctgggactacaggtgcccgccaccacacccggctaattttttgtgtttttacaaaatacaaaaaagtagagacaggatttcactgtgttagccaggatggtcttgatctcccgacctcgtgatctgcccacctcagcctcccaaaatgctgggattacaggcgtgagccaccgagcctggccggttaacatcttttaattgtttccaggattgagcaggttctcagctgggctctgatatcccgtgcggagttggacaagtgggcagcataaagtcactcatttcttaccattttattcccctcaattctcaatatattcagtaatgaagaatggtgccaccactcaagcaacaagcctcaaactcaaccatgtcatctttttcttggatgattgcagttatttcaaaaatttgcatgcaaaatatacactcatcctacttcaagatggtggtggcaatagtcaggagaaggtaacattggagtcctggtttgattcgaaggatgaagacgaagaagcaagggaggaacaaatgaagaaccatctttgttcatgaataggaatattcaagattataaaggtatcaggtctcctaaaattgatctatggatttaataccattttcaatggaaattccaacagattttattgaatgaaacaagcaggtgtttatatggagtagcaaaggacttaaaattaccaaatgcttctaaatatgaaggagaggttggggacacgcaccctatgtgataccaagttttattgtcaagacagtgtcatggtgcagaggtaggcattctgagcaggggaacaaaataagggcctagaaactcacccgtgcatatgttgacctttgcaaaatgacctggtgacatggcaagtcagtggggacaggaaggaccactccctaagtaatcccagaacaatggctattcatgtgggaaaaaaagaaattttactttctctcaccttacctggtgataagttccaaatatgttaagggctttaatacaaaaagcaaaaattgtcagtgtttggatgaaaaaagccttagggcaggaaagaatctcttgagacataaagtagtaatcataaaggacaagatggttaagtcaattctgttaaaactcaaggcttatattaagcaaacacttgaagtgagaagatgatccacaacttgagaagacatttataatacaaataactgatgaaggattcataatcacaaatatagagaattcctatttaaaaaaatagaaaaatagtgaagactacacaagaggaaatagggcttttaaataaatagatgttctgtagcattggtcagggaaatatgaattaggaccacaatgagattccattttatatccataagatttgcaaaggttgggtctgacagtaccagttgttagatctgtagggacttgtacaacattgtggatgtgtaaacaggcaccactgctttaaaaaacaattatcccttacagacttgaacatttgcagacgttatgatcttgcttccaactcccacctgtatgtccagcaaactcttgcatgtggccactaggaggaatgtgtaagaatgttcatagttacatatttataatagttaataactggaaaaagtgaaatgtatgtctgtctacaggaaaataggtgaataattagatatatatattcattctacgggatattattcagtagtggaaatgagtgaactacagctatacctcacaataagaatgaatctcagaaaatattaaggaaaaaagcaagtttgaagagaccacatggggcgtactatttttattgagcccaaaaacaagcaaaaccaaagaatatgtagtctaagcatacgtatacaataaaactatgctattaaaaaaaaagaaggtaactgataaaccaaaattgagcatagtaattacccacagaaggaggaagtggaagggacaggagcacataggtagatgccaagttatgcagctgttctggttcctcctggtaggcttacaagtgtttactatatgctattaatacattatactttataactaatagataacagttttttacatattaaatatgttctacttaaatatattataaaaaataaaggcaaagtggaatgataacctaaaatctggtatggtgattttgtaggtaatgtttgtatatgtcaaatacagtttttaaggaaaggaagaacatcttagggtaaacagcagctagaaaggtgaggggcaggagagtggtgcatccttgctgctgccagcagtgcccagataccaggctttggggaatgagtggatggctggaccatttgctaagacagaggccaggggatgggagaaatgatgagttttggaaagattcgatgtgactagactgaatataggcagttggatactagactttggaatttaaaaagaatgtctggagttagaattgagagacttgaacgtggagatggaggtcaggctgcagtgcgatgggatcatctatggagcatatgaggagaagagaatctggaggaggaggagggggagccagcaggggagcagctgtgggttggaggaagccaggagggagagtgcaatgccgagaaagcaatgaagagcgtttcgaagcatgccagcagaacccaatgctgcaaagaggcctgggaatgggattgctgagggcccttctcacagtgagcccctcaagagcagcgtcaggggattgtggggactgttggcacacagctggctttgctaggttgaagacaatgggaggtgtggaagacttgttgactcatttaaagaagattggagggaaaggtaggattgagagtgtttcagacagaaaaaggattatatgctgagggtaaagcacaagtacagagggttgcagatagtgcagaagtctttaaaaacaattattttaacccaacttccagggagactgaatttcttctgccagtcagtaacaccatcaacctgggagttgcccctgacccctccagtcttagctcctgctcctgtaacaaaataccacaaactggttagcttatagagaacagatgtttatttcttacagttcaggagtctggaagtccaagatcatggtgccatcatggccgagttctggtgagggccctcttctgggatgcagcggccagcttctcatgttctcacagtgggtggagggtaagcttgctctctggcctcctcttaaaaaggcactaatcccattcatgagggctccaccttcatgacctaattacctcccaaagatgccatctccaaacaccatcattctggggattccatttcaacatgatttgggggatacatcagaccataacacttttctttttctcaaccttcacatccagttggttctcaagccctggcgattttacgcgctagataggtcttaagttcatctctacgcctgccctggttaaggttctcatcatttctcctctggattcatctgcaacacaggctgccgggttggttcccacctcctagagctggaagagtgggctctctgattctttacacccccgcctcaatcctcctgctgcctgaataaccatctccccgtgacctaggatatatcccagccccttagaggcatgcaaagccttccatgtctgaccctgcctcatgtcttggaagccctagactgctgctgtaccctgaaggaggtacctgctcacattggcccctctgtctggaataaccccaccccggttccacccaagtcaggaaagcttcccaacccctccctcccaccaccccaaagctaagtgaagtgacccctcttcttgcctctgtaacaccgccatgcacatttcatacagcccttgctgaaacttcatctagttctctgttagacttaacattccctaagggcaggtttggaaccttactcatctttatatggcgtctaaaatagtgcttgctttatgataggtgctcagtaaaggttgtcttgaattgagcagatcctctagggacaggagttggatggagagcagactgtaaagcctcatgagggcaggggccctgcctcttcctgagctcaggatacccagagcctagctcagtgcctgccatgaaattgttcactccatcaagccttgttaaatgagttcggggcggggggagcatgatggttttctctctctcagaaagaaagcgctgtatcaaagccctagcaccctctctacacccaccttcagtatttcatattagatgcggcccaagtgatactttctttaccgtcccgtgaagacagcatattggcagccctgcaaaaacaaaacaaaacaaaaccctcagttcatggcatacttgctataaatcagctatgtgtattgtcaaattgtagaactgaaagtatattctgattcggtgtgtgtataaggaaatatacaccagtatatgcattaaaacgtcaagaagagctgggcacagtgtcacatgcctgtaaacccagctattcaggaggctgaggtgggaggatcggttgaggccaggagtttgaggctgcagtgagctatgattgcacagctgcactccagcctgtgctgagacctcatctcttaaaaaataaaaaataaaaagtctaagaggatacacagaaatttttaagtggttacctccacggaatgggattaggggatcagaggtgagggaactcatggtttggctatttctcgttctttctgcactgtttcaaatttttacaagtgtatgttattgtacttttaaaaagattagcttggcaacaagtctagcctgaaatgggtgctattttgactagtctgagtgaaaagtgaggatttaaatgaagtaacccctaaactcagccagtcccatgtttttttaacacttggaatatctaattccatttacactgcattcttcaaatgtaattttcaaagatgccttttgcctcatcccttgcttttaagtattattatagacttttggagactcacgaaacaagcaatccctaaattctcgcccaggaaagtatcttggattaaatggtttttgagaaccttgagagtgtatattctatgaaatggaagaaacaagaactagacagagtcacaaatgctgttgatcacagacaatctctgccatccataaggtaaatgtaatacatctggcgacctgctgagtgtgaacttgcagcaggtgaggaaggaactctgaactctcacaatcttgtttcttcatttcccagagagaaactcggcaaagagaaaaaggacatttccctccaggttatctgaaagaatttcaatgcttacctttaatcatgtgacattgtttatcttggattaaaagaaaagaaaatgtatttattttgtgcatattttcaataaaatatataaaatcgagttggtatatagtgccaaataccattaattaaaaatattttaacctga

SEQ ID NO: 416 - DNA, 4217 bp, Homo Sapiens
  NM_000256
agtccctctttgggtgacctgtgcctgcttcgtgcctggtgtgacgtctctcaggatgcctgagccggggaagaagccagtctcagcttttagcaagaagccacggtcagtggaagtggccgcaggcagccctgccgtgttcgaggccgagacagagcgggcaggagtgaaggtgcgctggcagcgcggaggcagtgacatcagcgccagcaacaagtacggcctggccacagagggcacacggcatacgctgacagtgcgggaagtgggccctgccgaccagggatcttacgcagtcattgctggctcctccaaggtcaagttcgacctcaaggtcatagaggcagagaaggcagagcccatgctggcccctgcccctgcccctgctgaggccactggagcccctggagaagccccggccccagccgctgagctgggagaaagtgccccaagtcccaaagggtcaagctcagcagctctcaatggtcctacccctggagcccccgatgaccccattggcctcttcgtgatgcggccacaggatggcgaggtgaccgtgggtggcagcatcaccttctcagcccgcgtggccggcgccagcctcctgaagccgcctgtggtcaagtggttcaagggcaaatgggtggacctgagcagcaaggtgggccagcacctgcagctgcacgacagctacgaccgcgccagcaaggtctatctgttcgagctgcacatcaccgatgcccagcctgccttcactggcagctaccgctgtgaggtgtccaccaaggacaaatttgactgctccaacttcaatctcactgtccacgaggccatgggcaccggagacctggacctcctatcagccttccgccgcacgagcctggctggaggtggtcggcggatcagtgatagccatgaggacactgggattctggacttcagctcactgctgaaaaagagagacagtttccggaccccgagggactcgaagctggaggcaccagcagaggaggacgtgtgggagatcctacggcaggcacccccatctgagtacgagcgcatcgccttccagtacggcgtcactgacctgcgcggcatgctaaagaggctcaagggcatgaggcgcgatgagaagaagagcacagcctttcagaagaagctggagccggcctaccaggtgagcaaaggccacaagatccggctgaccgtggaactggctgaccatgacgctgaggtcaaatggctcaagaatggccaggagatccagatgagcggcagcaagtacatctttgagtccatcggtgccaagcgtaccctgaccatcagccagtgctcattggcggacgacgcagcctaccagtgcgtggtgggtggcgagaagtgtagcacggagctctttgtgaaagagccccctgtgctcatcacgcgccccttggaggaccagctggtgatggtggggcagcgggtggagtttgagtgtgaagtatcggaggagggggcgcaagtcaaatggctgaaggacggggtggagctgacccgggaggagaccttcaaataccggttcaagaaggacgggcagagacaccacctgatcatcaacgaggccatgctggaggacgcggggcactatgcactgtgcactagcgggggccaggcgctggctgagctcattgtgcaggaaaagaagctggaggtgtaccagagcatcgcagacctgatggtgggcgcaaaggaccaggcggtgttcaaatgtgaggtctcagatgagaatgttcggggtgtgtggctgaagaatgggaaggagctggtgcccgacagccgcataaaggtgtcccacatcgggcgggtccacaaactgaccattgacgacgtcacacctgccgacgaggctgactacagctttgtgcccgagggcttcgcctgcaacctgtcagccaagctccacttcatggaggtcaagattgacttcgtacccaggcaggaacctcccaagatccacctggactgcccaggccgcataccagacaccattgtggttgtagctggaaataagctacgtctggacgtccctatctctggggaccctgctcccactgtgatctggcagaaggctatcacgcaggggaataaggccccagccaggccagccccagatgccccagaggacacaggtgacagcgatgagtgggtgtttgacaagaagctgctgtgtgagaccgagggccgggtccgcgtggagaccaccaaggaccgcagcatcttcacggtcgagggggcagagaaggaagatgagggcgtctacacggtcacagtgaagaaccctgtgggcgaggaccaggtcaacctcacagtcaaggtcatcgacgtgccagacgcacctgcggcccccaagatcagcaacgtgggagaggactcctgcacagtacagtgggagccgcctgcctacgatggcgggcagcccatcctgggctacatcctggagcgcaagaagaagaagagctaccggtggatgcggctgaacttcgacctgattcaggagctgagtcatgaagcgcggcgcatgatcgagggcgtggtgtacgagatgcgcgtctacgcggtcaacgccatcggcatgtccaggcccagccctgcctcccagcccttcatgcctatcggtccccccagcgaacccacccacctggcagtagaggacgtctctgacaccacggtctccctcaagtggcggcccccagagcgcgtgggagcaggaggcctggatggctacagcgtggagtactgcccagagggctgctcagagtgggtggctgccctgcaggggctgacagagcacacatcgatactggtgaaggacctgcccacgggggcccggctgcttttccgagtgcgggcacacaatatggcagggcctggagcccctgttaccaccacggagccggtgacagtgcaggagatcctgcaacggccacggcttcagctgcccaggcacctgcgccagaccattcagaagaaggtcggggagcctgtgaaccttctcatccctttccagggcaagccccggcctcaggtgacctggaccaaagaggggcagcccctggcaggcgaggaggtgagcatccgcaacagccccacagacaccatcctgttcatccgggccgctcgccgcgtgcattcaggcacttaccaggtgacggtgcgcattgagaacatggaggacaaggccacgctggtgctgcaggttgttgacaagccaagtcctccccaggatctccgggtgactgacgcctggggtcttaatgtggctctggagtggaagccaccccaggatgtcggcaacacggagctctgggggtacacagtgcagaaagccgacaagaagaccatggagtggttcaccgtcttggagcattaccgccgcacccactgcgtggtgccagagctcatcattggcaatggctactacttccgcgtcttcagccagaatatggttggctttagtgacagagcggccaccaccaaggagcccgtctttatccccagaccaggcatcacctatgagccacccaactataaggccctggacttctccgaggccccaagcttcacccagcccctggtgaaccgctcggtcatcgcgggctacactgctatgctctgctgtgctgtccggggtagccccaagcccaagatttcctggttcaagaatggcctggacctgggagaagacgcccgcttccgcatgttcagcaagcagggagtgttgactctggagattagaaagccctgcccctttgacgggggcatctatgtctgcagggccaccaacttacagggcgaggcacggtgtgagtgccgcctggaggtgcgagtgcctcagtgaccaggctggctcctggggatggccaggtacaaccggatgccagccccgtgccaggagcctggagggaagttggggaaacccctccctactgttggatgtatgtgtgacaagtgtgtctcctgtgctgcgatgggggatcagcagggcagttgtcgggcagtcctgagtgggtgttgcacagactggtccacagggctcctgaaggaagcccctggatctttggggtaaaaggagggtggcctcaagaaacaatgtctggggacaggcctttctggcctgctatgtcttcccaatgtttattgggcaataaaagataagtgcagtcacagagaactca

SEQ ID NO: 417 - DNA, 3726 bp, Homo Sapiens
  NM_000262
gccccgccctcactggaacgcttcggacttatcaggttaccggattcgagtcagaagcggcggcaggtctgaacgcttcggtaggataagtgcggtgggagggggctctgcggttttggggagcccagggcgggaacccggacccggctggaagtccggagcctggccgcagccccgcccctccgctctttcttggtgaccttaagccagtggctgcctttttctgagcccgggcggggccgaaggcggcccgtaggccctcgggactcccagcactgcagagggtgtgaggtctgacatccaagacacgttgtttcgtatttctgaaggaagaactgaagctccgggaagtgatggctggggatggggcgggcaacttggggaccgagtgtacgatccacgcctaaggttgagggcggccgagctagccaggcagccgtgaccccagtgcttttcagacgtttcttagcttccagagcccaacacatacagctgatacacgcagaccagatctggtcaggtcctcggaagctgagtccagagcgatgctgctgaagacagtgctcttgctgggacatgtggcccaggtgctgatgctggacaatgggctcctgcagacaccacccatgggctggctggcctgggaacgcttccgctgcaacattaactgtgatgaggacccaaagaactgcataagtgaacagctcttcatggagatggctgaccggatggcacaggatggatggcgggacatgggctacacatacctcaacattgatgactgctggatcggtggtcgcgatgccagtggccgcctgatgccggatcccaagcgcttccctcatggcattcctttcctggctgactacgttcactccctgggcctgaagttgggtatctacgcggacatgggcaacttcacctgcatgggttacccaggcaccacactggacaaggtggtccaggatgctcagaccttcgccgagtggaaggtagacatgctcaagctggatggctgcttctccacccccgaggagcgggcccaggggtaccccaagatggctgctgccctgaatgccacaggccgccccatcgccttctcctgcagctggccagcctatgaaggcggcctccccccaagggtgaactacagtctgctggcggacatctgcaacctctggcgtaactatgatgacatccaggactcctggtggagcgtgctctccatcctgaattggttcgtggagcaccaggacatactgcagccagtggccggccctgggcactggaatgaccctgacatgctgctcattgggaactttggtctcagcttagagcaatcccgggcccagatggccctgtggacggtgctggcagcccccctcttgatgtccacagacctgcgtaccatctccgcccagaacatggacattctgcagaatccactcatgatcaaaatcaaccaggatcccttaggcatccagggacgcaggattcacaaggaaaaatctctcatcgaagtgtacatgcggcctctgtccaacaaggctagcgccttagtcttcttcagctgcaggaccgatatgccttatcgctaccactcctcccttggccagctgaacttcaccgggtctgtgatatatgaggcccaggacgtctactcaggtgacatcatcagtggcctccgagatgaaaccaacttcacagtgatcatcaacccttcaggggtagtgatgtggtacctgtatcccatcaagaacctggagatgtcccagcagtgaggagctgggacatgtgacaggctgtggtggcaccactgagcctagaccatggagccttggcatgcccagggcaagtggggaggttctctgctccccaggcctgctcggtgactgaccccatcatacccaaagtgcaatctcacggccaggttctatgccctgtccaagcgtaaaccctcttggaaacttcttttggggcaattttcctgtggccttcctggcctctacttccatgtgcgcagccccacagacgttgctgagcaactcgccagcctcctgagctccatgcccatcaggactctagcctctgaccttgctgttgactctgaaatcaggatttggaagttttcgaattaggagtagagagatctgacctcttgccaggaatgcccatggatcatgtgattggcttttctacccatagagggccttgcagcctgataccacctgggagtgagggtcacaaaggagaccttggctccctcaggtcaccaataaacctgttctttaatcaagtagttgtaatatggacctggggtacctttagttagggactctggtggcactacacggggtgctggattcaaatctcacctctatggatgatgtctggcatcgtctggcccctccttttccaaagtgaccagaagattgtacttcctagagatgccagacttgcctcacacccaggagctgcccctgctgtgcctggtatgctggcagtggtgatggtgacaacacaatgaggccaagtagcaatgctcccaggtcctgcagcttgtgctctgcccagcagtgcccctggcccagcacctcagcctgctcttctctctggtggctccaccccaacccctacttcttttcctttatttctctcccaacctggctgcaaaggaggttcatattccccagatgtgtccacaaacctgtccaggagttgtgtcttaaaattgatttcctgtccctcttcctaaggacaggggtaacagtcaaagtgaaggaatgatgggttcttgcctgtcttgctttggtccgtatttcccaagccctcctcttttagccaaggctacagggcacttgtcttccctggtggctctcccctttggagagagctagtggcagagcaacctagctaggtcctccttgggctttgaatgcaggagcacccagtgccccaggccttgcactgtgctgcccaaggagtattttctgggtggatctcccatactcctcagggttctgaggtccttgtatttagggtatggtgtaaaaacttacatatgcacattttgttacatcatttaagatgattgaagctttactggttaagtatagggtcaccagagaaagttcctttccccagttgatgtcttgaggctgttgagaaacttaggacagaagcctacctcatcccaggcctgcccctccgtgcatagctctgcctttgggtcttgttcatagtgctgttcaggcaaaatggaatagtctcaggtgggaacaccttctcttgctagctccaggaaggctttgtgggaaatgagttgagaccatggacttgggagttgggggccagagttgagcctggacttgaccaattaattcccttacctttcagcccaagatagctacatgtctttacttgctgtataagttttccttttgtcctgggggtgcctgattgatcctatctcttcacccttcattctttcaacaaacatgccatctatctcccaggacatttattcccttctattcaaggccagttaggaatgcaattatttttttttttcagttaaatacagacttgtttggacgcaaggtaccctttctctttttaaaaactttttatcatgaaaactttcaaatacaaaaataaaatggtagagtgaacctccatgtacccagcatccagctccagtaaccatcaacgtgtaccattatttca

SEQ ID NO: 418 - DNA, 2798 bp, Homo Sapiens
  NM_000263
agtagggaagtagctatggcagtgcctgatacaaaataaactccaaatgtgtatttattagatggttggatggaagttatttgcgtgtgaaagcgcgttttacccgaaggcgctctgtgagggccagcgggtccccttcggccctggagccggggtcacacgctccccaccgcgtgcggtcacgagacgcccccaagggagtatcctggtacccggaagccgcgactcctggccctgagcccgggcttagccttcgggtccacgtggccggaggccggcagctgattggacgcgggccgccccaccccctggccgtcgcgggacccgcaggactgagaccatggaggcggtggcggtggccgcggcggtgggggtccttctcctggccggggccgggggcgcggcaggcgacgaggcccgggaggcggcggccgtgcgggcgctcgtggcccggctgctggggccaggccccgcggccgacttctccgtgtcggtggagcgcgctctggctgccaagccgggcttggacacctacagcctgggcggcggcggcgcggcgcgcgtgcgggtgcgcggctccacgggcgtggcggccgccgcggggctgcaccgctacctgcgcgacttctgtggctgccacgtggcctggtccggctctcagctgcgcctgccgcggccactgccagccgtgccgggggagctgaccgaggccacgcccaacaggtaccgctattaccagaatgtgtgcacgcaaagctactctttcgtgtggtgggactgggcccgctgggagcgagagatagactggatggcgctgaatggcatcaacctggcactggcctggagcggccaggaggccatctggcagcgggtgtacctggccttgggcctgacccaggcagagatcaatgagttctttactggtcctgccttcctggcctgggggcgaatgggcaacctgcacacctgggatggccccctgcccccctcctggcacatcaagcagctttacctgcagcaccgggtcctggaccagatgcgctccttcggcatgaccccagtgctgcctgcattcgcggggcatgttcccgaggctgtcaccagggtgttccctcaggtcaatgtcacgaagatgggcagttggggccactttaactgttcctactcctgctccttccttctggctccggaagaccccatattccccatcatcgggagcctcttcctgcgagagctgatcaaagagtttggcacagaccacatctatggggccgacactttcaatgagatgcagccaccttcctcagagccctcctaccttgccgcagccaccactgccgtctatgaggccatgactgcagtggatactgaggctgtgtggctgctccaaggctggctcttccagcaccagccgcagttctgggggcccgcccagatcagggctgtgctgggagctgtgccccgtggccgcctcctggttctggacctgtttgctgagagccagcctgtgtatacccgcactgcctccttccagggccagcccttcatctggtgcatgctgcacaactttgggggaaaccatggtctttttggagccctagaggctgtgaacggaggcccagaagctgcccgcctcttccccaactccaccatggtaggcacgggcatggcccccgagggcatcagccagaacgaagtggtctattccctcatggctgagctgggctggcgaaaggacccagtgccagatttggcagcctgggtgaccagctttgccgcccggcggtatggggtctcccacccggacgcaggggcagcgtggaggctactgctccggagtgtgtacaactgctccggggaggcctgcaggggccacaatcgtagcccgctggtcaggcggccgtccctacagatgaataccagcatctggtacaaccgatctgatgtgtttgaggcctggcggctgctgctcacatctgctccctccctggccaccagccccgccttccgctacgacctgctggacctcactcggcaggcagtgcaggagctggtcagcttgtactatgaggaggcaagaagcgcctacctgagcaaggagctggcctccctgttgagggctggaggcgtcctggcctatgagctgctgccggcactggacgaggtgctggctagtgacagccgcttcttgctgggcagctggctagagcaggcccgagcagcggcagtcagtgaggccgaggccgatttctacgagcagaacagccgctaccagctgaccttgtgggggccagaaggcaacatcctggactatgccaacaagcagctggcggggttggtggccaactactacacccctcgctggcggcttttcctggaggcgctggttgacagtgtggcccagggcatccctttccaacagcaccagtttgacaaaaatgtcttccaactggagcaggccttcgttctcagcaagcagaggtaccccagccagccgcgaggagacactgtggacctggccaagaagatcttcctcaaatattacccccgctgggtggccggctcttggtgatagattcgccaccactgggccttgttttccgctaattccagggcagattccagggcccagagctggacagacatcacaggataacccaggcctgggaggaggccccacggcctgctggtggggtctgacctggggggattggagggaaatgacctgccctccaccaccacccaaagtgtgggattaaagtactgttttctttccacttaaaaaaaaaaaaaaaaaa

SEQ ID NO: 419 - DNA, 2438 bp, Homo Sapiens
  NM_000270
ataagccagagcctagaccagtgagccaactgtgcgaaccagacccggcagccttgctcagttcagcatagcggagcggatccgatcggatcggagcggatcggagcacaccggagcaggctcatcgagaaggcgtctgcgagaccatggagaacggatacacctatgaagattataagaacactgcagaatggcttctgtctcacactaagcaccgacctcaagttgcaataatctgtggttctggattaggaggtctgactgataaattaactcaggcccagatctttgactacggtgaaatccccaactttccccgaagtacagtgccaggtcatgctggccgactggtgtttgggttcctgaatggcagggcctgtgtgatgatgcagggcaggttccacatgtatgaagggtacccactctggaaggtgacattcccagtgagggttttccaccttctgggtgtggacaccctggtagtcaccaatgcagcaggagggctgaaccccaagtttgaggttggagatatcatgctgatccgtgaccatatcaacctacctggtttcagtggtcagaaccctctcagagggcccaatgatgaaaggtttggagatcgtttccctgccatgtctgatgcctacgaccggactatgaggcagagggctctcagtacctggaaacaaatgggggagcaacgtgagctacaggaaggcacctatgtgatggtggcaggccccagctttgagactgtggcagaatgtcgtgtgctgcagaagctgggagcagacgctgttggcatgagtacagtaccagaagttatcgttgcacggcactgtggacttcgagtctttggcttctcactcatcactaacaaggtcatcatggattatgaaagcctggagaaggccaaccatgaagaagtcttagcagctggcaaacaagctgcacagaaattggaacagtttgtctccattcttatggccagcattccactccctgacaaagccagttgacctgccttggagtcgtctggcatctcccacacaagacccaagtagctgctaccttctttggccccttgctggagtcatgtgcctctgtccttaggttgtagcagaaaggaaaagattcctgtccttcacctttcccactttcttctaccagacccttctggtgccagatcctcttctcaaagctgggattacaggtgtgagcatagtgagaccttggcgctacaaaataaagctgttctcattcctgttctttcttacacaagagctggagcccgtgccctaccacacatctgtggagatgcccaggatttgactcgggccttagaactttgcatagcagctgctactagctctttgagataatacattccgaggggctcagttctgccttatctaaatcaccagagaccaaacaaggactaatccaatacctcttggattttatttaatgtcataatgttgtcagaataaagagaaagatgaaataatttcatttttttgtgtaacttggtatggggctggggcacagaccaagattgacatgaaaggatgtgagatcgcatgtcttgtgtgactatctgcttctcagacaagcagttaggaactgagatgagatagtatgtgagggcagcaaaggatgaagaagggcaaaatgatgaaaggtgaggtggaaagaggttatgagatggtaaagaaaagttaacttctggcacttgattgccacttctgtcaggctggtcctgcctctctcccttgccttctgattgtttcatttcctgtttatttgatcatatctgaattagttcactggttagcctcttccttagttcccacttccttaccaaagccctaattatatttcctcttgtttgccttttctctcctactcttctctaacatctgcagccacactctccattcactccatgctgacaaggcagtggcaaacacttttctctgctgccagccactccactgttgactggattgctgccagccccaggcaaacctgtgaagttgtttcatactctgcttctctttgagtgcctccttctctccttcctcttcctttctgggctccagtctttctcttcacttgtgcttgtcagaacctccctgtgatactgcctccaggcatttcccccatgttggctcaccgcactattatctttgcttatcaacttgcattcagctggctggcatgtttcaaaaccacactgccctcccaggcctgtgtgccttttgagaaagaccagtgctggatgagcctctagtaatgacaacattttagttgttagtggtataatacggaagagatattttgcacaggctgctttggagaactttcaaattatcctttgtttggtaactgacctacttaactgcccaatacaaagaaaaagcaaaaaaaaaaaaaaaaaa

SEQ ID NO: 420 - DNA, 4827 bp, Homo Sapiens
  NM_000271
gaagggcaacacggggaccttgaagcggggtcgcggcggcgccccagcccgggccagggagtcccggcagcggcacctcccagaaagggcggagccgacgacgccttcttccttcctgaccggcgcgcgcagcctgctgccgcggtcagcgcctgctcctgctcctccgctcctcctgcgcggggtgctgaaacagcccggggaagtagagccgcctccggggagcccaaccagccgaacgccgccggcgtcagcagccttgcgcggccacagcatgaccgctcgcggcctggcccttggcctcctcctgctgctactgtgtccagcgcaggtgttttcacagtcctgtgtttggtatggagagtgtggaattgcatatggggacaagaggtacaattgcgaatattctggcccaccaaaaccattgccaaaggatggatatgacttagtgcaggaactctgtccaggattcttctttggcaatgtcagtctctgttgtgatgttcggcagcttcagacactaaaagacaacctgcagctgcctctacagtttctgtccagatgtccatcctgtttttataacctactgaacctgttttgtgagctgacatgtagccctcgacagagtcagtttttgaatgttacagctactgaagattatgttgatcctgttacaaaccagacgaaaacaaatgtgaaagagttacaatactacgtcggacagagttttgccaatgcaatgtacaatgcctgccgggatgtggaggccccctcaagtaatgacaaggccctgggactcctgtgtgggaaggacgctgacgcctgtaatgccaccaactggattgaatacatgttcaataaggacaatggacaggcaccttttaccatcactcctgtgttttcagattttccagtccatgggatggagcccatgaacaatgccaccaaaggctgtgacgagtctgtggatgaggtcacagcaccatgtagctgccaagactgctctattgtctgtggccccaagccccagcccccacctcctcctgctccctggacgatccttggcttggacgccatgtatgtcatcatgtggatcacctacatggcgtttttgcttgtgttttttggagcattttttgcagtgtggtgctacagaaaacggtattttgtctccgagtacactcccatcgatagcaatatagctttttctgttaatgcaagtgacaaaggagaggcgtcctgctgtgaccctgtcagcgcagcatttgagggctgcttgaggcggctgttcacacgctgggggtctttctgcgtccgaaaccctggctgtgtcattttcttctcgctggtcttcattactgcgtgttcgtcaggcctggtgtttgtccgggtcacaaccaatccagttgacctctggtcagcccccagcagccaggctcgcctggaaaaagagtactttgaccagcactttgggcctttcttccggacggagcagctcatcatccgggcccctctcactgacaaacacatttaccagccatacccttcgggagctgatgtaccctttggacctccgcttgacatacagatactgcaccaggttcttgacttacaaatagccatcgaaaacattactgcctcttatgacaatgagactgtgacacttcaagacatctgcttggcccctctttcaccgtataacacgaactgcaccattttgagtgtgttaaattacttccagaacagccattccgtgctggaccacaagaaaggggacgacttctttgtgtatgccgattaccacacgcactttctgtactgcgtacgggctcctgcctctctgaatgatacaagtttgctccatgacccttgtctgggtacgtttggtggaccagtgttcccgtggcttgtgttgggaggctatgatgatcaaaactacaataacgccactgcccttgtgattaccttccctgtcaataattactataatgatacagagaagctccagagggcccaggcctgggaaaaagagtttattaattttgtgaaaaactacaagaatcccaatctgaccatttccttcactgctgaacgaagtattgaagatgaactaaatcgtgaaagtgacagtgatgtcttcaccgttgtaattagctatgccatcatgtttctatatatttccctagccttggggcacatgaaaagctgtcgcaggcttctggtggattcgaaggtctcactaggcatcgcgggcatcttgatcgtgctgagctcggtggcttgctccttgggtgtcttcagctacattgggttgcccttgaccctcattgtgattgaagtcatcccgttcctggtgctggctgttggagtggacaacatcttcattctggtgcaggcctaccagagagatgaacgtcttcaaggggaaaccctggatcagcagctgggcagggtcctaggagaagtggctcccagtatgttcctgtcatccttttctgagactgtagcatttttcttaggagcattgtccgtgatgccagccgtgcacaccttctctctctttgcgggattggcagtcttcattgactttcttctgcagattacctgtttcgtgagtctcttggggttagacattaaacgtcaagagaaaaatcggctagacatcttttgctgtgtcagaggtgctgaagatggaacaagcgtccaggcctcagagagctgtttgtttcgcttcttcaaaaactcctattctccacttctgctaaaggactggatgagaccaattgtgatagcaatatttgtgggtgttctgtcattcagcatcgcagtcctgaacaaagtagatattggattggatcagtctctttcgatgccagatgactcctacatggtggattatttcaaatccatcagtcagtacctgcatgcgggtccgcctgtgtactttgtcctggaggaagggcacgactacacttcttccaaggggcagaacatggtgtgcggcggcatgggctgcaacaatgattccctggtgcagcagatatttaacgcggcgcagctggacaactatacccgaataggcttcgccccctcgtcctggatcgacgattatttcgactgggtgaagccacagtcgtcttgctgtcgagtggacaatatcactgaccagttctgcaatgcttcagtggttgaccctgcctgcgttcgctgcaggcctctgactccggaaggcaaacagaggcctcaggggggagacttcatgagattcctgcccatgttcctttcggataaccctaaccccaagtgtggcaaagggggacatgctgcctatagttctgcagttaacatcctccttggccatggcaccagggtcggagccacgtacttcatgacctaccacaccgtgctgcagacctctgctgactttattgacgctctgaagaaagcccgacttatagccagtaatgtcaccgaaaccatgggcattaacggcagtgcctaccgagtatttccttacagtgtgttttatgtcttctacgaacagtacctgaccatcattgacgacactatcttcaacctcggtgtgtccctgggcgcgatatttctggtgaccatggtcctcctgggctgtgagctctggtctgcagtcatcatgtgtgccaccatcgccatggtcttggtcaacatgtttggagttatgtggctctggggcatcagtctgaacgctgtatccttggtcaacctggtgatgagctgtggcatctccgtggagttctgcagccacataaccagagcgttcacggtgagcatgaaaggcagccgcgtggagcgcgcggaagaggcacttgcccacatgggcagctccgtgttcagtggaatcacacttacaaaatttggagggattgtggtgttggcttttgccaaatctcaaattttccagatattctacttcaggatgtatttggccatggtcttactgggagccactcacggattaatatttctccctgtcttactcagttacatagggccatcagtaaataaagccaaaagttgtgccactgaagagcgatacaaaggaacagagcgcgaacggcttctaaatttctagccctctcgcagggcatcctgactgaactgtgtctaagggtcggtcggtttaccactggacgggtgctgcatcggcaaggccaagttgaacaccggatggtgccaaccatcggttgtttggcagcagctttgaacgtagcgcctgtgaactcaggaatgcacagttgacttgggaagcagtattactagatctggaggcaaccacaggacactaaacttctcccagcctcttcaggaaagaaacctcattctttggcaagcaggaggtgacactagatggctgtgaatgtgatccgctcactgacactctgtaaaggccaatcaatgcactgtctgtctctccttttaggagtaagccatcccacaagttctataccatatttttagtgacagttgaggttgtagatacactttataacattttatagtttaaagagctttattaatgcaataaattaactttgtacacatttttatataaaaaaacagcaagtgatttcagaatgttgtaggcctcattagagcttggtctccaaaaatctgtttgaaaaaagcaacatgttcttcacagtgttcccctagaaaggaagagatttaattgccagttagatgtggcatgaaatgagggacaaagaaagcatctcgtaggtgtgtctactgggttttaacttatttttctttaataaaatacattgttttcctaaaaaaaaaaaaaaa

SEQ ID NO: 421 - DNA, 2102 bp, Homo Sapiens
  NM_000274
ttgggggcggggcagaatcagcctttaagttgcagtgactctccggcgtcactgttgcgcttcatagacgccgcgtgtacccggttgtcctcaggcgctgtcagatctgtggtttttctacttgaaggacacaatgttttccaaactagcacatttgcagaggtttgctgtacttagtcgcggagttcattcttcagtggcttctgctacatctgttgcaactaaaaaaacagtccaaggccctccaacctctgatgacatttttgaaagggaatataagtatggtgcacacaactaccatcctttacctgtagccctggagagaggaaaaggtatttacttatgggatgtagaaggcagaaaatattttgacttcctgagttcttacagtgctgtcaaccaagggcattgtcaccccaagattgtgaatgctctgaagagtcaagtggacaaattgaccttaacatctagagctttctataataacgtacttggtgaatatgaggagtatattactaaacttttcaactaccacaaagttcttcctatgaatacaggagtggaggctggagagactgcctgtaaactagctcgtaagtggggctataccgtgaagggcattcagaaatacaaagcaaagattgtttttgcagctgggaacttctggggtaggacgttgtctgctatctccagttccacagacccaaccagttacgatggttttggaccatttatgccgggattcgacatcattccctataatgatctgcccgcactggagcgtgctcttcaggatccaaatgtggctgcgttcatggtagaaccaattcagggtgaagcaggcgttgttgttccggatccaggttacctaatgggagtgcgagagctctgcaccaggcaccaggttctctttattgctgatgaaatacagacaggattggccagaactggtagatggctggctgttgattatgaaaatgtcagacctgatatagtcctccttggaaaggccctttctgggggcttataccctgtgtctgcagtgctgtgtgatgatgacatcatgctgaccattaagccaggggagcatgggtccacatacggtggcaatccactaggctgccgagtggccatcgcagcccttgaggttttagaagaagaaaaccttgctgaaaatgcagacaaattgggcattatcttgagaaatgaactcatgaagctaccttctgatgttgtaactgccgtaagaggaaaaggattattaaacgctattgtcattaaagaaaccaaagattgggatgcttggaaggtgtgtctacgacttcgagataatggacttctggccaagccaacccatggcgacattatcaggtttgcgcctccgctggtgatcaaggaggatgagcttcgagagtccattgaaattattaacaagaccatcttgtctttctgagggtagccagctgttttcagtggtccctgggagccagctggagacaggtggtcctgtaaaagctttattcctaatgtgggcacattccactcccatgagtcttcaaaaactttttttttgaatatatttttttcagttgatacataatagaacaacgtttatgaacctgccgtttgctttgtaacgtaactaaataatgtaatggcatctatattcagttgaagtgttttgatgtgcatgtgtacttcctaaggtgaaatgcatctatatacagacagcctctaaatcaagtccttcagtataattgatatatgtttttataatttcctcactggtataagtgtttcatatttgaaaaagttatctctgggtattgcataaaaggcttcatcttataaagtgaaatcattgttattgaattttaggaaggattaatggttaagtgtatataaaatactaatattaagtaaacttcatattggccaacaccagggttgtattctatggatgtcattattttgaattaagaattagtgtttaacattcctaaattgttttgagtgcttgattataatttgtaaaaaatgtttattttcaatacttctttaaatttaaaataaagcttatatttcaaatgtcaaaaaaaaaa

SEQ ID NO: 422 - DNA, 2577 bp, Homo Sapiens
  NM_000282
ggcatcgggtttctggctcgtgatttgccggagctcctgcgctccccttctccaccccctccggctgtgtgagaggtcagcagaggggcggtctgcggggacaacaatggcggggttctgggtcgggacagcaccgctggtcgctgccggacggcgtgggcggtggccgccgcagcagctgatgctgagcgcggcgctgcggaccctgaagcatgttctgtactattcaagacagtgcttaatggtgtcccgtaatcttggttcagtgggatatgatcctaatgaaaaaacttttgataaaattcttgttgctaatagaggagaaattgcatgtcgggttattagaacttgcaagaagatgggcattaagacagttgccatccacagtgatgttgatgctagttctgttcatgtgaaaatggcggatgaggctgtctgtgttggcccagctcccaccagtaaaagctacctcaacatggatgccatcatggaagccattaagaaaaccagggcccaagctgtacatccaggttatggattcctttcagaaaacaaagaatttgccagatgtttggcagcagaagatgtcgttttcattggacctgacacacatgctattcaagccatgggcgacaagattgaaagcaaattattagctaagaaagcagaggttaatacaatccctggctttgatggagtagtcaaggatgcagaagaagctgtcagaattgcaagggaaattggctaccctgtcatgatcaaggcctcagcaggtggtggtgggaaaggcatgcgcattgcttgggatgatgaagagaccagggatggttttagattgtcatctcaagaagctgcttctagttttggcgatgatagactactaatagaaaaatttattgataatcctcgtcatatagaaatccaggttctaggtgataaacatgggaatgctttatggcttaatgaaagagagtgctcaattcagagaagaaatcagaaggtggtggaggaagcaccaagcatttttttggatgcggagactcgaagagcgatgggagaacaagctgtagctcttgccagagcagtaaaatattcctctgctgggaccgtggagttccttgtggactctaagaagaatttttatttcttggaaatgaatacaagactccaggttgagcatcctgtcacagaatgcattactggcctggacctagtccaggaaatgatccgtgttgctaagggctaccctctcaggcacaaacaagctgatattcgcatcaacggctgggcagttgaatgtcgggtttatgctgaggacccctacaagtcttttggtttaccatctattgggagattgtctcagtaccaagaaccgttacatctacctggtgtccgagtggacagtggcatccaaccaggaagtgatattagcatttattatgatcctatgatttcaaaactaatcacatatggctctgatagaactgaggcactgaagagaatggcagatgcactggataactatgttattcgaggtgttacacataatattgcattacttcgagaggtgataatcaactcacgctttgtaaaaggagacatcagcactaaatttctctccgatgtgtatcctgatggcttcaaaggacacatgctaaccaagagtgagaagaaccagttattggcaatagcatcatcattgtttgtggcattccagttaagagcacaacattttcaagaaaattcaagaatgcctgttattaaaccagacatagccaactgggagctctcagtaaaattgcatgataaagttcataccgtagtagcatcaaacaatgggtcagtgttctcggtggaagttgatgggtcgaaactaaatgtgaccagcacgtggaacctggcttcgcccttattgtctgtcagcgttgatggcactcagaggactgtccagtgtctttctcgagaagcaggtggaaacatgagcattcagtttcttggtacagtgtacaaggtgaatatcttaaccagacttgccgcagaattgaacaaatttatgctggaaaaagtgactgaggacacaagcagtgttctgcgttccccgatgcccggagtggtggtggccgtctctgtcaagcctggagacgcggtagcagaaggtcaagaaatttgtgtgattgaagccatgaaaatgcagaatagtatgacagctgggaaaactggcacggtgaaatctgtgcactgtcaagctggagacacagttggagaaggggatctgctcgtggagctggaatgaaggatttataacctttcagtcatcacccaatttaattagccatttgcatgatgctttcacacacaattgattcaagcattatacaggaacacccctgtgcagctacgtttacgtcgtcatttattccacagagtcaagaccaatattctgccaaaaaatcaccaatggaaattttcattgatataaatacttgtacatatgatttgtacttctgctgtgagattccctagtgtcaaaattaaatcaataaaactgagcatttgtctaaataaaaaaaaaaaaaa

SEQ ID NO: 423 - DNA, 3414 bp, Homo Sapiens
  NM_000283
tgggagtccatgcgtgcctggagcagcagcgtctccagggacaggcagccaccatgagcctcagtgaggagcaggcccggagctttctggaccagaaccccgattttgcccgccagtactttgggaagaaactgagccctgagaatgtggccgcggcctgcgaggacgggtgcccgccggactgcgacagcctccgggacctctgccaggtggaggagagcacggcgctgctggagctggtgcaggatatgcaggagagcatcaacatggagcgcgtggtcttcaaggtcctgcggcgcctctgcaccctcctgcaggccgaccgctgcagcctcttcatgtaccgccagcgcaacggcgtggccgagctggccaccaggcttttcagcgtgcagccggacagcgtcctggaggactgcctggtgccccccgactccgagatcgtcttcccactggacatcggggtcgtgggccacgtggctcagaccaaaaagatggtgaacgtcgaggacgtggccgagtgccctcacttcagctcatttgctgacgagctcactgactacaagacaaagaatatgctggccacacccatcatgaatggcaaagacgtcgtggcggtgatcatggcagtgaacaagctcaacggcccattcttcaccagcgaagacgaagatgtgttcttgaagtacctgaattttgccacgttgtacctgaagatctatcacctgagctacctccacaactgcgagacgcgccgcggccaggtgctgctgtggtcggccaacaaggtgtttgaggagctgacggacatcgagaggcagttccacaaggccttctacacggtgcgggcctacctcaactgcgagcggtactccgtgggcctcctggacatgaccaaggagaaggaattttttgacgtgtggtctgtgctgatgggagagtcccagccgtactcgggcccacgcacgcctgatggccgggaaattgtcttctacaaagtgatcgactacatcctccacggcaaggaggagatcaaggtcattcccacaccctcagccgatcactgggccctggccagcggccttccaagctacgtggcagaaagcggctttatttgtaacatcatgaatgcttccgctgacgaaatgttcaaatttcaggaaggggccctggacgactccgggtggctcatcaagaatgtgctgtccatgcccatcgtcaacaagaaggaggagattgtgggagtcgccacattttacaacaggaaagacgggaagccctttgacgaacaggacgaggttctcatggagtccctgacacagttcctgggctggtcagtgatgaacaccgacacctacgacaagatgaacaagctggagaaccgcaaggacatcgcacaggacatggtcctttaccacgtgaagtgcgacagggacgagatccagctcatcctgccaaccagagcgcgcctggggaaggagcctgctgactgcgatgaggacgagctgggcgaaatcctgaaggaggagctgccagggcccaccacatttgacatctacgaattccacttctctgacctggagtgcaccgaactggacctggtcaaatgtggcatccagatgtactacgagctgggcgtggtccgaaagttccagatcccccaggaggtcctggtgcggttcctgttctccatcagcaaagggtaccggagaatcacctaccacaactggcgccacggcttcaacgtggcccagacgatgttcacgctgctcatgaccggcaaactgaagagctactacacggacctggaggccttcgccatggtgacagccggcctgtgccatgacatcgaccaccgcggcaccaacaacctgtaccagatgaagtcccagaaccccttggctaagctccacggctcctcgattttggagcggcaccacctggagtttgggaagttcctgctctcggaggagaccctgaacatctaccagaacctgaaccggcggcagcacgagcacgtgatccacctgatggacatcgccatcatcgccacggacctggccctgtacttcaagaagagagcgatgtttcagaagatcgtggatgagtccaagaactaccaggacaagaagagctgggtggagtacctgtccctggagacgacccggaaggagatcgtcatggccatgatgatgacagcctgcgacctgtctgccatcaccaagccctgggaagtccagagcaaggtcgcacttctcgtggctgctgagttctgggagcaaggtgacttggaaaggacagtcttggatcagcagcccattcctatgatggaccggaacaaggcggccgagctccccaagctgcaagtgggcttcatcgacttcgtgtgcacattcgtgtacaaggagttctctcgtttccacgaagagatcctgcccatgttcgaccgactgcagaacaataggaaagagtggaaggcgctggctgatgagtatgaggccaaagtgaaggctctggaggagaaggaggaggaggagagggtggcagccaagaaagtaggcacagaaatttgcaatggcggcccagcacccaagtcttcaacctgctgtatcctgtgagcactggtcccatggggaccctatggctccctcaatcttcacccactaggatttgggttctgcctgtggctatttgctacaagaggttaggaagcccaagaaaatgactgaagatcattctggatattttaatttttttttttttttttttttgagatggagtcttgctctgtcacccaggctggagtgccgtggcacgatctcagctcactgcaacctccacctcccaggttcaagcgattctcgtgcctcagcctcctgagtagctgggactacaggcgcccaccaccacacatggctaatttttgtattttcagtacagatggggtttcaccatattgggcaggctggtctcgaactcctgacctcaggtgatcacccgcctcagcttcctgaagtgctgggattacaggcatgagccaccacgcccagcctgtttttataaactgaagccaactgtgaataaactgtagcctacattactcatccatttttggatagttaccactgggagacctttgaaaagggtccatgaactctgaaatcactgagaacatttgcagccacacatgtacatatgtgtacacaggtagacagatggacacaggccgtttctcatccagtttaggaaaacacacatgctcaggaattcagaataaaataaacagaaaactacttgcccattatctgtggtaaaatgatagcggaagccacactacatttgacccatcagaaaattctgccagagaggtcaaggccatgagtaaagcggccatccaacttcaaaaaaaaaaaa

SEQ ID NO: 424 - DNA, 2019 bp, Homo Sapiens
  NM_000285
atttggctctggaggaggtgggtcaaggactccatgccccgccccctgccccgcccttaccccgccccatgcattggcacccggaggggctcagctgacgccgcacttcacgtgacgccggtgccgggcgaacatggcggcggccaccggaccctcgttttggctggggaatgaaaccctgaaggtgccgctggcgctctttgccttgaaccggcagcgcctgtgtgagcggctgcggaagaaccctgctgtgcaggccggctccatcgtggtcctgcagggcggggaggagactcagcgctactgcaccgacaccggggtcctcttccgccaggagtccttctttcactgggcgttcggtgtcactgagccaggctgctatggtgtcatcgatgttgacactgggaagtcgaccctgtttgtgcccaggcttcctgccagccatgccacctggatgggaaagatccattccaaggagcacttcaaggagaagtatgccgtggacgacgtccagtacgtagatgagattgccagcgtcctgacgtcacagaagccctctgtcctcctcactttgcgtggcgtcaacacggacagcggcagtgtctgcagggaggcctcctttgacggcatcagcaagttcgaagtcaacaataccattcttcacccagagatcgttgagtgccgagtgtttaagacggatatggagctggaggttctgcgctataccaataaaatctccagcgaggcccaccgtgaggtaatgaaggctgtaaaagtgggaatgaaagaatatgagttggaaagcctcttcgagcactactgctactcccggggcggcatgcgccacagctcctacacctgcatctgcggcagtggtgagaactcagccgtgctacactacggacacgccggagctcccaacgaccgaacgatccagaatggggatatgtgcctgttcgacatgggcggtgagtattactgcttcgcttccgacatcacctgctcctttcccgccaacggcaagttcactgcagaccagaaggccgtctatgaggcagtgctgcggagctcccgtgccgtcatgggtgccatgaagccaggtgtctggtggcctgacatgcaccgcctggctgaccgcatccacctggaggagctggcccacatgggcatcctgagcggcagcgtggacgccatggtccaggctcacctgggggccgtgtttatgcctcacgggcttggccacttcctgggcattgacgtgcacgacgtgggaggctacccagagggcgtggagcgcatcgacgagcccggcctgcggagcctgcgcactgcacggcacctgcagccaggcatggtgctcaccgtggagccgggcatctacttcatcgaccacctcctggatgaggccctggcggacccggcccgcgcctccttccttaaccgcgaggtcctgcagcgctttcgcggttttggcggggtccgcatcgaggaggacgtcgtggtgactgacagcggcatagagctgctgacctgcgtgccccgcactgtggaagagattgaagcatgcatggcaggctgtgacaaggcctttacccccttctctggccccaagtagagccagccagaaatcccagcgcacctgggggcctggccttgcaacctcttttcgtgatgggcagcctgctggtcagcactccagtagcgagagacggcacccagaatcagatcccagcttcggcatttgatcagaccaaacagtgctgtttcccggggaggaaacacttttttaattacccttttgcaggctcccacctttaatctgttttataccttgcttattaaatgagcgacttaaaatgattgaaaataatgctgttctttagtagcaactaaaatgtgtcttgctgtcatttatattccttttcccaggaaagaagcatttctgatactttctgtcaaaaatcaatatgcagaatggcatttgcaataaaaggtttcctaaaatggtccaaaaaaaaa

SEQ ID NO: 425 - DNA, 1499 bp, Homo Sapiens
  NM_000288
acttccgtccggtctgcctggtctctctaaccgcgccagtgtgcctccgactcggaacggcttccgcggccggggcagcgagggccgggggcggcgggcgggatgagtgcggtgtgcggtggagcggcgcggatgctgcggacgccgggacgccacggctacgccgccgagttctccccgtacctgccgggccgcctggcctgcgccaccgcgcagcactacggcatcgcgggctgtggaaccctactaatattggatccagatgaagctgggctaaggctttttagaagctttgactggaatgatggtttgtttgatgtgacttggagtgagaacaacgaacatgtcctcatcacctgtagtggcgatggctcgctgcagctctgggacactgccaaagctgcagggccactgcaagtctataaagaacacgctcaggaggtgtatagtgttgattggagccaaaccagaggtgaacagcttgtggtgtctggctcatgggatcaaactgtcaaattgtgggatccaactgttggaaagtctctgtgcacctttagaggccatgaaagtattatttatagcacaatctggtctccccacatccctggttgttttgcttcagcctcaggtgatcagactctgagaatatgggatgtgaaggcagcaggagtaagaatcgtgattcctgcacatcaggcagaaatcttgagttgtgactggtgtaaatacaatgagaatttgctggtgaccggggcggttgactgtagtttgagaggctgggacttaaggaatgtacgacaaccagtgtttgaacttcttggtcatacctatgctattaggagggtgaaattttcaccatttcatgcttctgtgctggcctcttgctcgtatgattttactgtaagattctggaacttttcaaagcctgactctcttcttgaaacagtggagcatcatacagagtttacttgtggtttagacttcagtcttcagagccccactcaggtggctgactgttcttgggatgaaacaataaagatctatgaccctgcttgtcttactattcctgcttgagatacactactttggtcagaaacagaggatgttggctgaagaactgcctaacagcaaataaattaactatggaaaacatagacattatgcttttatatgctattcagatttcaaatctttccaatttaccctggaatcagttttgagggagctgataaagactttagctgactcgttaagcctgatacataagccatatttaaaattctaagaaataattaatgttatgatatatcttgtagtatctattaaaatgtctctgggtcataaaatggattaaaatatgggagatcagtaggttatacttatatagatagtgatatatttcatttttaatttgtcatttttgatgtaaaatataatcactgctgtgataaataaactatctattgatcatttatcattttaaaaaaaaaaaaaaaaaa

SEQ ID NO: 426 - DNA, 2439 bp, Homo Sapiens
  NM_000291
gagagcagcggccgggaaggggcggtgcgggaggcggggtgtggggcggtagtgtgggccctgttcctgcccgcgcggtgttccgcattctgcaagcctccggagcgcacgtcggcagtcggctccctcgttgaccgaatcaccgacctctctccccagctgtatttccaaaatgtcgctttctaacaagctgacgctggacaagctggacgttaaagggaagcgggtcgttatgagagtcgacttcaatgttcctatgaagaacaaccagataacaaacaaccagaggattaaggctgctgtcccaagcatcaaattctgcttggacaatggagccaagtcggtagtccttatgagccacctaggccggcctgatggtgtgcccatgcctgacaagtactccttagagccagttgctgtagaactcaaatctctgctgggcaaggatgttctgttcttgaaggactgtgtaggcccagaagtggagaaagcctgtgccaacccagctgctgggtctgtcatcctgctggagaacctccgctttcatgtggaggaagaagggaagggaaaagatgcttctgggaacaaggttaaagccgagccagccaaaatagaagctttccgagcttcactttccaagctaggggatgtctatgtcaatgatgcttttggcactgctcacagagcccacagctccatggtaggagtcaatctgccacagaaggctggtgggtttttgatgaagaaggagctgaactactttgcaaaggccttggagagcccagagcgacccttcctggccatcctgggcggagctaaagttgcagacaagatccagctcatcaataatatgctggacaaagtcaatgagatgattattggtggtggaatggcttttaccttccttaaggtgctcaacaacatggagattggcacttctctgtttgatgaagagggagccaagattgtcaaagacctaatgtccaaagctgagaagaatggtgtgaagattaccttgcctgttgactttgtcactgctgacaagtttgatgagaatgccaagactggccaagccactgtggcttctggcatacctgctggctggatgggcttggactgtggtcctgaaagcagcaagaagtatgctgaggctgtcactcgggctaagcagattgtgtggaatggtcctgtgggggtatttgaatgggaagcttttgcccggggaaccaaagctctcatggatgaggtggtgaaagccacttctaggggctgcatcaccatcataggtggtggagacactgccacttgctgtgccaaatggaacacggaggataaagtcagccatgtgagcactgggggtggtgccagtttggagctcctggaaggtaaagtccttcctggggtggatgctctcagcaatatttagtactttcctgccttttagttcctgtgcacagcccctaagtcaacttagcattttctgcatctccacttggcattagctaaaaccttccatgtcaagattcagctagtggccaagagatgcagtgccaggaacccttaaacagttgcacagcatctcagctcatcttcactgcaccctggatttgcatacattcttcaagatcccatttgaattttttagtgactaaaccattgtgcattctagagtgcatatatttatattttgcctgttaaaaagaaagtgagcagtgttagcttagttctcttttgatgtaggttattatgattagctttgtcactgtttcactactcagcatggaaacaagatgaaattccatttgtaggtagtgagacaaaattgatgatccattaagtaaacaataaaagtgtccattgaaaccgtgatttttttttttttcctgtcatactttgttaggaagggtgagaatagaatcttgaggaacggatcagatgtctatattgctgaatgcaagaagtggggcagcagcagtggagagatgggacaattagataaatgtccattctttatcaagggcctactttatggcagacattgtgctagtgcttttattctaacttttatttttatcagttacacatgatcataatttaaaaagtcaaggcttataacaaaaaagccccagcccattcctcccattcaagattcccactccccagaggtgaccactttcaactcttgagtttttcaggtatatacctccatgtttctaagtaatatgcttatattgttcacttcttttttttttattttttaaagaaatctatttcataccatggaggaaggctctgttccacatatatttccacttcttcattctctcggtatagttttgtcacaattatagattagatcaaaagtctacataactaatacagctgagctatgtagtatgctatgattaaatttacttatgtaaaaaaaaaaaaaaaaaa

SEQ ID NO: 427 - DNA, 5503 bp, Homo Sapiens
  NM_000294
aattgggcggccggtttccaattggaagggcttctgagcctcagtcttcgggcggcgctgaccattggcgggcaggatggaggcggagccttgggttgtcgcccgccgccgggggttaaggtgagcgactgcaggcaaacccggcgacagcgcagctcgcgtcgaccctggctcctctgcctgccccctcaggcccccgcctccttcaggatgacgctggacgtggggccggaggatgagctgcccgactgggccgccgccaaagagttttaccagaagtacgaccctaaggacgtcatcggcagaggagtgagctctgtggtccgccgttgtgttcatcgagctactggccacgagtttgcggtgaagattatggaagtgacagctgagcggctgagtcctgagcagctggaggaggtgcgggaagccacacggcgagagacacacatccttcgccaggtcgccggccacccccacatcatcaccctcatcgattcctacgagtcttctagcttcatgttcctggtgtttgacctgatgcggaagggagagctgtttgactatctcacagagaaggtggccctctctgaaaaggaaaccaggtccatcatgcggtctctgctggaagcagtgagctttctccatgccaacaacattgtgcatcgagatctgaagcccgagaatattctcctagatgacaatatgcagatccgactttcagatttcgggttctcctgccacttggaacctggcgagaagcttcgagagttgtgtgggaccccagggtatctagcgccagagatccttaaatgctccatggatgaaacccacccaggctatggcaaggaggtcgacctctgggcctgtggggtgatcttgttcacactcctggctggctcgccacccttctggcaccggcggcagatcctgatgttacgcatgatcatggagggccagtaccagttcagttcccccgagtgggatgaccgttccagcactgtcaaagacctgatctccaggctgctgcaggtggatcctgaggcacgcctgacagctgagcaggccctacagcaccccttctttgagcgttgtgaaggcagccaaccctggaacctcaccccccgccagcggttccgggtggcagtgtggacagtgctggctgctggacgagtggccctaagcacccatcgtgtacggccactgaccaagaatgcactgttgagggacccttatgcgctgcggtcagtgcggcacctcatcgacaactgtgccttccggctctacgggcactgggtaaagaaaggggagcagcagaaccgggcggctctctttcagcaccggccccctgggccttttcccatcatgggccctgaagaggagggagactctgctgctataactgaggatgaggccgtgcttgtgctgggctaggacctcaaccccagggattcccaggaagcagaactctccagaagaagggttttgatcattccagctcctctgggctctggcctcaggcccactaatgatcctgctaccctcttgaagaccagcccggtacctctctccccactggccaggactctgagatcagagctggggtggaagggagccattctgaacgccacgcctggcccggtcagtgctgcatgcactgcatatgaaataaaatctgctacacgccagggagaacaggtgtcctgtgtctgtctggcttgggcaggaaagcccagaaggtgctcagcagggtgcagggatggtgccattctggcccagacctttattggggaaaatgttgggggtcacttggtcttgctcttgcctttacccggaggtagctggaagggccgctctagtgcagtcaacttgctgctgagcctttcctcgctggccttgagccgctcctccaccagcccctggagctgctccagctctttgttcacttgggtcttgatgtaggctcggaggacgtggatgtggcctgcaggggcagggaagaaggggcagggtgaggagagatgctgtctggcaatggggggatggtccctagttgggcaaacagtccccaaatttcccctggtggggatatagaggtagcaatgttgtttccctttaggaaatgttagcaagcccttgtgtgagaggtagttgggtagggtggctatgctggactttgcagcttcaaattctgatccctactcagtagctgtgtgaccttaggcaggttatttaacctatctgtgcctcagtttccttgtatgaaatgtggatagtgatacctagcacataggattgagggaggattaaatgagttaatttatgtaaaatgcttagagcagggcatgcactgcacacctattgccaagtatgtgctggctgttattgtcattggctttctctttttttttttttttttgagatggagtcttgctttatcccccaggctggagtgcagtggcagcgatctcagctcactgcaagctctgcctcccaggttcatgccattctcctgcctcagcctcccagtagctgggactacaggcacccgccaccacgcccggctaactttttgtatttttagtagagacggggtttcacagtgttagccaggatggactcgatctcctgacctcgtgatccgcctgcctcagcctcccaaagtgctgggattacagttgtgagccactgcacctggcctgttctttgtttttttttaactcttaagttctgggatacgagcagaacatgcaggtttgctacgtaggtatacatgggccatggtggtttgctttacccatcaacccatcatataggttttaagccaccgtcattggctttctaatgatcatttctctggagccacttcagctgtgctttttgtttgtttgtttgtttgttttgagacagagtcttgctctgttgcccaggctggagtgcagtggccagatcttggctcactgcagtctccacctcctgggttcatgcagttctcctgcctcagcctcctgagtagctgggactacaagcgcgcaccaccatgcctggctattttttgtattttagtagatagggggtttcacggtgttgcccaggctggtcgcgaactcctgagctcaggcaatccgcctgcctcagattgtgctgggattacaggtgtgagccaccacgcctggcctgcagctgtgcttttatctgtcatcttggacttctgcataagggatcatttagagaaaggactctgactaaaaacaaaaagtctgaagtcctgatgtcatccaaacccttcattctacacctgctcagagggacagggcagcctgccctctccagatcctcacttggctctggctctggtggggccactgtctctagttcctctttctgcggggtaactgcctgctcctccatctccttgctttcttctttctctgcaaaccagaagcaggaagagactgtggccccaggcctggcccagcccagccctgccctggcactctcccttacccgtctcactctctggccacagtttgggtggctgtagccccatgtaagtcaaagacagatccagccgcacctgggaagcaaggcagagggaggctgaaaggagtgcacctgtgctgaggggaggggcggttgagggtggctcctcatggtccaccaccccctacctggggtgtgaagacgtatttatagagcttgaagtggcggaagtaagtgttgaccacgtagtcttccaaggccagcagctgttcctctttgaagaggtcgatgctgaaaggaggccgctgtggtggtgactcggaattagaaccctgactaccttccggagccctggctttgcctccaaaagcccagcaacaggagcaaggagagcccactggggtcttcacaagaagataagggtgatgaatgtgagagagactgggtgagaccttgtctggggatgggtaaagtttccagaatgttccaggggaactgaccctgactccatggcaaaaaaggacactggtgaagtagcggtagcactcctccacgttgcccaagggggttgctggtagggaaagcaagatgcagcagtgaggccctctctggtatccattcattcacttcactcaacagctgtttatgaccatgagcttcagaagcagacagatctgggtttcagcactggcttgtttccttaactcatgtaacaaatactgaatacccactatatgcccactgtatggttttcggcactgaacaagacagacaaggtcctgcccttacgaagcttatattctaggggaataaaccaagaaatagatcatttcagctattaaacattctgaagcaagagctattaaacattctaaagcaggtgttattgtgcactatgcatatatttgcatatattatttctcagaacagtcctgtaaaatgtgtgctgtatccttaatttctagataaggaagcagtggattggaaagctgatggcttgtgtatgatgatgctactaataatgacatattccaggcagaaatcccctgcttctgcttcccatggtcacttgtgccaggcccggttcctcttctccctggggctcaaacctggtagctgccccctctcaccaatacaagccttgtgaagatcctggagcagggcacaagccgctgacgtctgctccagtgagaagccctgctggcggcagaaaatgagcgcgtggcagaagaggtccagggtgatggcgtccctcaggctctgctcaggacaccctagctccagcagctcagccagcacccttgggagggagagaggagtgagtgacaactgggcctcctttcatcaccctacacccaccacatgctttggagtcagccattcctcatgttttcccaacctgacccctcagcctttgccaagagctcttcccacgcccccctcagtccctactccctcatctcagcattggtggtcttctccagctggtgcatggaatggacgtccaggtacttcctgttatagtaaaagaaaaagagtattggtggccgttacctatcatgacaaggctgtgacagctagtgcgtgagactgggagttggccaccggcgtgaagctgggctcttttgccagcttgctgtgtgactatgcaaatcgttaactctctgggcctaaatgaactcttatgagcctctccatttctaaagcctagggttaggaatcttgaattcttttttctgctctgccactaccttgtatgaccttggtcaagtactccctgtggccctcagtgtccccctctgtacaatactccttagcggccatgagactccatttacattctgtctttggctctttttttctcacactgcctcctctttggactggagaggctggaaagccaacttccagtcacctggagtaattgcatctccaggcctcagtctcatctgtaaaatggggatgccctggccacagacaggactgttggggagacaataaagaacgcaaatattcagtgtaa

SEQ ID NO: 428 - DNA, 3220 bp, Homo Sapiens
  NM_000295
acaatgactcctttcggtaagtgcagtggaagctgtacactgcccaggcaaagcgtccgggcagcgtaggcgggcgactcagatcccagccagtggacttagcccctgtttgctcctccgataactggggtgaccttggttaatattcaccagcagcctcccccgttgcccctctggatccactgcttaaatacggacgaggacagggccctgtctcctcagcttcaggcaccaccactgacctgggacagtgaatcgacaatgccgtcttctgtctcgtggggcatcctcctgctggcaggcctgtgctgcctggtccctgtctccctggctgaggatccccagggagatgctgcccagaagacagatacatcccaccatgatcaggatcacccaaccttcaacaagatcacccccaacctggctgagttcgccttcagcctataccgccagctggcacaccagtccaacagcaccaatatcttcttctccccagtgagcatcgctacagcctttgcaatgctctccctggggaccaaggctgacactcacgatgaaatcctggagggcctgaatttcaacctcacggagattccggaggctcagatccatgaaggcttccaggaactcctccgtaccctcaaccagccagacagccagctccagctgaccaccggcaatggcctgttcctcagcgagggcctgaagctagtggataagtttttggaggatgttaaaaagttgtaccactcagaagccttcactgtcaacttcggggacaccgaagaggccaagaaacagatcaacgattacgtggagaagggtactcaagggaaaattgtggatttggtcaaggagcttgacagagacacagtttttgctctggtgaattacatcttctttaaaggcaaatgggagagaccctttgaagtcaaggacaccgaggaagaggacttccacgtggaccaggtgaccaccgtgaaggtgcctatgatgaagcgtttaggcatgtttaacatccagcactgtaagaagctgtccagctgggtgctgctgatgaaatacctgggcaatgccaccgccatcttcttcctgcctgatgaggggaaactacagcacctggaaaatgaactcacccacgatatcatcaccaagttcctggaaaatgaagacagaaggtctgccagcttacatttacccaaactgtccattactggaacctatgatctgaagagcgtcctgggtcaactgggcatcactaaggtcttcagcaatggggctgacctctccggggtcacagaggaggcacccctgaagctctccaaggccgtgcataaggctgtgctgaccatcgacgagaaagggactgaagctgctggggccatgtttttagaggccatacccatgtctatcccccccgaggtcaagttcaacaaaccctttgtcttcttaatgattgaacaaaataccaagtctcccctcttcatgggaaaagtggtgaatcccacccaaaaataactgcctctcgctcctcaacccctcccctccatccctggccccctccctggatgacattaaagaagggttgagctggtccctgcctgcatgtgactgtaaatccctcccatgttttctctgagtctccctttgcctgctgaggctgtatgtgggctccaggtaacagtgctgtcttcgggccccctgaactgtgttcatggagcatctggctgggtaggcacatgctgggcttgaatccaggggggactgaatcctcagcttacggacctgggcccatctgtttctggagggctccagtcttccttgtcctgtcttggagtccccaagaaggaatcacaggggaggaaccagataccagccatgaccccaggctccaccaagcatcttcatgtccccctgctcatcccccactcccccccacccagagttgctcatcctgccagggctggctgtgcccaccccaaggctgccctcctgggggccccagaactgcctgatcgtgccgtggcccagttttgtggcatctgcagcaacacaagagagaggacaatgtcctcctcttgacccgctgtcacctaaccagactcgggccctgcacctctcaggcacttctggaaaatgactgaggcagattcttcctgaagcccattctccatggggcaacaaggacacctattctgtccttgtccttccatcgctgccccagaaagcctcacatatctccgtttagaatcaggtcccttctccccagatgaagaggagggtctctgctttgttttctctatctcctcctcagacttgaccaggcccagcaggccccagaagaccattaccctatatcccttctcctccctagtcacatggccataggcctgctgatggctcaggaaggccattgcaaggactcctcagctatgggagaggaagcacatcacccattgacccccgcaacccctccctttcctcctctgagtcccgactggggccacatgcagcctgacttctttgtgcctgttgctgtccctgcagtcttcagagggccaccgcagctccagtgccacggcaggaggctgttcctgaatagcccctgtggtaagggccaggagagtccttccatcctccaaggccctgctaaaggacacagcagccaggaagtcccctgggcccctagctgaaggacagcctgctccctccgtctctaccaggaatggccttgtcctatggaaggcactgccccatcccaaactaatctaggaatcactgtctaaccactcactgtcatgaatgtgtacttaaaggatgaggttgagtcataccaaatagtgatttcgatagttcaaaatggtgaaattagcaattctacatgattcagtctaatcaatggataccgactgtttcccacacaagtctcctgttctcttaagcttactcactgacagcctttcactctccacaaatacattaaagatatggccatcaccaagccccctaggatgacaccagacctgagagtctgaagacctggatccaagttctgacttttccccctgacagctgtgtgaccttcgtgaagtcgccaaacctctctgagccccagtcattgctagtaagacctgcctttgagttggtatgatgttcaagttagataacaaaatgtttatacccattagaacagagaataaatagaactacatttcttgca

SEQ ID NO: 429 - DNA, 5073 bp, Homo Sapiens
  NM_000297
ggctcctgaggcgcacagcgccgagcgcggcgccgcgcacccgcgcgccggacgccagtgaccgcgatggtgaactccagtcgcgtgcagcctcagcagcccggggacgccaagcggccgcccgcgccccgcgcgccggacccgggccggctgatggctggctgcgcggccgtgggcgccagcctcgccgccccgggcggcctctgcgagcagcggggcctggagatcgagatgcagcgcatccggcaggcggccgcgcgggaccccccggccggagccgcggcctccccttctcctccgctctcgtcgtgctcccggcaggcgtggagccgcgataaccccggcttcgaggccgaggaggaggaggaggaggtggaaggggaagaaggcggaatggtggtggagatggacgtagagtggcgcccgggcagccggaggtcggccgcctcctcggccgtgagctccgtgggcgcgcggagccgggggcttgggggctaccacggcgcgggccacccgagcgggaggcggcgccggcgagaggaccagggcccgccgtgccccagcccagtcggcggcggggacccgctgcatcgccacctccccctggaagggcagccgccccgagtggcctgggcggagaggctggttcgcgggctgcgaggtctctggggaacaagactcatggaggaaagcagcactaaccgagagaaataccttaaaagtgttttacgggaactggtcacatacctcctttttctcatagtcttgtgcatcttgacctacggcatgatgagctccaatgtgtactactacacccggatgatgtcacagctcttcctagacacccccgtgtccaaaacggagaaaactaactttaaaactctgtcttccatggaagacttctggaagttcacagaaggctccttattggatgggctgtactggaagatgcagcccagcaaccagactgaagctgacaaccgaagtttcatcttctatgagaacctgctgttaggggttccacgaatacggcaactccgagtcagaaatggatcctgctctatcccccaggacttgagagatgaaattaaagagtgctatgatgtctactctgtcagtagtgaagatagggctccctttgggccccgaaatggaaccgcttggatctacacaagtgaaaaagacttgaatggtagtagccactggggaatcattgcaacttatagtggagctggctattatctggatttgtcaagaacaagagaggaaacagctgcacaagttgctagcctcaagaaaaatgtctggctggaccgaggaaccagggcaacttttattgacttctcagtgtacaacgccaacattaacctgttctgtgtggtcaggttattggttgaattcccagcaacaggtggtgtgattccatcttggcaatttcagcctttaaagctgatccgatatgtcacaacttttgatttcttcctggcagcctgtgagattatcttttgtttctttatcttttactatgtggtggaagagatattggaaattcgcattcacaaactacactatttcaggagtttctggaattgtctggatgttgtgatcgttgtgctgtcagtggtagctataggaattaacatatacagaacatcaaatgtggaggtgctactacagtttctggaagatcaaaatactttccccaactttgagcatctggcatattggcagatacagttcaacaatatagctgctgtcacagtattttttgtctggattaagctcttcaaattcatcaattttaacaggaccatgagccagctctcgacaaccatgtctcgatgtgccaaagacctgtttggctttgctattatgttcttcattattttcctagcgtatgctcagttggcataccttgtctttggcactcaggtcgatgacttcagtactttccaagagtgtatcttcactcaattccgtatcattttgggcgatatcaactttgcagagattgaggaagctaatcgagttttgggaccaatttatttcactacatttgtgttctttatgttcttcattcttttgaatatgtttttggctatcatcaatgatacttactctgaagtgaaatctgacttggcacagcagaaagctgaaatggaactctcagatcttatcagaaagggctaccataaagctttggtcaaactaaaactgaaaaaaaataccgtggatgacatttcagagagtctgcggcaaggaggaggcaagttaaactttgacgaacttcgacaagatctcaaagggaagggccatactgatgcagagattgaggcaatattcacaaagtacgaccaagatggagaccaagaactgaccgaacatgaacatcagcagatgagagacgacttggagaaagagagggaggacctggatttggatcacagttctttaccacgtcccatgagcagccgaagtttccctcgaagcctggatgactctgaggaggatgacgatgaagatagcggacatagctccagaaggaggggaagcatttctagtggcgtttcttacgaagagtttcaagtcctggtgagacgagtggaccggatggagcattccatcggcagcatagtgtccaagattgacgccgtgatcgtgaagctagagattatggagcgagccaaactgaagaggagggaggtgctgggaaggctgttggatggggtggccgaggatgaaaggctgggtcgtgacagtgaaatccatagggaacagatggaacggctagtacgtgaagagttggaacgctgggaatccgatgatgcagcttcccagatcagtcatggtttaggcacgccagtgggactaaatggtcaacctcgccccagaagctcccgcccatcttcctcccaatctacagaaggcatggaaggtgcaggtggaaatgggagttctaatgtccacgtatgatatgtgtgtttcagtatgtgtgtttctaataagtgaggaagtggctgtcctgaattgctgtaacaagcacactatttatatgccctgaccaccataggatgctagtctttgtgaccgattgctaatcttctgcactttaatttattttatataaactttacccatggttcaaagatttttttttctttttctcatataagaaatctaggtgtaaatattgagtacagaaaaaaaatcttcatgatgtgtattgagcggtacgcccagttgccaccatgactgagtcttctcagttgacaatgaagtagccttttaaagctagaaaactgtcaaagggcttctgagtttcatttccagtcacaaaaatcagtattgttatttttttccaagagtgtgaaggaaaatggggcattcctttccactctggcatagttcatgagcttaatacatagctttcttttaagaaaggagccttttttttcaactagcttcctggggtaaacttttctaaaagataaaatggaaaggaactccaaactatgatagaatctgtgtgaatggttaagatgaatgttaaatactatgcttttttgtaagttgatcgtatctgatgtctgtgggactaactgtatcacttaatttttaccttattttggctctaatttgaataagctgagtaaaaccaccaaagatcagttataggataaaatggcatctctaaccataacacaggagaattggaaggagccctaagttgtcactcagtttaatttcttttaatggttagtttagcctaaagatttatctgcatattctttttcccatgtggctctactcatttgcaactgaatttaatgttataactcatctagtgagaccaacttactaaatttttagtatgcactgaaagtttttatccaacaattatgttcattttaagcaaaattttaagaaagttttgaaattcataaagcatttggttttaaactattttaagaatatagtactcggtcaggtatgacggctcacgcctgtaatcccagcactttgggaggccgaaacaggcgaatcacttgagcccaggagttcaagaccaacatgggcaatgtggcgaaactccatctctacaaaaaatgcaaaaataaaaaatatagtactcaagtattcttgatcctgtgtttcaaaactagaatttgtaatgcaaatggagctcagtctaataaaaaagaggttttggtattaaaagttcatacattagacagtatcagccaaaatttgagttagcaacactgttttctttacgagagggtctcacccaaatttatggggagaaatctatttctcaaaaaaaaaaatcttcttttacagaaatgttgagtaaggtgacattttgagcgctaataagcaaaagagcatgcagtgctgttgaataaccctcacttggagaaccaagagaatcctgtcgtttaatgctatattttaatttcacaagttgttcatttaactggtagaatgtcagtccaatctccaatgagaacatgagcaaatagacctttccaggttgaaagtgaaacatactgggtttctgtaagtttttcctcatggcttcatctctatctttactttctcttgaatatgctacacaaagttctttattactacatactaaagtttgcattccagggatattgactgtacatatttatgtatatgtaccatgttgttacatgtaaacaaacttcaatttgaagtgcagctattatgtggtatccatgtgtatcgaccatgtgccatatatcaattatggtcactagaaagtctctttatgatactttttattgtactgtttttcatttcacttgcaaaattttgcagaattcctcctttctacccataaattacatatatttttcttctttagtcatggagaactccccccctcatctcttccctattatctttccctgtgtactggtattattaaaaagacattacatacgcaagtctttctcgacaatcaagaatgttattaatgtgtaatactgagcactttacttcttaataaaaacttgatatagtagcaaaaaaaaaaaaaaaaaa

SEQ ID NO: 430 - DNA, 3004 bp, Homo Sapiens
  NM_000302
agtgcgtggcagcgggacctgcggccccgtcgcgaagtttccagccctgcgagcgccgccgggtcggccgatcgtcccccatacctcggccatgcggcccctgctgctactggccctgctgggctggctgctgctggccgaagcgaagggcgacgccaagccggaggacaaccttttagtcctcacggtggccactaaggagaccgagggattccgtcgcttcaagcgctcagctcagttcttcaactacaagatccaggcgcttggcctaggggaggactggaatgtggagaaggggacgtcggcaggtggagggcagaaggtccggctgctgaagaaagctctggagaagcacgcagacaaggaggatctggtcattctcttcgcagacagctatgacgtgctgtttgcatcggggccccgggagctcctgaagaagttccggcaggccaggagccaggtggtcttctctgctgaggagctcatctacccagaccgcaggctggagaccaagtatccggtggtgtccgatggcaagaggttcctgggctctggaggcttcatcggttatgcccccaacctcagcaaactggtggccgagtgggagggccaggacagcgacagcgatcagctgttttacaccaagatcttcttggacccggagaagagggagcagatcaatatcaccctggaccaccgctgccgtatcttccagaacctggatggagccttggatgaggtcgtgctcaagtttgaaatgggccatgtgagagcgaggaacctggcctatgacaccctcccggtcctgatccatggcaacgggccaaccaagctgcagttgaactacctgggcaactacatcccgcgcttctggaccttcgaaacaggctgcaccgtgtgtgacgaaggcttgcgcagcctcaagggcattggggatgaagctctgcccacggtcctggtcggcgtgttcatcgaacagcccacgccgtttgtgtccctgttcttccagcggctcctgcggctccactacccccagaaacacatgcgacttttcatccacaaccacgagcagcaccacaaggctcaggtggaagagttcctggcacagcatggcagcgagtaccagtctgtgaagctggtgggccctgaggtgcggatggcgaatgcagatgccaggaacatgggcgcagacctgtgccggcaggaccgcagctgcacctactacttcagcgtggatgctgacgtggccctgaccgagcccaacagcctgcggctgctgatccaacagaacaagaacgtcattgccccgctgatgacccggcatgggaggctgtggtcgaacttctggggggctctcagtgcagatggctactatgcccgttccgaggactacgtggacattgtgcaggggcggcgtgttggtgtctggaatgtgccctatatttcaaacatctacttgatcaagggcagtgccctgcggggtgagctgcagtcctcagatctcttccaccacagcaagctggaccccgacatggccttctgtgccaacatccggcagcaggatgtgttcatgttcctgaccaaccggcacacccttggccatctgctctccctagacagctaccgcaccacccacctgcacaacgacctctgggaggtgttcagcaaccccgaggactggaaggagaagtacatccaccagaactacaccaaagccctggcagggaagctggtggagacgccctgcccggatgtctattggttccccatcttcacggaggtggcctgtgatgagctggtggaggagatggagcactttggccagtggtctctgggcaacaacaaggacaaccgcatccagggtggctacgagaacgtgccgactattgacatccacatgaaccagatcggctttgagcgggagtggcacaaattcctgctggagtacattgcgcccatgacggagaagctctaccccggctactacaccagggcccagtttgacctggcctttgtcgtccgctacaagcctgatgagcagccctcactgatgccacaccatgatgcctccaccttcaccatcaacatcgccctgaaccgagtcggggtggattacgagggcgggggctgtcggttcctgcgctacaactgttccatccgagccccaaggaagggctggaccctcatgcaccctggacgactcacgcattaccatgaggggctccccaccaccaggggcacccgctacatcgcagtctccttcgtcgatccctaattggccaggcctgaccctcttggacctttcttctttgccgacaaccactgcccagcagcctctgggacctcggggtcccagggaacccagtccagcctcctggctgttgacttcccattgctcttggagccaccaatcaaagagattcaaagagattcctgcaggccagaggcggaacacacctttatggctggggctctccgtggtgttctggacccagcccctggagacaccattcacttttactgctttgtagtgactcgtgctctccaacctgtcttcctgaaaaaccaaggcccccttcccccacctcttccatggggtgagacttgagcagaacaggggcttccccaagttgcccagaaagactgtctgggtgagaagccatggccagagcttctcccaggcacaggtgttgcaccagggacttctgcttcaagttttggggtaaagacacctggatcagactccaagggctgccctgagtctgggacttctgcctccatggctggtcatgagagcaaaccgtagtcccctggagacagcgactccagagaacctcttgggagacagaagaggcatctgtgcacagctcgatcttctacttgcctgtggggaggggagtgacaggtccacacaccacactgggtcaccctgtcctggatgcctctgaagagagggacagaccgtcagaaactggagagtttctattaaaggtcatttaaacca

SEQ ID NO: 431 - DNA, 1669 bp, Homo Sapiens
  NM_000305
ggactcggcctaggcggaggacggggcggagcgcggccggcaccatcgagccgggaagatggcaccgcccacggagctgctggccaggccggagcgaggcagcgcgcccggctcccgcgccatggggcggctggtggctgtgggcttgctggggatcgcgctggcgctcctgggcgagaggcttctggcactcagaaatcgacttaaagcctccagagaagtagaatctgtagaccttccacactgccacctgattaaaggaattgaagctggctctgaagatattgacatacttcccaatggtctggctttttttagtgtgggtctaaaattcccaggactccacagctttgcaccagataagcctggaggaatactaatgatggatctaaaagaagaaaaaccaagggcacgggaattaagaatcagtcgtgggtttgatttggcctcattcaatccacatggcatcagcactttcatagacaacgatgacacagtttatctctttgttgtaaaccacccagaattcaagaatacagtggaaatttttaaatttgaagaagcagaaaattctctgttgcatctgaaaacagtcaaacatgagcttcttccaagtgtgaatgacatcacagctgttggaccggcacatttctatgccacaaatgaccactacttctctgatcctttcttaaagtatttagaaacatacttgaacttacactgggcaaatgttgtttactacagtccaaatgaagttaaagtggtagcagaaggatttgattcagcaaatgggatcaatatttcacctgatgataagtatatctatgttgctgacatattggctcatgaaattcatgttttggaaaaacacactaatatgaatttaactcagttgaaggtacttgagctggatacactggtggataatttatctattgatccttcctcgggggacatctgggtaggctgtcatcctaatggccagaagctcttcgtgtatgacccgaacaatcctccctcgtcagaggttctccgcatccagaacattctatctgagaagcctacagtgactacagtttatgccaacaatgggtctgttctccaaggaagttctgtagcctcagtgtatgatgggaagctgctcataggcactttataccacagagccttgtattgtgaactctaaattgtacttttggcatgaaagtgcgataacttaacaattaattttctatgaattgctaattctgagggaatttaaccagcaacattgacccagaaatgtatggcatgtgtagttaattttattccagtaaggaacggcccttttagttcttagagcacttttaacaaaaaaggaaaatgaacaggttctttaaaatgccaagcaagggacagaaaagaaagctgctttcgaataaagtgaatacattttgcacaaagtaagcctcacctttgccttccaactgccagaacatggattccactgaaatagagtgaattatatttccttaaaatgtgagtgacctcacttctggcactgtgactactatggctgtttagaactactgataacgtattttgatgttttgtacttacatctttgtttaccattaaaaagttggagttatattaaagactaactaaaatcccaaaaaaaaaaaaaaaa

SEQ ID NO: 432 - DNA, 2254 bp, Homo Sapiens
  NM_000308
agagtgcacccgaatccacgggctcggaggcagcagccatctctcggccatagggcaggccagctggcgccgggggctattttgggcggcgggcaatgatggtgaccgcaaggcgaccttgtaaggcatttcccccctgactcccttccccgagcctctgcccgggggtcctagcgccgctttctcagccatcccgcctacaacttagccgtccacaacaggatcatctgatcgcgtgcgcccgggctacgatctgcgaggcccgcggaccttgacccggcattgaccgccaccgccccccaggtccgtagggaccaaagaaggggcgggaggaagactgtcacgtggcgccggagttcacgtgactcgtacacatgacttccagtccccgggcgcctcctggagagcaaggacgcgggggagcagagatgatccgagccgcgccgccgccgctgttcctgctgctgctgctgctgctgctgctagtgtcctgggcgtcccgaggcgaggcagcccccgaccaggacgagatccagcgcctccccgggctggccaagcagccgtctttccgccagtactccggctacctcaaaggctccggctccaagcacctccactactggtttgtggagtcccagaaggatcccgagaacagccctgtggtgctttggctcaatgggggtcccggctgcagctcactagatgggctcctcacagagcatggccccttcctggtccagccagatggtgtcaccctggagtacaacccctattcttggaatctgattgccaatgtgttatacctggagtccccagctggggtgggcttctcctactccgatgacaagttttatgcaactaatgacactgaggtcgcccagagcaattttgaggcccttcaagatttcttccgcctctttccggagtacaagaacaacaaacttttcctgaccggggagagctatgctggcatctacatccccaccctggccgtgctggtcatgcaggatcccagcatgaaccttcaggggctggctgtgggcaatggactctcctcctatgagcagaatgacaactccctggtctactttgcctactaccatggccttctggggaacaggctttggtcttctctccagacccactgctgctctcaaaacaagtgtaacttctatgacaacaaagacctggaatgcgtgaccaatcttcaggaagtggcccgcatcgtgggcaactctggcctcaacatctacaatctctatgccccgtgtgctggaggggtgcccagccattttaggtatgagaaggacactgttgtggtccaggatttgggcaacatcttcactcgcctgccactcaagcggatgtggcatcaggcactgctgcgctcaggggataaagtgcgcatggaccccccctgcaccaacacaacagctgcttccacctacctcaacaacccgtacgtgcggaaggccctcaacatcccggagcagctgccacaatgggacatgtgcaactttctggtaaacttacagtaccgccgtctctaccgaagcatgaactcccagtatctgaagctgcttagctcacagaaataccagatcctattatataatggagatgtagacatggcctgcaatttcatgggggatgagtggtttgtggattccctcaaccagaagatggaggtgcagcgccggccctggttagtgaagtacggggacagcggggagcagattgccggcttcgtgaaggagttctcccacatcgcctttctcacgatcaagggcgccggccacatggttcccaccgacaagcccctcgctgccttcaccatgttctcccgcttcctgaacaagcagccatactgatgaccacagcaaccagctccacggcctgatgcagcccctcccagcctctcccgctaggagagtcctcttctaagcaaagtgcccctgcaggccgggttctgccgccaggactgcccccttcccagagccctgtacatcccagactgggcccagggtctcccatagacagcctgggggcaagttagcactttattcccgcagcagttcctgaatggggtggcctggccccttctctgcttaaagaatgccctttatgatgcactgattccatcccaggaacccaacagagctcaggacagcccacagggaggtggtggacggactgtaattgatagattgattatggaattaaattgggtacagcttcaaaaaaaaaaaaaaaa

SEQ ID NO: 433 - DNA, 3595 bp, Homo Sapiens
  NM_000313
tttggaaacgtcacactgtggaggaaaagcagcaactagggagctggtgaagaaggatgtctcagcagtgtttactaggcctccaacactagagcccatcccccagctccgaaaagcttcctggaaatgtccttgttatcacttcccctctcgggctgggcgctgggagcgggcggtctcctccgcccccggctgttccgccgaggctcgctgggtcgctggcgccgccgcgcagcacggctcagaccgaggcgcacaggctcgcagctccgcggcgcctagcgctccggtccccgccgcgacgcgccaccgtccctgccggcgcctccgcgcgcttcgaaatgagggtcctgggtgggcgctgcggggcgctgctggcgtgtctcctcctagtgcttcccgtctcagaggcaaactttttgtcaaagcaacaggcttcacaagtcctggttaggaagcgtcgtgcaaattctttacttgaagaaaccaaacagggtaatcttgaaagagaatgcatcgaagaactgtgcaataaagaagaagccagggaggtctttgaaaatgacccggaaacggattatttttatccaaaatacttagtttgtcttcgctcttttcaaactgggttattcactgctgcacgtcagtcaactaatgcttatcctgacctaagaagctgtgtcaatgccattccagaccagtgtagtcctctgccatgcaatgaagatggatatatgagctgcaaagatggaaaagcttcttttacttgcacttgtaaaccaggttggcaaggagaaaagtgtgaatttgacataaatgaatgcaaagatccctcaaatataaatggaggttgcagtcaaatttgtgataatacacctggaagttaccactgttcctgtaaaaatggttttgttatgctttcaaataagaaagattgtaaagatgtggatgaatgctctttgaagccaagcatttgtggcacagctgtgtgcaagaacatcccaggagattttgaatgtgaatgccccgaaggctacagatataatctcaaatcaaagtcttgtgaagatatagatgaatgctctgagaacatgtgtgctcagctttgtgtcaattaccctggaggttacacttgctattgtgatgggaagaaaggattcaaacttgcccaagatcagaagagttgtgaggttgtttcagtgtgccttcccttgaaccttgacacaaagtatgaattactttacttggcggagcagtttgcaggggttgttttatatttaaaatttcgtttgccagaaatcagcagattttcagcagaatttgatttccggacatatgattcagaaggcgtgatactgtacgcagaatctatcgatcactcagcgtggctcctgattgcacttcgtggtggaaagattgaagttcagcttaagaatgaacatacatccaaaatcacaactggaggtgatgttattaataatggtctatggaatatggtgtctgtggaagaattagaacatagtattagcattaaaatagctaaagaagctgtgatggatataaataaacctggacccctttttaagccggaaaatggattgctggaaaccaaagtatactttgcaggattccctcggaaagtggaaagtgaactcattaaaccgattaaccctcgtctagatggatgtatacgaagctggaatttgatgaagcaaggagcttctggaataaaggaaattattcaagaaaaacaaaataagcattgcctggttactgtggagaagggctcctactatcctggttctggaattgctcaatttcacatagattataataatgtatccagtgctgagggttggcatgtaaatgtgaccttgaatattcgtccatccacgggcactggtgttatgcttgccttggtttctggtaacaacacagtgccctttgctgtgtccttggtggactccacctctgaaaaatcacaggatattctgttatctgttgaaaatactgtaatatatcggatacaggccctaagtctatgttccgatcaacaatctcatctggaatttagagtcaacagaaacaatctggagttgtcgacaccacttaaaatagaaaccatctcccatgaagaccttcaaagacaacttgccgtcttggacaaagcaatgaaagcaaaagtggccacatacctgggtggccttccagatgttccattcagtgccacaccagtgaatgccttttataatggctgcatggaagtgaatattaatggtgtacagttggatctggatgaagccatttctaaacataatgatattagagctcactcatgtccatcagtttggaaaaagacaaagaattcttaaggcatcttttctctgcttataataccttttccttgtgtgtaattatacttatgtttcaataacagctgaagggttttatttacaatgtgcagtctttgattattttgtggtcctttcctgggatttttaaaaggtcctttgtcaaggaaaaaaattctgttgtgatataaatcacagtaaagaaattcttacttctcttgctatctaagaatagtgaaaaataacaattttaaatttgaatttttttcctacaaatgacagtttcaatttttgtttgtaaaactaaattttaattttatcatcatgaactagtgtctaaatacctatgtttttttcagaaagcaaggaagtaaactcaaacaaaagtgcgtgtaattaaatactattaatcataggcagatactattttgtttatgtttttgtttttttcctgatgaaggcagaagagatggtggtctattaaatatgaattgaatggagggtcctaatgccttatttcaaaacaattcctcagggggaacagctttggcttcatctttctcttgtgtggcttcacatttaaaccagtatctttattgaattagaaaacaagtgggacatattttcctgagagcagcacaggaatcttcttcttggcagctgcagtctgtcaggatgagatatcagattaggttggataggtggggaaatctgaagtgggtacattttttaaattttgctgtgtgggtcacacaaggtctacattacaaaagacagaattcagggatggaaaggagaatgaacaaatgtgggagttcatagttttccttgaatccaacttttaattaccagagtaagttgccaaaatgtgattgttgaagtacaaaaggaactatgaaaaccagaacaaattttaacaaaaggacaaccacagagggatatagtgaatatcgtatcattgtaatcaaagaagtaaggaggtaagattgccacgtgcctgctggtactgtgatgcatttcaagtggcagttttatcacgtttgaatctaccattcatagccagatgtgtatcagatgtttcactgacagtttttaacaataaattcttttcactgtattttatatcacttataataaatcggtgtataattttaaaatgcatgtgaatatctttattatatcaactgtttgaataaaacaaaattacataatagacatttaactcttcaaaaaaaaaaaaaaaa

SEQ ID NO: 434 - DNA, 5572 bp, Homo Sapiens
  NM_000314
cctcccctcgcccggcgcggtcccgtccgcctctcgctcgcctcccgcctcccctcggtcttccgaggcgcccgggctcccggcgcggcggcggagggggcgggcaggccggcgggcggtgatgtggcgggactctttatgcgctgcggcaggatacgcgctcggcgctgggacgcgactgcgctcagttctctcctctcggaagctgcagccatgatggaagtttgagagttgagccgctgtgaggcgaggccgggctcaggcgagggagatgagagacggcggcggccgcggcccggagcccctctcagcgcctgtgagcagccgcgggggcagcgccctcggggagccggccggcctgcggcggcggcagcggcggcgtttctcgcctcctcttcgtcttttctaaccgtgcagcctcttcctcggcttctcctgaaagggaaggtggaagccgtgggctcgggcgggagccggctgaggcgcggcggcggcggcggcacctcccgctcctggagcgggggggagaagcggcggcggcggcggccgcggcggctgcagctccagggagggggtctgagtcgcctgtcaccatttccagggctgggaacgccggagagttggtctctccccttctactgcctccaacacggcggcggcggcggcggcacatccagggacccgggccggttttaaacctcccgtccgccgccgccgcaccccccgtggcccgggctccggaggccgccggcggaggcagccgttcggaggattattcgtcttctccccattccgctgccgccgctgccaggcctctggctgctgaggagaagcaggcccagtcgctgcaaccatccagcagccgccgcagcagccattacccggctgcggtccagagccaagcggcggcagagcgaggggcatcagctaccgccaagtccagagccatttccatcctgcagaagaagccccgccaccagcagcttctgccatctctctcctcctttttcttcagccacaggctcccagacatgacagccatcatcaaagagatcgttagcagaaacaaaaggagatatcaagaggatggattcgacttagacttgacctatatttatccaaacattattgctatgggatttcctgcagaaagacttgaaggcgtatacaggaacaatattgatgatgtagtaaggtttttggattcaaagcataaaaaccattacaagatatacaatctttgtgctgaaagacattatgacaccgccaaatttaattgcagagttgcacaatatccttttgaagaccataacccaccacagctagaacttatcaaacccttttgtgaagatcttgaccaatggctaagtgaagatgacaatcatgttgcagcaattcactgtaaagctggaaagggacgaactggtgtaatgatatgtgcatatttattacatcggggcaaatttttaaaggcacaagaggccctagatttctatggggaagtaaggaccagagacaaaaagggagtaactattcccagtcagaggcgctatgtgtattattatagctacctgttaaagaatcatctggattatagaccagtggcactgttgtttcacaagatgatgtttgaaactattccaatgttcagtggcggaacttgcaatcctcagtttgtggtctgccagctaaaggtgaagatatattcctccaattcaggacccacacgacgggaagacaagttcatgtactttgagttccctcagccgttacctgtgtgtggtgatatcaaagtagagttcttccacaaacagaacaagatgctaaaaaaggacaaaatgtttcacttttgggtaaatacattcttcataccaggaccagaggaaacctcagaaaaagtagaaaatggaagtctatgtgatcaagaaatcgatagcatttgcagtatagagcgtgcagataatgacaaggaatatctagtacttactttaacaaaaaatgatcttgacaaagcaaataaagacaaagccaaccgatacttttctccaaattttaaggtgaagctgtacttcacaaaaacagtagaggagccgtcaaatccagaggctagcagttcaacttctgtaacaccagatgttagtgacaatgaacctgatcattatagatattctgacaccactgactctgatccagagaatgaaccttttgatgaagatcagcatacacaaattacaaaagtctgaatttttttttatcaagagggataaaacaccatgaaaataaacttgaataaactgaaaatggacctttttttttttaatggcaataggacattgtgtcagattaccagttataggaacaattctcttttcctgaccaatcttgttttaccctatacatccacagggttttgacacttgttgtccagttgaaaaaaggttgtgtagctgtgtcatgtatatacctttttgtgtcaaaaggacatttaaaattcaattaggattaataaagatggcactttcccgttttattccagttttataaaaagtggagacagactgatgtgtatacgtaggaattttttccttttgtgttctgtcaccaactgaagtggctaaagagctttgtgatatactggttcacatcctacccctttgcacttgtggcaacagataagtttgcagttggctaagagaggtttccgaagggttttgctacattctaatgcatgtattcgggttaggggaatggagggaatgctcagaaaggaaataattttatgctggactctggaccatataccatctccagctatttacacacacctttctttagcatgctacagttattaatctggacattcgaggaattggccgctgtcactgcttgttgtttgcgcatttttttttaaagcatattggtgctagaaaaggcagctaaaggaagtgaatctgtattggggtacaggaatgaaccttctgcaacatcttaagatccacaaatgaagggatataaaaataatgtcataggtaagaaacacagcaacaatgacttaaccatataaatgtggaggctatcaacaaagaatgggcttgaaacattataaaaattgacaatgatttattaaatatgttttctcaattgtaacgacttctccatctcctgtgtaatcaaggccagtgctaaaattcagatgctgttagtacctacatcagtcaacaacttacacttattttactagttttcaatcataatacctgctgtggatgcttcatgtgctgcctgcaagcttcttttttctcattaaatataaaatattttgtaatgctgcacagaaattttcaatttgagattctacagtaagcgttttttttctttgaagatttatgatgcacttattcaatagctgtcagccgttccacccttttgaccttacacattctattacaatgaattttgcagttttgcacattttttaaatgtcattaactgttagggaattttacttgaatactgaatacatataatgtttatattaaaaaggacatttgtgttaaaaaggaaattagagttgcagtaaactttcaatgctgcacacaaaaaaaagacatttgatttttcagtagaaattgtcctacatgtgctttattgatttgctattgaaagaatagggtttttttttttttttttttttttttttttaaatgtgcagtgttgaatcatttcttcatagtgctcccccgagttgggactagggcttcaatttcacttcttaaaaaaaatcatcatatatttgatatgcccagactgcatacgattttaagcggagtacaactactattgtaaagctaatgtgaagatattattaaaaaggtttttttttccagaaatttggtgtcttcaaattataccttcaccttgacatttgaatatccagccattttgtttcttaatggtataaaattccattttcaataacttattggtgctgaaattgttcactagctgtggtctgacctagttaatttacaaatacagattgaataggacctactagagcagcatttatagagtttgatggcaaatagattaggcagaacttcatctaaaatattcttagtaaataatgttgacacgttttccataccttgtcagtttcattcaacaatttttaaatttttaacaaagctcttaggatttacacatttatatttaaacattgatatatagagtattgattgattgctcataagttaaattggtaaagttagagacaactattctaacacctcaccattgaaatttatatgccaccttgtctttcataaaagctgaaaattgttacctaaaatgaaaatcaacttcatgttttgaagatagttataaatattgttctttgttacaatttcgggcaccgcatattaaaacgtaactttattgttccaatatgtaacatggagggccaggtcataaataatgacattataatgggcttttgcactgttattatttttcctttggaatgtgaaggtctgaatgagggttttgattttgaatgtttcaatgtttttgagaagccttgcttacattttatggtgtagtcattggaaatggaaaaatggcattatatatattatatatataaatatatattatacatactctccttactttatttcagttaccatccccatagaatttgacaagaattgctatgactgaaaggttttcgagtcctaattaaaactttatttatggcagtattcataattagcctgaaatgcattctgtaggtaatctctgagtttctggaatattttcttagactttttggatgtgcagcagcttacatgtctgaagttacttgaaggcatcacttttaagaaagcttacagttgggccctgtaccatcccaagtcctttgtagctcctcttgaacatgtttgccatacttttaaaagggtagttgaataaatagcatcaccattctttgctgtggcacaggttataaacttaagtggagtttaccggcagcatcaaatgtttcagctttaaaaaataaaagtagggtacaagtttaatgtttagttctagaaattttgtgcaatatgttcataacgatggctgtggttgccacaaagtgcctcgtttacctttaaatactgttaatgtgtcatgcatgcagatggaaggggtggaactgtgcactaaagtgggggctttaactgtagtatttggcagagttgccttctacctgccagttcaaaagttcaacctgttttcatatagaatatatatactaaaaaatttcagtctgttaaacagccttactctgattcagcctcttcagatactcttgtgctgtgcagcagtggctctgtgtgtaaatgctatgcactgaggatacacaaaaataccaatatgatgtgtacaggataatgcctcatcccaatcagatgtccatttgttattgtgtttgttaacaaccctttatctcttagtgttataaactccacttaaaactgattaaagtctcattcttgtcaaaaaaaaaaaaaaaaaaaaaaaaaaa

SEQ ID NO: 435 - DNA, 4392 bp, Homo Sapiens
  NM_000318
aaccggccaatcaccgcgcgcgggtgtccgcttcggcttttcggcccttcggctcttcggcttgtcggcgttcgcggttgtttggccatccagtgccttccgcagcgccgctaaagcgcagttctcgttggtgtaactttttcttttttttttcagccacttccggctcctgcgtcgctccggaagcctgcgagttccggaagccttggtaatccagattcggctaggaaaagacaagctttccagagaatgtttcagagaaagttacgtggagcgtgggcgtttcgcagactcctaagtggtctggaacctaacctgcagtgtctctgagcttctggcaagtatgaggcaaggatttcacagaagaacttggagcaaaaattcccactgtcatagctataggctgtccagtcttgagggagctgcaggaacaggaaaaagagaccttcagagaagacatggcttccagaaaagagaatgcgaagagtgcaaacagagtgctaagaataagccagttggatgcacttgaactaaacaaggccctggagcagctagtttggtcccagtttactcagtgctttcatggatttaaacctgggctgttagctcgctttgagccagaggtgaaagcgtgcttatgggttttcttgtggagattcaccatctactccaaaaatgccacagtgggacagtcagttttgaatattaagtacaaaaatgatttttcccctaacctgagatatcagccacccagtaaaaatcaaaaaatctggtatgctgtttgtacaattggtggcaggtggttagaagaacgatgctatgatttgtttcgaaaccatcatttagcatcatttgggaaagtcaagcagtgtgtgaattttgtgattggacttttgaaattaggtgggctgattaattttttgattttccttcagaggggaaagtttgcaactttgacagaacgtctcctaggtattcattctgtattttgcaagcctcaaaacatacgtgaagttggctttgaatacatgaatagggaacttctctggcatggttttgctgaatttctgatttttctcttaccacttatcaatgtccagaagttgaaagccaagctgtcttcatggtgtattcctcttactggtgcacctaatagtgacaatacattagccaccagtggcaaagaatgcgctctatgtggagagtggcccaccatgcctcacaccataggatgtgagcatattttctgttatttctgtgctaagagtagtttcttatttgacgtgtactttacttgtcctaagtgtggcacagaagtacacagtctgcagccactgaaatcaggaatcgagatgtcagaagtaaatgctctttagaaactaaaattgcttcctttgaggaaaaaaatgcaccgtgtttaaattcttaatattagtcatcctaagtataccatttatgtatcctttataaggaatgtgctcctagccactgtcttctcctttccaggcatgactgaaatctaatcactggaaaccatgtgattctaaatatattatgtaaatgttaatgtattatgttttttaaatcattgcattcaatttttaatgtcaagaataatggacagcttttgtcaggtgactactaacaatgctccttcattttactacttcttaaaacaaggttggattctaaagataaagattttggagactctgggatgagtgtgcatttattttcagagttgacataatatgataatgtgacaattatgagactgttttaaaccttaagacctgatgcctcagttgtaacttttttttttttttctgagacggtgtcctgctctgtcacccaggctggagtgcagtggcgcgatctctgctcactgcaacgtccgcctcccgggttcaagcaattctcctgcctcagcctcccgagtagctggcactgcaggtgcatgccaccatgcccgggtaatttttgtatttttagtagagatggggttcactgtgttagccaggatggtctctatctcctgatctggtgatccacctgcgtcagcctcccaaagtgctgagattacagacgtgagccactgtgcttggccgcctcagttgtaatgttatgcttttctctgaagccaatttttaagaagttcagtcctcagctgtctgacccctccacagttggctttatattcagaaagtaaaaattacttaaggcagcttggaagtgaggcctgggaactactgggggcaactagtatgaacagcactatttacaggtctctttctcttgcctttgattcagagctgtcattctcagtaaatattgatagttttattgaaacaaaaggggtctttagcatgggaatagtaacagcagtgcataatcaagataattctgtatccttcactctttttctctgcctttttttacttaaaagtaaattcagactcttaaaatggtatagaattattagcttgaacattgaattatctcgtcttaactagaatgttttttaaaaaacagtttttaaatgtttttaaataaacatcttgctagtatgatggaaatacactgccagttcatttttctcttcacctttcattgaacaagtactcaggtgccaggtactgatgtagccattagaggcacaacagtatattaagcaggaaaaatcaagttaccttcatggagtttacattctgtgattgaatgaactgtaagtttaatttaggttcaatttagtgtaagatactgaagaagttttgtagtttgagttaagagtattttacatcttaagaatttgccttcttttgccttctgtaattttaaaacattattgtagaaaacaccaacaattcaggaaaaaatataaaatcaactttcccacaattttttgagagagatcatcactatattttactatatttgtagatttgttgcacgtacatttcttatttacaaaattattataatgcataaaaaatagcattttttcctatgtataaatattcttcaaaactattttagggctgagcacaatggctcatgcctgtaatcccaggctccctacttagggaggctgagcccaggagtttgagttcgtttctaaaaaaataaaaatatatacaaacgtctttgttttttgtttgtttgtttgtttttggtgagaaagggcctcacccagtcacccaggttggagtgcagtggtgtgatcatggctaaccgcagcctttccctcccagggctcaagcgatcctcccatctgagcctcccaagttgctgggaccacaggcccataccaccatgcctggctaatttttgtagagatgaggtctcactttgttgcccaggctggtcttgaacttctgggctcaagcagtcctcctaccctggcctcccaaagttgtgggattacaggcatgagccactgcacccagccataatatatttttaaaatgctatgtatatgccatcatattcctattcctattattatttaaccaccatcatagagcatttaggttcttttcactttctgttgtgaataatgcaatgttgaatctgagttcattaagtgaagagtccagctgcacactgcaggcccagtctggatgtaggtgctcagatggttctctttgagacaggctttatcctttggctctcatttttttgatgagtgtacatggcatgagggacacagattccgctagaattcaaatcccacttgtgtataacctagggcaatgtgccacatctctgcacatctgttcattgtaaggattacatgtttagtgtatataaagctcttaaaacaatgcctgacacatagtaaatagaatataatagtagtgctttcctttgctgttgtcagtattactctgagtcggtttcattctcacacagaatgatggccgctagaagctcaaggcttataatctgctagctttctgatcccactggcatgagatactcttgcctaatagttacagctaaagtccaggagctcactgttactggtctgccttggattatgtgcacattcctgaaccagccactatagctaggggatggaaaatactgttcctggttacttaaatgtaggtgatgctcctcccatataccacatgaacctaaaggagtcctggaggaggccgttcaccacaggaaactgaggtgttcttagaagggtggatgctggcagatctctactagttagagtctacatttgccttactcatttcaaaagtccacattgcagtctcattttaccagtgatctagcttgataaggacattcataagtaactggatgattctttaacattgcagatttgaaaggattaaataaagtcaacaaaattgttatatcaaaaaaaaaaaaaaa

SEQ ID NO: 436 - DNA, 3190 bp, Homo Sapiens
  NM_000319
agagctggcggtcaccatggcaatgcgggagctggtggaggccgaatgcgggggtgccaacccgctcatgaagctcgccgggcacttcacccaggacaaggcccttcggcaggagggattgaggcctggcccctggccccccggagccccggcctctgaggcagcctccaagcctttgggagtagcttctgaagatgagttggtggctgaattcctgcaggaccagaatgcaccccttgtgtcccgtgcccctcagaccttcaagatggatgacctcctggctgagatgcagcagattgagcagtcaaacttccgccaggctccccagagagcccctggtgtggcagacttggccttgtctgagaactgggcccaggagtttcttgcagctggagatgctgtggatgtaactcaggattataatgagactgactggtcccaagaattcatctctgaagttacagaccccttgtctgtgtcccctgcccgctgggctgaggaatatttggagcaatcagaggagaagctgtggctgggagaacctgagggaacagccaccgatcgctggtatgatgaatatcatcctgaggaggatctgcagcacacggccagtgactttgtggccaaagtggatgaccccaaattggctaattctgagttcctgaaattcgtgcggcagattggcgaagggcaggtgtccctggagtccggtgcagggtcgggccgagctcaggcagaacagtgggcagcagagtttatacagcagcagggtacatcagatgcctgggttgaccagttcacaagaccagtaaacacatctgcccttgatatggagtttgaacgagccaagtcagctatagagttgcaggcagagttggaggagatggcaaaacgggatgctgaggcccacccctggctttctgactatgatgaccttacgtcagctacctatgataaggggtaccagtttgaggaggagaaccccttgcgtgatcaccctcagccttttgaagaagggctgcggcgccttcaggagggggacctgccaaatgctgtgctgctttttgaggcagctgtgcagcaggatcctaagcacatggaagcttggcagtatctgggtaccacccaggcagagaatgaacaagaactattagccatcagtgcattgcggaggtgtctggagctaaagccagataaccagacagcactgatggcgctggctgtgagcttcaccaacgagtccctgcagcgacaggcctgtgaaaccctacgagactggctgcggtacacaccagcctatgcccatctggtgacacctgctgaagaaggggctggtggggcaggactgggccccagcaagcgtatcctgggatctctcttgtctgactccctgtttcttgaagtgaaagagctcttcctggcagctgtgcggctggaccctacctccattgaccctgatgtgcagtgtggcttgggagtccttttcaacctgagtggggagtatgacaaggccgtggactgcttcacagctgccctcagcgttcgtcccaatgactatttgctgtggaataagctaggcgccaccctggccaatggaaaccagagtgaagaagcagtagctgcgtaccgccgggccctcgagctccagcctggctatatccggtcccgctataacctgggcatcagctgcatcaacctcggggctcaccgggaggctgtggagcactttctggaggccctgaacatgcagaggaaaagccggggcccccggggtgaaggaggtgccatgtcggagaacatctggagcaccctgcgtttggcattgtctatgttaggccagagcgatgcctatggggcagccgacgcgcgggatctgtccaccctcctaactatgtttggcctgccccagtgacagtgggacgggctgccctgtgagtgtccacctggagggatccccgctttggatgtgattccctctccccaaatgggcctaccaagggggcgggctgatgaccataagcggtacggcctttcaggagctgcctcaacgtaggggtgggtagtctgtgttctagttcctacataattgtaggaaaatgagctgtgtcatctctgagtcccttggtaattcaagggctgtacatccagctacagatctctctgctcatcatgccctttcttggtgctgctttttgggtaggaccccacgatttagggtaactgttatcatcagctgccatttctgatagggtctaccacatctgtaatgtctgtcctttcccccacttttactgggaattgatagtccagcttccttgggcagtgtaagtaggaggttcatctgctgtgcgcctctaatgtctgtctggatgggatgtgttaggagttggcctgttgggttgaattgttgatttggctgagcagagctgagttttggtaggagtgctcatggttctgtcattcttggacctctcctggctgagctctgattccctgtgagcacgatgctgatgcaatagtcctgtgtcatcactgcagcggtcctcaggagctgccagggccaattgctacagagtgtctgggtgtgtggcataggaggaaggtttgcttgtgaaatgaggctgggtgggagcggggagggactagatcagaagagatcaagggctctattcaggaacgttggtgggaggacagagcaagtgggaagggggtatggtgagtgcggcaatccctcatcctcttagaagcacctgtgaatgggaattgagccaactgttatagaaaattggttcagaaagtgcaatcttgccagatttctagcaaataggttcagtgttaccataagcctttgctgtacttcttgaaatgtttctaggggagagcattggaaaatccccttcccccatctagatcgaaggaagatgagggagcagcttggattcttctcagttgtcccctgcatggggagatacactaacccccagaaatgactgctaagcctcttgccttgtctttagtagctaatgatcagagagattttttttttaaactaccatggtcccaggattccatcctgaaatttatttttctttgtatgaatatgtgtaaatgatttaaaaataaaactgtaaaatatttgtacgaagaataaatggaactgatgtgggtatgaaaaaaaaaaaaaaaaaaa

SEQ ID NO: 437 - DNA, 1660 bp, Homo Sapiens
  NM_000320
acagtccctccgggtggcggggcgccccgagcgtggcagcgcgctaggcggcagcagcgggcgcggagcggggcgcggccgccgcgcgttccctcttggcggggttggccggccggggcggggcgcggcgctccggctcgaggcattcggagctgcgggagccgggctggcaggagcaggatggcggcggcggcggctgcaggcgaggcgcgccgggtgctggtgtacggcggcaggggcgctctgggttctcgatgcgtgcaggcttttcgggcccgcaactggtgggttgccagcgttgatgtggtggagaatgaagaggccagcgctagcatcattgttaaaatgacagactcgttcactgagcaggctgaccaggtgactgctgaggttggaaagctcttgggtgaagagaaggtggatgcaattctttgcgttgctggaggatgggccgggggcaatgccaaatccaagtctctctttaagaactgtgacctgatgtggaagcagagcatatggacatcgaccatctccagccatctggctaccaagcatctcaaggaaggaggcctcctgaccttggctggcgcaaaggctgccctggatgggactcctggtatgatcgggtacggcatggccaagggtgctgttcaccagctctgccagagcctggctgggaagaacagcggcatgccgcccggggcagccgccatcgctgtgctcccggttaccctggataccccgatgaacaggaaatcaatgcctgaggctgacttcagctcctggacacccttagaattcctagttgaaactttccatgactggatcacagggaaaaaccgaccgagctcaggaagcctaatccaggtggtaaccacagaaggaaggacggaactcaccccagcatatttttaggcctcatctcagtgcctatgaggggcctgccagaaaagtcactaacctgtctcagtgtggccttgtccagccttgtgttttctgtaacccctgtttgtggtacgagataatgagtcctatttttctctcacataatatgcatttgctctcctaggacagtgtaatacatttatgtgaagtaaagacatgcgagactggtggcctgcaaatagcatccgttgatctgtgttaactgcatagggagggctctgcatagcacctgctatagcggtgtcatgttggatcgcttttgtgactgttcatctgtccttgacagtggctgtcatcttgactactttgttgatttgttggtattggggacattttaaaggctgagttatttttgaatgtcatgtttatgtcatagacgtagttttcgcatccttgaattaaactgccttaactccttttgtggtataagcaaaactacatggactctgtcctggtatccttttcctgtgtggttgccccgtgtcctctggcctagggttaagtgtgcaagataactactcgtgagtattcagaatgttgttcctaataaatgcacttgttgtctgtcttctttaatcaaatcacatcttatatacagcagtcagagatgagtatactagaatcatggattgctggaggtcttttaatctgatgttctcagaagggggtggatttaaatcctgaaataaatatttcaacacaagaacaaaaaaaa

SEQ ID NO: 438 - DNA, 1953 bp, Homo Sapiens
  NM_000324
gttcttatcaacatctcacagcctgtgaagctctcagtgtgcctctgtcctttgccacaaacatgaggttcacattccctctcatggctatagtcctggaaattgccatgattgttttatttggattatttgttgagtatgaaacggaccagactgttctcgagcagctcaacatcaccaagccaacagacatgggcatattctttgagttatatcctctgttccaagatgtacatgttatgatatttgttgggtttggcttcctcatgaccttcctgaagaaatatggcttcagcagtgtgggtatcaacctactcgttgctgctttgggcctccagtggggcactattgtacagggaatcctgcaaagccagggacagaaatttaacattggaatcaaaaacatgataaatgcagacttcagtgcagccacagttctgatatcttttggagctgtcctgggaaaaacgagccccacccaaatgctgatcatgacaattttagaaattgttttctttgcccacaatgaatacctggttagtgaaatatttaaggcctctgacattggagcatcaatgacgatccatgcctttggggcctactttggcttggctgtagcaggcatcttgtatcgatctggactgagaaaggggcatgaaaatgaagagtccgcatactactcagacttgtttgcaatgattgggactctctttctgtggatgttttggcccagctttaactcggccattgctgaacctggagacaaacagtgcagggccattgtaaacacgtacttctctctcgctgcctgtgtgctcacagcctttgccttctccagcctagtggagcaccgaggcaagctcaacatggttcacattcagaatgccacccttgctggaggagttgctgtgggcacttgtgcggatatggcaattcacccatttggttctatgattattgggagcattgcaggaatggtctctgtgcttggatacaagttcctgactccactttttactactaaactgaggatccatgatacatgtggggtccataacctccacggcttacctggtgtagtgggaggccttgcaggcattgtggcagtagcaatgggcgcctccaacacgtctatggccatgcaggcagctgcactgggttcctctatcggaacagcagttgttggaggtctgatgacaggtttaattctaaagttgcctctctggggacagccatctgaccagaactgctatgatgattctgtttattggaaggtccctaagacgagataacttgacaatcagttccatggacatggtgaccacagccagctggaacctgaagtctaaacaccattcctgctctccagcttcctttcccattatccagaatcaagtccaaataaacaaaaagggagtaaccaaagagagtatggaccagagtgaatagatcctaagtcccaaatggccagtgtaaaaatgtccttatgtctgatgctgtctcttgctcttcaatgattaattgaggggatgttactcataaaacagataatcaaatagatcttctccaggattcccaaaaagcttttggcagtgagtaaatacagagtaaacatgtcagtttcttaatgtagacactatgtcttcaatcccaaaaattataaaactgaaacccatgaagcaagaatagatgtgagaaatctatgtaaaaaaataattaaagaaatgcatgtgtgtaaagtagtaatatgatgattttaggtagtgctttttattttaaaaatagtctagttagtaatgttgtatccttgcatgaatattattcttaattccttttgcatgttgactatttgcaacgagctcaaatgctatctgatcaaagtctattttgcataaaatgtccaataattaaatattgttataaaataaaaaaaaaaaaaaaaaaaaaaaaaaa

SEQ ID NO: 439 - DNA, 1894 bp, Homo Sapiens
  NM_000327
acaaacaggcgccggacgcggagccgccaggaagcgcgggagggggggcgggcccgagggggggccgggccgcttggtaacccctccctgtccgggcctcgccgctcagtacgggggcggggctagccggctgaccccctggcctactcccggcctccggctccaggcccttcccggatccccgcccccggattcccaggggacggggaagggagcgcccgccccgatatctccgccccccagcccctaacccctcagggttgagcggaccaaccccaccacttccgcgaggggcaggggcggggtcacaaaacgggccctcggcctaggggcggagtttctcgtaaggggcaaggccaaggcatcttgtattggggctgacaggggggcgggttattagggctgaggatgggaggatgctcagggtattggggtcagggtggcattagcccagctcaagccgggccgggctgactcagcatcctgccccagccagcttccatccctgacacctctgcactcccttgggcagagatgggagatggcgccggtgttgcccctggtgctgcccctgcagccccgcatccgcctggcacaagggctctggctcctctcctggctgctggcgctggctggtggcgtcatcctcctctgtagtgggcacctcctggtccagctaaggcaccttggcaccttcctggctccctcctgtcagttccctgtcctgccccaggctgccctggcagcgggcgcggtggctctgggcacaggactagtgggtgtaggagccagccgggcaagtctgaatgcagctctataccctccctggcgaggggtcctgggcccgctgctggtggctggcacggctggtgggggggggctcctggtcgtcgccctcgggctagccctggctttgcctgggagtctggatgaggcgctggaggagggcctggtgactgccttggctcactacaaggacacagaggtgcctgggcactgtcaggccaaaaggctggtggatgagctgcaactgaggtaccactgctgcgggcgccacgggtacaaggattggtttggggtccagtgggtcagcagccgttacctggatcccggtgaccgggatgtggctgaccggatccagagcaatgtagaaggcctatacctgactgatggggtccctttctcctgttgcaacccccactcaccccggccttgcctgcaaaaccgtctttcagactcctacgcccaccccctgttcgatccccgacaacccaaccaaaacctctgggcccaagggtgccatgaggtgctgctggagcacttgcaggacttggcaggcacactgggtagcatgctggctgtcaccttcctactgcaggctctggtgctccttggcctgcggtacctgcaaacagcactggaggggcttggaggggtcattgatgcgggaggagagacccagggctatctctttcccagtgggctgaaagatatgctgaaaacagcatggctacagggaggggttgcctgcaggccagcacctgaggaggccccaccaggagaagcacctcccaaggaggatctatctgaggcctagaggcctggagcttggggtgaggaagagggagggatggacaagtctgaaaacctcacaactccttaccaaggctccaggttggggggatcgtaggattagaggggctaaggatagtcagcgagctggactggggtaagaaagaaaaccagatgtcctagggcctagcccttgtagtcagaaccaccagggaacagcaaagaacagagtgatgggaaagtgacatgagaaggcctggaggctgattctgatatagactcaataaagtttttggatggaagcaaaaaaaaaaaaaaaaaa

SEQ ID NO: 440 - DNA, 6733 bp, Homo Sapiens
  NM_000347
cagggatccttccatgaagactgaggcaggcggagctgctaagagcctgctgacatgacatcggccacagagtttgaaaatgtgggcaaccagccaccttacagcaggatcaatgcccgctgggacgccccagacgacgagctggataatgacaacagctcagccaggctctttgagaggtcccggataaaggccttggcagatgagcgggaagttgttcagaaaaagaccttcacgaaatgggtgaactcgcacctggctcgagtgtcctgccgcatcaccgatctctacaaggacctgcgggatgggcgcatgctcatcaagctgctggaggtgctctctggagagatgctgccaaagcccaccaaggggaagatgcgcatccactgcctggagaatgtggacaaggctctccagttcctcaaggagcagcgtgtacacctggagaacatgggctcccacgacattgtagatggcaaccaccgcctggtcctgggcctcatctggaccatcatcctccgcttccagattcaggacattgtggtccaaactcaggaaggtcgtgaaacacgctcagccaaggatgcgttgctgttgtggtgtcagatgaagacggcaggctaccctcatgttaatgtcaccaactttacctccagctggaaggatggcttggcctttaatgccctgatacacaagcaccggcccgacctgatcgactttgataagctgaaggactccaatgcccggcacaacctggagcacgcattcaatgtggctgagcgccagctgggcatcatcccgctcctcgaccccgaagatgtctttacggaaaaccctgatgagaaatccatcatcacctatgtggtggccttttaccactacttctccaagatgaaggtgctggcagtggagggcaagcgtgtcggcaaggttattgaccatgccattgagactgagaagatgattgaaaagtacagcgggctagcctcggacctgctcacctggatcgagcagaccatcactgtcctgaacagccgcaagtttgccaactcgctgacgggcgtccagcagcagctgcaggccttcagcacctaccgcaccgtggagaagccgcccaagtttcaagagaaggggaatctggaagttctactttttaccatccagtcccggatgagagccaacaatcagaaagtgtacacaccccacgatgggaaactagtgtctgacatcaacagggcctgggaaagcctggaggaagctgagtatcggcgggagctggccctgagaaatgagctcattcggcaggagaagctagagcaactggcccggcgctttgaccggaaggccgcaatgagagagacctggctcagtgaaaaccagcgcctcgtggcccaggataactttgggtatgacctggcagctgtggaggccgccaagaagaagcatgaggccatcgagaccgacacggctgcctacgaggagcgggtgagagccctggaggacctggctcaggagctggagaaagagaactaccatgaccagaagcgcatcacggcccgcaaggacaatatactgcgcctatggagctacctgcaggagctgctgcagtcccggcgccagaggctcgagaccaccctggcactgcagaagctcttccaggacatgctgcacagcatcgactggatggatgagatcaaggctcacctcttgtctgccgagtttgggaagcacttgttggaggttgaagacctgctacagaagcacaagttgatggaagctgacatcgccatccaaggggacaaagtgaaggccatcaccgcagccaccctgaagttcaccgaggggaaagggtaccagccttgtgacccccaggtcatccaggaccgcatcagccacttggagcagtgctttgaggagctgagcaacatggcagctgggcggaaggcccaactggagcagtccaaacgactctggaagttcttctgggagatggatgaggctgagagctggatcaaggagaaggagcagatctattcttccctggactatggcaaagacctgaccagtgtgctcatcttacagcgcaagcacaaggcctttgaggatgagctccgtgggctggatgctcacctggagcagatcttccaggaggctcatggcatggttgcgcgcaagcagtttgggcacccgcagatcgaggcccgcataaaggaggtgtcggcacagtgggaccagctgaaggacctggctgccttctgcaagaagaacctccaggatgctgagaactttttccagttccagggcgatgcggatgacctgaaggcttggctgcaagacgcccaccggctgctctctggtgaagatgtggggcaggacgaaggggccacgcgggccctggggaaaaagcacaaggacttcctggaggagctggaggagagccgtggggtgatggagcacctggagcagcaggcccagggattccccgaagagtttcgggattccccagatgtgacccatcggctgcaggccctgcgggagctctaccaacaggtggtggcccaggcggacctgcgtcagcagaggctgcaggaagccctggacctgtacacggtgttcggggagacagacgcctgtgagctgtggatgggagagaaggagaagtggctggccgagatggaaatgccagacaccctggaggacctggaggtcgtgcagcacaggttcgacatcctggaccaggagatgaagaccttgatgactcagattgatggtgtgaacctcgctgccaacagcttggtagagagtggccacccacgcagcagggaggtgaagcagtaccaggaccatctgaacaccaggtggcaggcatttcagaccctggtgtcggagcggcgggaggctgtggactcagccctccgagtgcacaactactgcgtagattgcgaggagaccagcaagtggatcacggacaagacaaaggtagtggagtccacaaaagacctggggcgggacctggcaggtatcatcgccatccagaggaagttgtcagggctggagcgtgacgtggccgccatccaggcccgtgtggatgccctggagcgtgagtcccagcagctgatggactcgcaccctgagcagaaggaggatattggtcagcggcaaaaacacttggaggagctgtggcagggcctgcagcaatccctgcagggccaggaggacttgctgggggaagtcagccagctgcaggccttcctgcaggatctggatgacttccaggcctggctctccatcacccagaaggctgtggcctctgaggacatgcccgaatccctcccagaggctgagcagctcctgcagcagcatgcaggtatcaaggatgagattgacgggcaccaagacagctaccagcgtgttaaggagtctggggagaaagtgatccaaggccagacggacccagagtatctgcttctgggccagcggctggagggcctggatactggctggaatgccctgggcaggatgtgggagagccgcagccacaccctcgctcagtgccttggcttccaggagttccagaaagatgccaagcaggctgaagccatcctcagcaaccaggaatacactctggctcacttggagcccccagactccctggaagctgcagaggctgggatccggaagtttgaggatttcttggggtctatggagaacaaccgggataaggtcttgagtcctgtggactctggaaacaagctggtagctgagggaaacctatactcagacaagatcaaggagaaggtgcagctgattgaggacaggcacaggaagaacaacgagaaggcccaggaggcctctgtcctactgagagacaacctggagctacagaacttcctccagaactgccaggagctcactctctggatcaacgacaagctgctgacatctcaggatgtctcctatgatgaagcacgaaaccttcacaataaatggctaaagcaccaggcgtttgtggcagagctggcttcccatgaagggtggctagagaacatcgatgcggaaggaaagcagctgatggatgagaagccccagtttacagccctggtgtcccaaaagctggaagccctgcaccggctctgggacgagctgcaggccaccacaaaggagaagacccagcacctctcggctgccaggagctccgacctgcgcttgcagacccatgctgacctcaacaagtggatcagcgccatggaggaccagctgcggtcagacgacccgggcaaggacctgaccagtgtcaatcggatgttggctaagctgaagcgagtggaggaccaagtgaatgtgcgaaaagaggagctgggggagctgtttgcccaggtgccttcaatgggagaggagggaggagatgcagacttgagcatcgagaagcggttcctggacctcctggaacccctaggaaggaggaagaagcagctggaatcatccagagccaagctgcagatcagccgggacttagaggatgagacgctttgggtggaggagaggctgcctctggcccagtcagccgactatggcactaatctgcaaactgtgcaactgttcatgaagaagaaccagacactgcagaatgagattctgggccatacgccgcgggttgaggatgtgctgcagagagggcagcagctggtggaggcggcggagatcgactgccaggaccttgaggagcgcctggggcacctgcagagctcctgggacaggctgcgggaggcagcggccgggaggctgcagcgactgagggacgccaacgaggcacagcagtactacctggatgcagacgaggctgaggcctggattggcgagcaggagctctacgtcatctccgatgagatccccaaggatgaagagggcgccattgtgatgctgaagcgacatttgcggcagcagcgtgcggtggaggactacggccggaacatcaagcagctggccagccgggcccagggcctgctgtctgcaggccaccctgagggggaacagatcatcagacttcaggggcaagtggacaagcactacgcagggctgaaggacgtggcggaagagcgcaagcgcaagctggagaacatgtaccacctgttccagctcaagcgggagaccgacgacctggagcagtggatttcagaaaaggagctagtggcctcttccccggaaatggggcaagactttgaccacgtgactcttctgcgggacaagttccgggactttgcccgggagaccggggcgattgggcaggagcgggtggacaatgtgaatgccttcatcgagcgactcatcgacgcgggccacagcgaggcggccaccatcgccgagtggaaggacgggctgaacgagatgtgggcagacctcctggagctcattgacacgcgcatgcagctgctggccgcctcctatgacctgcaccgctacttctacacgggtgccgagatcctgggcctcatcgacgagaagcaccgcgagctgcccgaggacgtggggctggacgccagcacggccgagtccttccaccgggtgcacacagccttcgagcgggagctccacctgctgggtgtccaggtgcagcagttccaggacgtggccacccgtctgcagacagcatatgctggggagaaggcagaggccatccagaacaaggagcaggaggtgtctgccgcgtggcaggcgctgctcgatgcctgtgccgggcgccggacccagctagtggacacggcggataaattccgcttcttcagcatggcccgtgacctcctctcctggatggagagcatcatccggcagatcgagacccaggagaggcccagggatgtctcctctgtggaactgctcatgaagtatcaccagggcatcaatgcagagattgaaacccggagcaagaacttcagtgcctgcctggagcttggcgagtccctgctgcagcggcagcaccaggcctcagaggagatccgcgagaaactgcagcaggtgatgtccaggaggaaagagatgaatgagaagtgggaagcccgctgggagcggctccgcatgttgctggaggtgtgccagttctcgagggatgcctctgtggctgaggcgtggctgattgcccaggagccctacctggccagcggggactttggacacacagtggacagtgtggagaagctcatcaagaggcatgaggcttttgagaagtccacggccagctgggcagagcgctttgctgccctggagaagcccaccacgcttgagctgaaagaacgccagattgcagagagacccgcagaggagactgggcctcaagaggaggaaggcgagacagcaggggaggctccagtttcccaccatgcggccaccgagagaacgtccccggtcagtctctggtctcgtttgtctagttcctgggagtcactgcagccagagccctctcacccctactaggctcagcccaggtggaggcgagatgagctggcgcagccccgccctccatcctccccacatccctgcagccacctcccagcagagcaggctacgtcctcactgaggtgttcttcatgagagtactagcctcctccactcctccccacagcgcagaggaaacaggccagcccagtgacatgacgttattagttttgttttacctaatgtaataaattttattgtataaatatatcaccatttacatgaggggaaacactaaaaaaaa

SEQ ID NO: 441 - DNA, 2805 bp, Homo Sapiens
  NM_000358
ctccttgcacgggccggcccagcttccccgcccctggcgtccgctccctcccgctcgcagcttacttaacctggcccgggcggcggaggcgctctcacttccctggagccgcccgcttgcccgtcggtcgctagctcgctcggtgcgcgtcgtcccgctccatggcgctcttcgtgcggctgctggctctcgccctggctctggccctgggccccgccgcgaccctggcgggtcccgccaagtcgccctaccagctggtgctgcagcacagcaggctccggggccgccagcacggccccaacgtgtgtgctgtgcagaaggttattggcactaataggaagtacttcaccaactgcaagcagtggtaccaaaggaaaatctgtggcaaatcaacagtcatcagctacgagtgctgtcctggatatgaaaaggtccctggggagaagggctgtccagcagccctaccactctcaaacctttacgagaccctgggagtcgttggatccaccaccactcagctgtacacggaccgcacggagaagctgaggcctgagatggaggggcccggcagcttcaccatcttcgcccctagcaacgaggcctgggcctccttgccagctgaagtgctggactccctggtcagcaatgtcaacattgagctgctcaatgccctccgctaccatatggtgggcaggcgagtcctgactgatgagctgaaacacggcatgaccctcacctctatgtaccagaattccaacatccagatccaccactatcctaatgggattgtaactgtgaactgtgcccggctgctgaaagccgaccaccatgcaaccaacggggtggtgcacctcatcgataaggtcatctccaccatcaccaacaacatccagcagatcattgagatcgaggacacctttgagacccttcgggctgctgtggctgcatcagggctcaacacgatgcttgaaggtaacggccagtacacgcttttggccccgaccaatgaggccttcgagaagatccctagtgagactttgaaccgtatcctgggcgacccagaagccctgagagacctgctgaacaaccacatcttgaagtcagctatgtgtgctgaagccatcgttgcggggctgtctgtagagaccctggagggcacgacactggaggtgggctgcagcggggacatgctcactatcaacgggaaggcgatcatctccaataaagacatcctagccaccaacggggtgatccactacattgatgagctactcatcccagactcagccaagacactatttgaattggctgcagagtctgatgtgtccacagccattgaccttttcagacaagccggcctcggcaatcatctctctggaagtgagcggttgaccctcctggctcccctgaattctgtattcaaagatggaacccctccaattgatgcccatacaaggaatttgcttcggaaccacataattaaagaccagctggcctctaagtatctgtaccatggacagaccctggaaactctgggcggcaaaaaactgagagtttttgtttatcgtaatagcctctgcattgagaacagctgcatcgcggcccacgacaagagggggaggtacgggaccctgttcacgatggaccgggtgctgacccccccaatggggactgtcatggatgtcctgaagggagacaatcgctttagcatgctggtagctgccatccagtctgcaggactgacggagaccctcaaccgggaaggagtctacacagtctttgctcccacaaatgaagccttccgagccctgccaccaagagaacggagcagactcttgggagatgccaaggaacttgccaacatcctgaaataccacattggtgatgaaatcctggttagcggaggcatcggggccctggtgcggctaaagtctctccaaggtgacaagctggaagtcagcttgaaaaacaatgtggtgagtgtcaacaaggagcctgttgccgagcctgacatcatggccacaaatggcgtggtccatgtcatcaccaatgttctgcagcctccagccaacagacctcaggaaagaggggatgaacttgcagactctgcgcttgagatcttcaaacaagcatcagcgttttccagggcttcccagaggtctgtgcgactagcccctgtctatcaaaagttattagagaggatgaagcattagcttgaagcactacaggaggaatgcaccacggcagctctccgccaatttctctcagatttccacagagactgtttgaatgttttcaaaaccaagtatcacactttaatgtacatgggccgcaccataatgagatgtgagccttgtgcatgtgggggaggagggagagagatgtactttttaaatcatgttccccctaaacatggctgttaacccactgcatgcagaaacttggatgtcactgcctgacattcacttccagagaggacctatcccaaatgtggaattgactgcctatgccaagtccctggaaaaggagcttcagtattgtggggctcataaaacatgaatcaagcaatccagcctcatgggaagtcctggcacagtttttgtaaagcccttgcacagctggagaaatggcatcattataagctatgagttgaaatgttctgtcaaatgtgtctcacatctacacgtggcttggaggcttttatggggccctgtccaggtagaaaagaaatggtatgtagagcttagatttccctattgtgacagagccatggtgtgtttgtaataataaaaccaaagaaacata

SEQ ID NO: 442 - DNA, 1366 bp, Homo Sapiens
  NM_000365
gcgcagacactgaccttcagcgcctcggctccagcgccatggcgccctccaggaagttcttcgttgggggaaactggaagatgaacgggcggaagcagagtctgggggagctcatcggcactctgaacgcggccaaggtgccggccgacaccgaggtggtttgtgctccccctactgcctatatcgacttcgcccggcagaagctagatcccaagattgctgtggctgcgcagaactgctacaaagtgactaatggggcttttactggggagatcagccctggcatgatcaaagactgcggagccacgtgggtggtcctggggcactcagagagaaggcatgtctttggggagtcagatgagctgattgggcagaaagtggcccatgctctggcagagggactcggagtaatcgcctgcattggggagaagctagatgaaagggaagctggcatcactgagaaggttgttttcgagcagacaaaggtcatcgcagataacgtgaaggactggagcaaggtcgtcctggcctatgagcctgtgtgggccattggtactggcaagactgcaacaccccaacaggcccaggaagtacacgagaagctccgaggatggctgaagtccaacgtctctgatgcggtggctcagagcacccgtatcatttatggaggctctgtgactggggcaacctgcaaggagctggccagccagcctgatgtggatggcttccttgtgggtggtgcttccctcaagcccgaattcgtggacatcatcaatgccaaacaatgagccccatccatcttccctacccttcctgccaagccagggactaagcagcccagaagcccagtaactgccctttccctgcatatgcttctgatggtgtcatctgctccttcctgtggcctcatccaaactgtatcttcctttactgtttatatcttcaccctgtaatggttgggaccaggccaatcccttctccacttactataatggttggaactaaacgtcaccaaggtggcttctccttggctgagagatggaaggcgtggtgggatttgctcctgggttccctaggccctagtgagggcagaagagaaaccatcctctcccttcttacaccgtgaggccaagatcccctcagaaggcaggagtgctgccctctcccatggtgcccgtgcctctgtgctgtgtatgtgaaccacccatgtgagggaataaacctggcactaggtcttgtggtttgtctgccttcactggacttgcccagataatcttcctttttgaggcagctatataaatgatcatttgtgcaagaaaaaaaaaaaaacaagaacaggtttctataacaaaaaaaaaaaaaaaaa

SEQ ID NO: 443 - DNA, 3258 bp, Homo Sapiens
  NM_000367
gcgggcggaggcggggcgcggagaagtggcggaggtggaagcggaggcgtacccgcccctggggacgtcattggtggcggaggcaatggccggcaaccagctgtaagcgaggcacggaagacatatgcttgtgagacaaaggtgtctctgaaactatggatggtacaagaacttcacttgacattgaagagtactcggatactgaggtacagaaaaaccaagtactaactctggaagaatggcaagacaagtgggtgaacggcaagactgcttttcatcaggaacaaggacatcagctattaaagaagcatttagatactttccttaaaggcaagagtggactgagggtattttttcctctttgcggaaaagcggttgagatgaaatggtttgcagaccggggacacagtgtagttggtgtggaaatcagtgaacttgggatacaagaattttttacagagcagaatctttcttactcagaagaaccaatcaccgaaattcctggaaccaaagtatttaagagttcttcggggaacatttcattgtactgttgcagtatttttgatcttcccaggacaaatattggcaaatttgacatgatttgggatagaggagcattagttgccatcaatccaggtgatcgcaaatgctatgcagatacaatgttttccctcctgggaaagaagtttcagtatctcctgtgtgttctttcttatgatccaactaaacatccaggtccaccattttatgttccacatgctgaaattgaaaggttgtttggtaaaatatgcaatatacgttgtcttgagaaggttgatgcttttgaagaacgacataaaagttggggaattgactgtctttttgaaaagttatatctacttacagaaaagtaaatgagacatagataaaataaaatcacactgacatgtttttgaggaattgaaaattatgctaaagcctgaaaatgtaatggatgaatttttaaaattgtttataaatcatatgatagatctttactaaaaatggctttttagtaaagccatttactttttctaaaaaagttttagaagaaaaagatgtaactaaacttttaaagtagctcctttggagaggagattatgatgtgaaagattatgcctatgtgtcttgcagattgcaagatattttaccaatcagcatgtgttacctgtacaattaaaaaaatatttcaaaatgcaatgcatattaaatataatacacacagaaaaactggcatttattttgttttatttttttgagatggagtttcgttcttgttgcccaacctggagtgcaatggtgcaatctcagctcactgcaacctctgcctcccaggttcaggtgattctcctgcctcagcctcctgagtagctgggattacaggtgtgcgccaccacgcccagctaattttttgtatttttagtagagacagggtttcaccatgttggtcaggctgatctcgagctcctgacctcaggtgatctacccacctcggcctcccaaagtgctgggattacaggcgtgagccactgcacctggcctgacattctttatgaaatttagaattgttgaagaactataacatttcagtagggttcaaggtggtcccaaaagttatataaaagattagtttttactataaacccttgtcttttactcagatcctagcatcccttttcacatggtttctccatgtatataacagaatcaagaaacaaattttaattaaacaatctgtaacagaatcaagaaacaaatacattttaattaaacaatctatatggaacaaacattcccaaattctaagaataaatttttctttaagttttctctgagtttggcaattgttgttttttataatttaatctgtttaaatcatcaggtcttataaaatataatgtacttagagctggattcatggctgtttattatgaaaggttagatttctcagttcttctttaaccacattttgttatatcagacagtcctctataactctgtactacccaacaactaaatggtttagattgtttagctcatgttaataggatggttgtgtattataaaaaacgagttacgtgtgtgtgtgcacgcatgcacgcacatgtgctggcttaaaggttgttaatgcaaggtttggggtcccctttaacactggtgaaagctacggtactctccccagagatatgtcttgtcagcctctctagttccccttggcctgcatgtacaaacttctaccctagaagctctctgccatcgatgtattctaatagatttgtaaggctattaatttgaagcaactccttgctcacagtgattcttgcttctctgagacctgctcccagtcgatactgtgggcttcagaagccatgactccccaactctgcctgtatcaccggttgaatggacaactaacccgagctggaccaacacaattctctccagagacttttgattttacttttatgtagagacagggtctcactttgttgcccacgctgatgttgaacttgacgtgaggcctcaagcagtcctcctgtcttggccacccaaagtgctaggattacaggtatgagccattgcgctggccctcttcataggcttttggacttgggaatagaaaagcaaccccgtctctactaaaaatacaaaaaaattagccaggcgtggtggcacgtgcctgtaatcccagctacttgggaggctgaggcaggagaatcacttgaacctaggaggcggaggttgcagtgagctgagatcatgccactgcacgcaagcctgggcaacagagcaagactctgtctcaaaagaaagaaaaagaaaagaaaaaaaagaaaggcaagttgactgctgaaaggggaatctgtgtacgcctgggagctgtggggcagccacattccagcacatggatctgagaaacagaacgctgatctgcagaaagagatgagaaccaaagagaggccacctgcgtcctgggtccattttcatcctccctgaagcccagctgcccagggtggggagaaacaccctgtgtccatgggatagagtcctttccgcttgcagttgtgcccaaagaatcttaaatacaaatgagatatccttaggtagttgatcatttatgtaatatgtgtcttcactggggaatactgacttcctaaaatctcaagatggaagatataccacatgtaaattattttagagcaattaaattgttttcaggattttccaaaaaaaaaaaaa

SEQ ID NO: 444 - DNA, 8626 bp, Homo Sapiens
  NM_000368
acgacgggggaggtgctgtacgtccaagatggcggcgccctgtaggctggagggactgtgaggtaaacagctgagggggaggagacggtggtgaccatgaaagacaccaggttgacagcactggaaactgaagtaccagttgtcgctagaacagtttggtagtggccccaatgaagaaccttcagaacctgtagcacacgtcctggagccagcacagcgccttcgagcgagagaatggcccaacaagcaaatgtcggggagcttcttgccatgctggactcccccatgctgggtgtgcgggacgacgtgacagctgtctttaaagagaacctcaattctgaccgtggccctatgcttgtaaacaccttggtggattattacctggaaaccagctctcagccggcattgcacatcctgaccaccttgcaagagccacatgacaagcacctcttggacaggattaacgaatatgtgggcaaagccgccactcgtttatccatcctctcgttactgggtcatgtcataagactgcagccatcttggaagcataagctctctcaagcacctcttttgccttctttactaaaatgtctcaagatggacactgacgtcgttgtcctcacaacaggcgtcttggtgttgataaccatgctaccaatgattccacagtctgggaaacagcatcttcttgatttctttgacatttttggccgtctgtcatcatggtgcctgaagaaaccaggccacgtggcggaagtctatctcgtccatctccatgccagtgtgtacgcactctttcatcgcctttatggaatgtacccttgcaacttcgtctcctttttgcgttctcattacagtatgaaagaaaacctggagacttttgaagaagtggtcaagccaatgatggagcatgtgcgaattcatccggaattagtgactggatccaaggaccatgaactggaccctcgaaggtggaagagattagaaactcatgatgttgtgatcgagtgtgccaaaatctctctggatcccacagaagcctcatatgaagatggctattctgtgtctcaccaaatctcagcccgctttcctcatcgttcagccgatgtcaccaccagcccttatgctgacacacagaatagctatgggtgtgctacttctaccccttactccacgtctcggctgatgttgttaaatatgccagggcagctacctcagactctgagttccccatcgacacggctgataactgaaccaccacaagctactctttggagcccatctatggtttgtggtatgaccactcctccaacttctcctggaaatgtcccacctgatctgtcacacccttacagtaaagtctttggtacaactgcaggtggaaaaggaactcctctgggaaccccagcaacctctcctcctccagccccactctgtcattcggatgactacgtgcacatttcactcccccaggccacagtcacaccccccaggaaggaagagagaatggattctgcaagaccatgtctacacagacaacaccatcttctgaatgacagaggatcagaagagccacctggcagcaaaggttctgtcactctaagtgatcttccagggtttttaggtgatctggcctctgaagaagatagtattgaaaaagataaagaagaagctgcaatatctagagaactttctgagatcaccacagcagaggcagagcctgtggttcctcgaggaggctttgactctcccttttaccgagacagtctcccaggttctcagcggaagacccactcggcagcctccagttctcagggcgccagcgtgaaccctgagcctttacactcctccctggacaagcttgggcctgacacaccaaagcaagcctttactcccatagacctgccctgcggcagtgctgatgaaagccctgcgggagacagggaatgccagacttctttggagaccagtatcttcactcccagtccttgtaaaattccacctccgacgagagtgggctttggaagcgggcagcctcccccgtatgatcatctttttgaggtggcattgccaaagacagcccatcattttgtcatcaggaagactgaggagctgttaaagaaagcaaaaggaaacacagaggaagatggtgtgccctctacctccccaatggaagtgctggacagactgatacagcagggagcagacgcgcacagcaaggagctgaacaagttgcctttacccagcaagtctgtcgactggacccactttggaggctctcctccttcagatgagatccgcaccctccgagaccagttgcttttactgcacaaccagttactctatgagcgttttaagaggcagcagcatgccctccggaacaggcggctcctccgcaaggtgatcaaagcagcagctctggaggaacataatgctgccatgaaagatcagttgaagttacaagagaaggacatccagatgtggaaggttagtctgcagaaagaacaagctagatacaatcagctccaggagcagcgtgacactatggtaaccaagctccacagccagatcagacagctgcagcatgaccgagaggaattctacaaccagagccaggaattacagacgaagctggaggactgcaggaacatgattgcggagctgcggatagaactgaagaaggccaacaacaaggtgtgtcacactgagctgctgctcagtcaggtttcccaaaagctctcaaacagtgagtcggtccagcagcagatggagttcttgaacaggcagctgttggttcttggggaggtcaacgagctctatttggaacaactgcagaacaagcactcagataccacaaaggaagtagaaatgatgaaagccgcctatcggaaagagctagaaaaaaacagaagccatgttctccagcagactcagaggcttgatacctcccaaaaacggattttggaactggaatctcacctggccaagaaagaccaccttcttttggaacagaagaaatatctagaggatgtcaaactccaggcaagaggacagctgcaggccgcagagagcaggtatgaggctcagaaaaggataacccaggtgtttgaattggagatcttagatttatatggcaggttggagaaagatggcctcctgaaaaaacttgaagaagaaaaagcagaagcagctgaagcagcagaagaaaggcttgactgttgtaatgacgggtgctcagattccatggtagggcacaatgaagaggcatctggccacaacggtgagaccaagacccccaggcccagcagcgcccggggcagtagtggaagcagaggtggtggaggcagcagcagcagcagcagcgagctttctaccccagagaaacccccacaccagagggcaggcccattcagcagtcggtgggagacgactatgggagaagcgtctgccagcatccccaccactgtgggctcacttcccagttcaaaaagcttcctgggtatgaaggctcgagagttatttcgtaataagagcgagagccagtgtgatgaggacggcatgaccagtagcctttctgagagcctaaagacagaactgggcaaagacttgggtgtggaagccaagattcccctgaacctagatggccctcacccgtctcccccgaccccggacagtgttggacagctacatatcatggactacaatgagactcatcatgaacacagctaaggaatgatggtcaatcagtgttaacttgcatattgttggcacagaacaggaggtgtgaatgcacgtttcaaagctttcctgtttccagggtctgagtgcaagttcatgtgtggaaatgggacggaggtcctttggacagctgactgaatgcagaacggtttttggatctggcattgaaatgcctcttgaccttcccctccacccgccctaaccccctctcatttacctcgcagtgtgttctaatccaagggccagttggtgttcctcagtagctttactttcttcctttcccccccaaatggttgcgtcctttgaacctgtgcaatatgaggccaaatttaatctttgagtctaacacaccactttctgctttcccgaagttcagataactgggttggctctcaattagaccaggtagtttgttgcattgcaggtaagtctggttttgtcccttccaggaggacatagcctgcaaagctggttgtctttacatgaaagcgtttacatgagactttccgactgcttttttgattctgaagttcagcatctaaagcagcaggtctagaagaacaacggtttattcatacttgcattcttttggcagttctgataagcttcctagaaagttctgtgtaaacagaagcctgtttcagaaatctggagctggcactgtggagaccacacaccctttgggaaagctcttgtctcttcttcccccactacctcttatttatttggtgtttgcttgaatgctggtactattgtgaccacaggctggtgtgtaggtggtaaaacctgttctccataggagggaaggagcagtcactgggagaggttacccgagaagcacttgagcatgaggaactgcacctttaggccatctcagcttgctgggccttttgttaaacccttctgtctactggcctccctttgtgtgcatacgcctcttgttcatgtcagcttatatgtgacactgcagcagaaaggctctgaaggtccaaagagtttctgcaaagtgtatgtgaccatcatttcccaggccattagggttgcctcactgtagcaggttctaggctaccagaagaggggcagctttttcataccaattccaactttcaggggctgactctccagggagctgatgtcatcacactctccatgttagtaatggcagagcagtctaaacagagtccgggagaatgctggcaaaggctggctgtgtatacccactaggctgccccacgtgctcccgagagatgacactagtcagaaaattggcagtggcagagaatccaaactcaacaagtgctcctgaaagaaacgctagaagcctaagaactgtggtctggtgttccagctgaggcagggggatttggtaggaaggagccagtgaacttggctttcctgtttctatctttcattaaaaagaatagaaggattcagtcataaagaggtaaaaaactgtcacggtacgaaatcttagtgcccacggaggcctcgagcagagagaatgaaagtcttttttttttttttttttttttagcatggcaataaatattctagcatccctaactaaaggggactagacagttagagactctgtcaccctagctataccagcagaaaacctgttcaggcaggctttctgggtgtgactgattcccagcctgtggcagggcgtggtcccaactactcagcctagcacaggctggcagttggtactgaattgtcagatgtggagtattagtgacaccacacatttaattcagctttgtccaaaggaaagcttaaaacccaatacagtctagtttcctggttccgttttagaaaaggaaaacgtgaacaaacttagaaagggaaggaaatcccatcagtgaatcctgaaactggttttaagtgctttccttctcctcatgcccaagagatctgtgccatagaacaagataccaggcacttaaagccttttcctgaattggaaaggaaaagaggcccaagtgcaaaagaaaaaacattttagaaacggacagcttataaaaataaagggaagaaaggaggcagcatggagagaggcctgtgctagaagctccatggacgtgtctgcacagggtcctcagctcatccatgcggcctgggtgtccttttactcagctttataacaaatgtggctccaagctcaggtgcctttgagttctaggaggctgtgggttttattcaactacggttgggagaatgagacctggagtcatgttgaaggtgcccaacctaaaaatgtaggctttcatgttgcaaagaactccagagtcagtagttaggtttggtttggttttggacatgataaacctgccaagagtcaacaggtcacttgatcatgctgcagtgggtagttctaaggatggaaaggtgacagtattactctcgagaggcaattcagtcctgggcaaaggtattagtacaataagcgttaagggcagagtctaccttgaaaccaattaagcagcttggtattcataaatattgggattggatggcctccatccagaaatcactatgggtgagcatacctgtctcagctgtttggccaatgtgcataacctactcggatccccacctgacactaaccagagtcagcacaggccccgaggagcccgaagtctgctgctgtgcagcatggaattcctttaaaaaggtgcactacagttttagcggggagggggataggaagacgcagagcaaatgagctccggagtccctgcaggtgaataaacacacagatctgcatctgatagaactttgatggattttcaaaaagccgttgacaaggctctgctatacagtctataaaaattgttattatgggattggaagaaacacgtggtcatgaatagaaaaaaaacaaacccaaaggtaggaaggtcaaggtcatttcttagatggagaagttgtgaaagatgtccttggagatgagttttaggaccagcattactaaggcaggtgggcagacagtgacctctctaggtgtgtccacagagtttttcaggagagaaaactgcctgacctttgggactaagctgcggaatcttcttactaagcttgaagagtggagaggcgagaggtgagctactttgtgagccaaagcttatgtgacatggttggggaaacagtccaaactgttctgagaaggtgaactgttacgacccaggacaattagaaaaattcacccaccatgccgcacattactgggtaaaagcagggcagcagggaacaaaactccagactcttgggccgtccccatttgcaacagcacacatagtttctggtatatttgttgggaaagataaaactctagcagttgttgaggggaggatgtataaaatggtcatggggatgaaaggatctctgagaccacagaggctcagactcactgttaagaatagaaaactgggtatgcgtttcatgtagccagcagaactgaagtgtgctgtgacaagccaatgtgaatttctaccaaatagtagagcataccacttgaagaaggaaagaaccgaagagcaaacaaaagttctgcgtaatgagactcaccttttctcgctgaaagcactaagaggtgggaggaggcctgcacaggctggaggagggtttgggcagagcgaagacccggccaggaccttggtgagatggggtgccgcccacctcctgcggatactcttggagagttgttcccccagggggctctgccccacctggagaaggaagctgcctggtgtggagtgactcaaatcagtatacctatctgctgcaccttcactctccagggtacatgctttaaaaccgacccgcaacaagtattggaaaaatgtatccagtctgaagatgtttgtgtatctgtttacatccagagttctgtgacacatgccccccagattgctgcaaagatcccaaggcattgattgcacttgattaagcttttgtctgtaggtgaaagaacaagtttaggtcgaggactggcccctaggctgctgctgtgacccttgtcccatgtggcttgtttgcctgtccgggactcttcgatgtgcccaggggagcgtgttcctgtctcttccatgccgtcctgcagtccttatctgctcgcctgagggaagagtagctgtagctacaagggaagcctgcctggaagagccgagcacctgtgcccatggcttctggtcatgaaacgagttaatgatggcagaggagcttcctccccacttcgcagcgccacattatccatcctctgagataagtaggctggtttaaccattggaatggacctttcagtggaaaccctgagagtctgagaacccccagaccaacccttccctccctttccccacctcttacagtgtttggacaggagggtatggtgctgctctgtgtagcaagtactttggcttatgaaagaggcagccacgcattttgcactaggaagaatcagtaatcacttttcagaagacttctatggaccacaaatatattacggaggaacagattttgctaagacataatctagttttataactcaatcatgaatgaaccatgtgtggcaaacttgcagtttaaaggggtcccatcagtgaaagaaactgattttttttaacggactgcttttagttaaattgaagaaagtcagctcttgtcaaaaggtctaaactttcccgcctcaatcctaaaagcatgtcaacaatccacatcagatgccataaatatgaactgcaggataaaatggtacaatcttagtgaatgggaattggaatcaaaagagtttgctgtccttcttagaatgttctaaaatgtcaaggcagttgcttgtgtttaactgtgaacaaataaaaatttattgttttgcactacaaaaaaaaaa

SEQ ID NO: 445 - DNA, 1371 bp, Homo Sapiens
  NM_000375
atggcggtgcgcatgcgcgagcgcctagctgcgcgcagccacccacgcgaccccagtctgaggtgcggggtcctggggcccggcgcgggtggccgccgcggcccctcgggctgcgtggggagggggcttccgcccctgttgtcattgctcctgcagccttttcgctgggactgcgcgacaccgccccccgaccgggtgcccgctgtgtgccaggccgggtgctgggcacggtcccgcgagtgccctataaggactgccaggcaataatgaaggttcttttactgaaggatgcgaaggaagatgactgtggccaggatccgtatatcagggaattaggattatatggacttgaagccactttgatccctgttttatcgtttgagtttttgtctcttcccagtttctctgagaagctttctcatcctgaagattacgggggactcatttttaccagccccagagcagtggaagcagcagagttatgtttggagcaaaacaataaaactgaagtctgggaaaggtctctgaaagaaaaatggaatgccaagtcagtgtatgtggttggaaatgctactgcttctctagtgagtaaaattggcctggatacagaaggagaaacctgtggaaatgcagaaaagcttgcagaatatatttgttccagggagtcctcagcactgcctcttctatttccctgtggaaacctcaaaagagaaatcctgccaaaagcgctcaaggacaaagggattgccatggaaagcataactgtgtatcagacagttgcacacccaggaatccaagggaacctgaacagctactattcccagcagggggttccagccagcatcacattttttagtccctctggcctcacatacagtctcaagcacattcaggagttatctggtgacaatatcgatcaaattaagtttgcagccatcggccccactacggctcgcgcgctggccgcccagggccttcctgtaagctgcactgcagagagccccacgccacaagccctggccactggcatcaggaaggctctccagccccatggctgctgctgagtcagccacctagcgctggccccatgcagcctccctgggctgggctggctctggatggagccaggcatcggcaagggctctcgggagctgctgccgtcagactcctgcctcaagcctgagtggaagcacctgaggaccggggatcgggacctgacctggggctggcctcaggcccacgtgcacgtgactgccctctgtggaagccagcttaaaccctagccctgtgagagcttcctgtgcccagcaggaaggaagtcaaataaaccacactgactacctgtgcttactgaaaaaaaaaaaaaaaaaa

SEQ ID NO: 446 - DNA, 1844 bp, Homo Sapiens
  NM_000377
tcctcttcttaccctgcacccagagcctcgccagagaagacaagggcagaaagcaccatgagtgggggcccaatgggaggaaggcccgggggccgaggagcaccagcggttcagcagaacataccctccaccctcctccaggaccacgagaaccagcgactctttgagatgcttggacgaaaatgcttgacgctggccactgcagttgttcagctgtacctggcgctgccccctggagctgagcactggaccaaggagcattgtggggctgtgtgcttcgtgaaggataacccccagaagtcctacttcatccgcctttacggccttcaggctggtcggctgctctgggaacaggagctgtactcacagcttgtctactccacccccacccccttcttccacaccttcgctggagatgactgccaagcggggctgaactttgcagacgaggacgaggcccaggccttccgggccctcgtgcaggagaagatacaaaaaaggaatcagaggcaaagtggagacagacgccagctacccccaccaccaacaccagccaatgaagagagaagaggagggctcccacccctgcccctgcatccaggtggagaccaaggaggccctccagtgggtccgctctccctggggctggcgacagtggacatccagaaccctgacatcacgagttcacgataccgtgggctcccagcacctggacctagcccagctgataagaaacgctcagggaagaagaagatcagcaaagctgatattggtgcacccagtggattcaagcatgtcagccacgtggggtgggacccccagaatggatttgacgtgaacaacctcgacccagatctgcggagtctgttctccagggcaggaatcagcgaggcccagctcaccgacgccgagacctctaaacttatctacgacttcattgaggaccagggtgggctggaggctgtgcggcaggagatgaggcgccaggagccacttccgccgcccccaccgccatctcgaggagggaaccagctcccccggccccctattgtggggggtaacaagggtcgttctggtccactgccccctgtacctttggggattgccccacccccaccaacaccccggggacccccacccccaggccgagggggccctccaccaccaccccctccagctactggacgttctggaccactgccccctccaccccctggagctggtgggccacccatgccaccaccaccgccaccaccgccaccgccgcccagctccgggaatggaccagcccctcccccactccctcctgctctggtgcctgccgggggcctggcccctggtgggggtcggggagcgcttttggatcaaatccggcagggaattcagctgaacaagacccctggggccccagagagctcagcgctgcagccaccacctcagagctcagagggactggtgggggccctgatgcacgtgatgcagaagagaagcagagccatccactcctccgacgaaggggaggaccaggctggcgatgaagatgaagatgatgaatgggatgactgagtggctgagttacttgctgccctgtgctcctccccgcaggacatggctccccctccacctgctctgtgcccaccctccactctcctcttccaggcccccaaccccccatttcttccccaccaacccctccaatgctgttatccctgcctggtcctcacactcacccaacaatcccaaggccctttttatacaaaaattctcagttctcttcactcaaggatttttaaagaaaaataaaagaattgtctttctgtctctctataaaaaaaaaaaaaaaa

SEQ ID NO: 447 - DNA, 3702 bp, Homo Sapiens
  NM_000382
agtcctcccccggcgcctccgactggcagtgggactcagcgggcgtggaggtcgcggctgagcgagcgagccctgggcgagtgaattgtggctgtgggttgacggtggagacaccccccggagggaggcggagggaagggaggcgaggcctgcacctgcatgcttcccgcctcccactccccagcgcccccggaccgtgcagttctctgcaggaccaggccatggagctcgaagtccggcgggtccgacaggcgttcctgtccggccggtcgcgacctctgcggtttcggctgcagcagctggaggccctgcggaggatggtgcaggagcgcgagaaggatatcctgacggccatcgccgccgacctgtgcaagagtgaattcaatgtgtacagtcaggaagtcattactgtccttggggaaattgattttatgcttgagaatcttcctgaatgggttactgctaaaccagttaagaagaacgtgctcaccatgctggatgaggcctatattcagccacagcctctgggagtggtgctgataatcggagcttggaattaccccttcgttctcaccattcagccactgataggagccatcgctgcaggaaatgctgtgattataaagccttctgaactgagtgaaaatacagccaagatcttggcaaagcttctccctcagtatttagaccaggatctctatattgttattaatggtggtgttgaggaaaccacggagctcctgaagcagcgatttgaccacattttctatacgggaaacactgcggttggcaaaattgtcatggaagctgctgccaagcatctgacccctgtgactcttgaactgggagggaaaagtccatgttatattgataaagattgtgacctggacattgtttgcagacgcataacctggggaaaatacatgaattgtggccaaacctgcattgcacccgactatattctctgtgaagcatccctccaaaatcaaattgtatggaagattaaggaaacagtgaaggaattttatggagaaaatataaaagagtctcctgattatgaaaggatcatcaatcttcgtcattttaagaggatactaagtttgcttgaaggacaaaagatagcttttggtggggagactgatgaggccacacgctacatagccccaacagtacttaccgatgttgatcctaaaaccaaggtgatgcaagaagaaatttttggaccaattcttccaatagtgcctgtgaaaaatgtagatgaggccataaatttcataaatgaacgtgaaaagcctctggctctttatgtattttcgcataaccataagctcatcaaacggatgattgatgagacatccagtggaggtgtcacaggcaatgacgtcattatgcacttcacgctcaactctttcccatttggaggagtgggttccagtgggatgggagcttatcacggaaaacatagttttgatactttttctcatcagcgtccctgtttattaaaaagtttaaagagagaaggtgctaacaaactcagatatcctcccaacagccagtcaaaggtggattggggaaaattttttctcttgaaacggttcaacaaagaaaaactcggtctcctgttgctcactttcctgggtattgtagccgctgtgcttgtcaaggcagaatattactgaagaatgatcctgttcaacctcctagtgcctctactgaattattcctcttttaaatggttaatgaaccaataatttttaaatcataccaaaaatagtaagaaaatatgcaaacactctgtgatcaaacttaaaagtcattgccattcatcattaataaaagttgccatttcaactacgtcccaacattccctaatagggtattcagggaacctgtcttaaattgtgcttatctaaatcttggaactttgagctaggggaggagaatgtattagactaaatacaaactgcggggttgtaagggagtctcagaacctcactgaatccttcactccagttaatggcactgctcacttcctgcctctgctgccaccatcactgtgtgaagctttcaagagcttggtacttcccagggctaccggcagtcctctgtagtccagagaggtgagattagatcttcttggttccctgtgaggtttcaggcactaaaactctatgtggggaagggaggggttactcctcctccaatgggactcaaggacttgacctccaggagtaggcccctggtcagaagtgccatctcaccagtggtcttcattcttcctcattcattctttatcatcctgtgttctgtttagttgcaacaatctcttgtgactaatgtcactcaaagcatcttgtaaatcctagggcttcctggaagttagttgccaaagtcatgcaagcatcacctgtcattcttgtgttggagttatagaattctacatcttataaaacctaactggcatttaaaaaatactgtggccgggcgtggtggctcatgcctgtaatcccagcactttgggaggccgaggtgggaggattgcttgagtccaggaatttgagaccagcctggacaacacagtgagacctcatctctatcaaaaaataaaaattagctagatgtggtggcatgagcctgtgttcccagctgcttaggaggctgaagcaggaggattgattgagcctgcgaggccaaggctgcagcaggctgtgattgcaccactgcacttcagcttgggcaacagagcaagaccctgtctccgaaacaaataaaaaatactgtaataaaagtacttataaacatactaatcctctttcaggaccctaaagttgcaggttagtaggtcttcaaggacaaatctgtaagtttcttatttctgtagtgcaagtaaaatttcactttttgaaactatagagagatccctttctgattagcctacagaacttaaagtgagggaaccatttcctctcacagacaaagaggcctgggatattaggactttggggtttgagagcatcatggggcagacagatggtggatggtctggacaagaagcgagtaagccactgcggttggtcatactgaagggaattgatggcaagaggatcccctgagcaagtcagaagttactctcatcagtcgttcatggtcacaacctgaggtactctgctgagtgggcaaggctgaagaagaggcctgtggaatgcagcattacctgctggacagagcagggcaggcagttctatgccttggagctcctgactgcagggactctgtccccacactcaaaaagactcagctcactcaatgagagaatgtgatttactttatagaacgtataatcaactttgttgaataatttgttctattaaggctgtctaaagtatgtgatgtcttcatcatagtatgaagtgttgaaaattaataacgagcctagtttaggaaaaagctgcttaaaactgtggctctaagagagtaatcataaaataccttagataaaattgcactatggaattttcattgagtatgtttaaattattggcttgtctactaatacacatctgcttcaaaatgaacatatttcataaaattggcatcaattttaatgacgctcctggtatggaacctcagatataccctattggagacaatcctttgatcataaattctccccaactataaatcattttatgtctttatcat

SEQ ID NO: 448 - DNA, 2543 bp, Homo Sapiens
  NM_000386
ctgtgcggtcctgcgcgggggcaggcgcggcctcagcccccgggcgctggcggacccagcgcgtcagctaggccgcccccgtcggccctcccccgggcggggccagccccgacggcgctgactcagcaacgcgaggggggagttttgtccctccgcggaccccgtttctcccagcctcagcctccccgccgccgccgccgccgccgccgccgagccggtttcctttttccggcgctccgggtgcgagagacaggtcgggccccctaggcagcgagccgcagcgcaatcccggcgctcgcccaaggaccctggaagctaccgttaccccgccgggcagcgtgggcgccatgagcagctcgggactgaattcggagaaggtagctgctctgatacagaaactgaattccgacccccagttcgtacttgcccagaatgtcgggaccacccacgacctgctggacatctgtctgaagcgggccacggtgcagcgcgcgcagcatgtgttccagcacgccgtgccccaggagggcaagccaatcaccaaccagaagagctcagggcgatgctggatcttttcttgtctgaatgttatgaggcttccattcatgaaaaagttaaatattgaagaatttgagtttagccaatcttacctgtttttttgggacaaggttgaacgctgttatttcttcttgagtgcttttgtggacacagcccagagaaaggagcctgaggatgggaggctggtgcagtttttgcttatgaaccctgcaaatgatggtggccaatgggatatgcttgttaatattgttgaaaaatatggtgttatccctaagaaatgcttccctgaatcttatacaacagaggcaaccagaaggatgaatgatattctgaatcacaagatgagagaattctgtatacgactgcggaacctggtacacagtggagcaaccaaaggagaaatctcggccacacaggacgtcatgatggaggagatattccgagtggtgtgcatctgtttgggtaatccaccagagacattcacctgggaatatcgagacaaagataaaaattatcagaaaattggccccataacacccttggagttttacagggaacatgtcaagccactcttcaatatggaagataagatttgtttagtgaatgaccctaggccccagcacaagtacaacaaactttacacagtggaatacttaagcaatatggttggagggagaaaaactctatacaacaaccagcccattgacttcctgaaaaagatggttgctgcctccatcaaagatggagaggctgtgtggtttggctgtgatgttggaaaacacttcaatagcaagctgggcctcagtgacatgaatctctatgaccatgagttagtgtttggtgtctccttgaagaacatgaataaagcggagaggctgacttttggtgagtcacttatgacccacgccatgaccttcactgctgtctcagagaaggatgatcaggatggtgctttcacaaaatggagagtggagaattcatggggtgaagaccatggccacaaaggttacctgtgcatgacagatgagtggttctctgagtatgtctacgaagtggtggtggacaggaagcatgtccctgaagaggtgctagctgtgttagagcaggaacccattatcctgccagcatgggaccccatgggagctttggctgagtgatactgccctccagctctttcctccttccatggaacctgacgtagctgcaaaggacagatccagggactgaagccaaagttatgcaagggactgtgtgttgccacaggacacagtcagatttccagtctccaccaggaacctcttcagaaagtgtgctttatgctgaaacagaatactgttaaaggaaaaaaaagaggggggaagatcaggtcatactatctactctcctcatctctaacagctcaggatctcttagcattttaattagatgtaattgtttgtctttaactgtcaaaaagtttggttctgtgtctgtgttttaataagacgagaggacgagcgattgaggtgtatggagagaaaacagacctaatgctccttgttcctagagtagagtggagggagggtggcctaagagttgagctctcggaactgcatgctgctggacagtatcactgtctttcctagatggcagtcactgaattccattttttcaaggtaatttcttgtgcctctaatagcccaagaatgggaggttgatcagatctgacatgattccttcctgttctgaactgtggggtgtgcacatctctgcttgagtcaggtttgagtagaggcttagagacagttgggtgagaacaaccaaaatcttatcatggtctcagtcataatcattagggggaactctagccaaatggtttaacttctgcctgtggaactggggattgggtgggcaggaaaaggtgatatccattctttctgataactagatggtgctgagaagcttttgaataaaaactttgctaaatgagaataagctgaaaaaaa

SEQ ID NO: 449 - DNA, 5442 bp, Homo Sapiens
  NM_000390
taatagtcacatgacacgtttcccgtcaagatggcggatactctcccttcggagtttgatgtgatcgtaatagggacgggtttgcctgaatccatcattgcagctgcatgttcaagaagtggccggagagttctgcatgttgattcaagaagctactatggaggaaactgggccagttttagcttttcaggactattgtcctggctaaaggaataccaggaaaacagtgacattgtaagtgacagtccagtgtggcaagaccagatccttgaaaatgaagaagccattgctcttagcaggaaggacaaaactattcaacatgtggaagtattttgttatgccagtcaggatttgcatgaagatgtcgaagaagctggtgcactgcagaaaaatcatgctcttgtgacatctgcaaactccacagaagctgcagattctgccttcctgcctacggaggatgagtcattaagcactatgagctgtgaaatgctcacagaacaaactccaagcagcgatccagagaatgcgctagaagtaaatggtgctgaagtgacaggggaaaaagaaaaccattgtgatgataaaacttgtgtgccatcaacttcagcagaagacatgagtgaaaatgtgcctatagcagaagataccacagagcaaccaaagaaaaacagaattacttactcacaaattattaaagaaggcaggagatttaatattgatttagtatcaaagctgctgtattctcgaggattactaattgatcttctaatcaaatctaatgttagtcgatatgcagagtttaaaaatattaccaggattcttgcatttcgagaaggacgagtggaacaggttccgtgttccagagcagatgtctttaatagcaaacaacttactatggtagaaaagcgaatgctaatgaaatttcttacattttgtatggaatatgagaaatatcctgatgaatataaaggatatgaagagatcacattttatgaatatttaaagactcaaaaattaacccccaacctccaatatattgtcatgcattcaattgcaatgacatcagagacagccagcagcaccatagatggtctcaaagctaccaaaaactttcttcactgtcttgggcggtatggcaacactccatttttgtttcctttatatggccaaggagaactcccccagtgtttctgcaggatgtgtgctgtgtttggtggaatttattgtcttcgccattcagtacagtgccttgtagtggacaaagaatccagaaaatgtaaagcaattatagatcagtttggtcagagaataatctctgagcatttcctcgtggaggacagttactttcctgagaacatgtgctcacgtgtgcaatacaggcagatctccagggcagtgctgattacagatagatctgtcctaaaaacagattcagatcaacagatttccattttgacagtgccagcagaggaaccaggaacttttgctgttcgggtcattgagttatgttcttcaacgatgacatgcatgaaaggcacctatttggttcatttgacttgcacatcttctaaaacagcaagagaagatttagaatcagttgtgcagaaattgtttgttccatatactgaaatggagatagaaaatgaacaagtagaaaagccaagaattctgtgggctctttacttcaatatgagagattcgtcagacatcagcaggagctgttataatgatttaccatccaacgtttatgtctgctctggcccagattgtggtttaggaaatgataatgcagtcaaacaggctgaaacacttttccaggaaatctgccccaatgaagatttctgtccccctccaccaaatcctgaagacattatccttgatggagacagtttacagccagaggcttcagaatccagtgccataccagaggctaactcggagactttcaaggaaagcacaaaccttggaaacctagaggagtcctctgaataatggatatacaccaaactggatacccaactttggaaattctgactggtctcagagtctacttgatagaaggactgtttgagaaatgttagaaagcagcagcaattataaggcaaaataggtaatagaaatccaaaaggggattttccttatagaggacattccaagaacacacaacacttataaagcacattgacttgctcattttaaataccaaacttgtgtgactagcagatgaaaattataaatcaattgattctcaggaatgtaactgtggatatgaaagtgatcctatgcattgttaataattccatggtcttaggacaattttgcttaccactttggatctttgtttgaaagccacattttcagaaccagctcatgtattttctttggttatttgaattttattttctttatggacaagagcatcataacataatgataaaaacatatagaaaaactaaagtatcatgatctagatagaagcctgtatttggaatacaggtttgttttgctttctatgttgagaagcattgaaaatgctaatataaaggtgtttagacatttttacgaataagtcagtagtgttttttagtatcagtagtgatatttgtttgtaaattatttacatattgggaaaggtcaataatgaagaaatgaaagaatggaaggaaaggtgtggataggctcattggtatttgaatattctgtctgtcaagtaactagagtattaggctaattgtctacagacctaatttaatcctggctgtcctactgatgatatttggtaaattgtttaacttctgagcctacgtttctccatatataaagtggaaatagtattactatgcctactatatgagaatggttatgaagacaatgcaatgccatgtttagaatcggtttgccagaagaaaattgttttagaattttcccattgacttgatgaatctcaaaagtctcacgcaggaaataattgcttgctgtcagtcaacttccaaacaaaatagatcacagtgtttttattgcattaagctttttaaatgaaaatttcttttttaaagtagtattttatagtcttacagaccagtaaaaatagtaacaagtagaattgtggttttgaaatattactaaggaaaacactctataaattgttttattccttttctggtaggtaaacctgcaaccaccaaggactccaaattgtgtatgacagttggtaagccctaatatacactacataaaaacgttagggctgcctgtaatcccagcactttgggaagctgaggtgggtagatcacttgaggtcaggagttcgagaccagcctggccaacatggcgaaaccctgtctctactaaaaatacaaaattttagctgggtgttatggtgggcacctgtaatcccagctactttgaagatgaggtagcagactcacttgaaccagggaggcggaggttgcagtgagccaagattttgccactgcactccagcctgggtgacagagcaagactctgtctcacaaaaaaaaaaaaagggggctgtacataggcagcaaactaagctgcagtgatgttgcctatatttaaattttctcaaatggccaagctctgatggtctactttatttgagcaatagttgagacttataattgcctataaataaacaaacaaatgaactatttgtttttttttctcacaacatctggcctatattgtctgtcaggaagccatggctccaatgtaaagtacatagttcttacatacttcaactgcagctggtccctgacctcaccaggtttcagagatgttcttaaaggaagccagctgtggcaggtcacagattcatgggaaatggaaagaaccaaggaatatagctcttgcctcacctttctacccactgcagatatagttcaagccagagtaatggaagaacttaacttactagcctctcaggctgctcctatccctacctcccagtgtacagcccctccccatctctttagtcccctttccctcacttccccttttataatgtcacacaaatcagggacagtaggatcacattataacctactttgtcatagggattcgatttttcttatatcaaatcatgtttcctgaaacccagctggggcatatgcactcaatgtctaatacatacttattaatgtaccggatattggccttgcccctggatatcagcaatatattataaaaggttccagtagatgagacgattgagtctgaatacaattgcagtaaattgtgccaataaagatattgtactgttacggtcttagagttaaagccgcttgaatgcagcatgcacattcatgtaaacagacaatcagggtaggcctagaataaccacaaaaattctattggccttactgcagccacctatatgtagaacaatggaggagatagtttgtggtccattattgtaccctgtttcatccattagcatcagaatctctctttcaggtcatttattaaatatgattgaaatgtttaaaagttcctgaacatgattcatgatgattaaaatatcatacaactgataaaagactttaagaactttatatatttcctgttgcctcaaaatgtaacagaaattattcttagagctttgattttagctatcctaattactgcaaataaatatttgttcttatagttttaaatcaaaaagaaaagtcttgttataaaaccttaagcttgaaatcatattaataaaatatattgtacatagtggaaaattttcagtagctaatttaaaatttcagaaaatgctattaaagaattttgattcaagtatttaaactgtttagttatgcatgcttcttattaaccgaaaatgataataccatttagtttagtgatcagtatgagaagcaatacctaatcctatgttgctattgtattttttcctagttggtgtgcctgctcagaaaaacatatactgtatgtgtatacatacctgtgtatatataaaaggtcaatttatatatttttctataggaaaatggagtaacaagttccctatctcccatatttatttgtccatagtaaaatggccacattgatgataatttctagaactagtttctgagattgtcagccctttgtctaaaataatggcagtattaatgattgacttctgtcactgccatagttacctggattgtcagccttggtagcctttgtctaaagtcctaaagagttccaaaaaaaatgtgttgaaatttaattgctaaatagtggttggtgattctttacagtaggaattgtaataattttcttgcaaataagttatttactgctattgatattgaataatttgtcttttattcagatatatttcaaaaagcatgaatatatgattattcataaattgtatactttaccagtaagttttcagaggaaataaagacttttaaatccttttca

SEQ ID NO: 450 - DNA, 5051 bp, Homo Sapiens
  NM_000392
ggatgaaaggtcatcctttacggagaacatcagaatggtagataattcctgttccactttctttgatgaaacaagtaaagaagaaacaacacaatcatattaatagaagagtcttcgttccagacgcagtccaggaatcatgctggagaagttctgcaactctactttttggaattcctcattcctggacagtccggaggcagacctgccactttgttttgagcaaactgttctggtgtggattcccttgggcttcctatggctcctggccccctggcagcttctccacgtgtataaatccaggaccaagagatcctctaccaccaaactctatcttgctaagcaggtattcgttggttttcttcttattctagcagccatagagctggcccttgtactcacagaagactctggacaagccacagtccctgctgttcgatataccaatccaagcctctacctaggcacatggctcctggttttgctgatccaatacagcagacaatggtgtgtacagaaaaactcctggttcctgtccctattctggattctctcgatactctgtggcactttccaatttcagactctgatccggacactcttacagggtgacaattctaatctagcctactcctgcctgttcttcatctcctacggattccagatcctgatcctgatcttttcagcattttcagaaaataatgagtcatcaaataatccatcatccatagcttcattcctgagtagcattacctacagctggtatgacagcatcattctgaaaggctacaagcgtcctctgacactcgaggatgtctgggaagttgatgaagagatgaaaaccaagacattagtgagcaagtttgaaacgcacatgaagagagagctgcagaaagccaggcgggcactccagagacggcaggagaagagctcccagcagaactctggagccaggctgcctggcttgaacaagaatcagagtcaaagccaagatgcccttgtcctggaagatgttgaaaagaaaaaaaagaagtctgggaccaaaaaagatgttccaaaatcctggttgatgaaggctctgttcaaaactttctacatggtgctcctgaaatcattcctactgaagctagtgaatgacatcttcacgtttgtgagtcctcagctgctgaaattgctgatctcctttgcaagtgaccgtgacacatatttgtggattggatatctctgtgcaatcctcttattcactgcggctctcattcagtctttctgccttcagtgttatttccaactgtgcttcaagctgggtgtaaaagtacggacagctatcatggcttctgtatataagaaggcattgaccctatccaacttggccaggaaggagtacaccgttggagaaacagtgaacctgatgtctgtggatgcccagaagctcatggatgtgaccaacttcatgcacatgctgtggtcaagtgttctacagattgtcttatctatcttcttcctatggagagagttgggaccctcagtcttagcaggtgttggggtgatggtgcttgtaatcccaattaatgcgatactgtccaccaagagtaagaccattcaggtcaaaaatatgaagaataaagacaaacgtttaaagatcatgaatgagattcttagtggaatcaagatcctgaaatattttgcctgggaaccttcattcagagaccaagtacaaaacctccggaagaaagagctcaagaacctgctggcctttagtcaactacagtgtgtagtaatattcgtcttccagttaactccagtcctggtatctgtggtcacattttctgtttatgtcctggtggatagcaacaatattttggatgcacaaaaggccttcacctccattaccctcttcaatatcctgcgctttcccctgagcatgcttcccatgatgatctcctccatgctccaggccagtgtttccacagagcggctagagaagtacttgggaggggatgacttggacacatctgccattcgacatgactgcaattttgacaaagccatgcagttttctgaggcctcctttacctgggaacatgattcggaagccacagtccgagatgtgaacctggacattatggcaggccaacttgtggctgtgataggccctgtcggctctgggaaatcctccttgatatcagccatgctgggagaaatggaaaatgtccacgggcacatcaccatcaagggcaccactgcctatgtcccacagcagtcctggattcagaatggcaccataaaggacaacatcctttttggaacagagtttaatgaaaagaggtaccagcaagtactggaggcctgtgctctcctcccagacttggaaatgctgcctggaggagatttggctgagattggagagaagggtataaatcttagtgggggtcagaagcagcggatcagcctggccagagctacctaccaaaatttagacatctatcttctagatgaccccctgtctgcagtggatgctcatgtaggaaaacatatttttaataaggtcttgggccccaatggcctgttgaaaggcaagactcgactcttggttacacatagcatgcactttcttcctcaagtggatgagattgtagttctggggaatggaacaattgtagagaaaggatcctacagtgctctcctggccaaaaaaggagagtttgctaagaatctgaagacatttctaagacatacaggccctgaagaggaagccacagtccatgatggcagtgaagaagaagacgatgactatgggctgatatccagtgtggaagagatccccgaagatgcagcctccataaccatgagaagagagaacagctttcgtcgaacacttagccgcagttctaggtccaatggcaggcatctgaagtccctgagaaactccttgaaaactcggaatgtgaatagcctgaaggaagacgaagaactagtgaaaggacaaaaactaattaagaaggaattcatagaaactggaaaggtgaagttctccatctacctggagtacctacaagcaataggattgttttcgatattcttcatcatccttgcgtttgtgatgaattctgtggcttttattggatccaacctctggctcagtgcttggaccagtgactctaaaatcttcaatagcaccgactatccagcatctcagagggacatgagagttggagtctacggagctctgggattagcccaaggtatatttgtgttcatagcacatttctggagtgcctttggtttcgtccatgcatcaaatatcttgcacaagcaactgctgaacaatatccttcgagcacctatgagattttttgacacaacacccacaggccggattgtgaacaggtttgccggcgatatttccacagtggatgacaccctgcctcagtccttgcgcagctggattacatgcttcctggggataatcagcacccttgtcatgatctgcatggccactcctgtcttcaccatcatcgtcattcctcttggcattatttatgtatctgttcagatgttttatgtgtctacctcccgccagctgaggcgtctggactctgtcaccaggtccccaatctactctcacttcagcgagaccgtatcaggtttgccagttatccgtgcctttgagcaccagcagcgatttctgaaacacaatgaggtgaggattgacaccaaccagaaatgtgtcttttcctggatcacctccaacaggtggcttgcaattcgcctggagctggttgggaacctgactgtcttcttttcagccttgatgatggttatttatagagataccctaagtggggacactgttggctttgttctgtccaatgcactcaatatcacacaaaccctgaactggctggtgaggatgacatcagaaatagagaccaacattgtggctgttgagcgaataactgagtacacaaaagtggaaaatgaggcaccctgggtgactgataagaggcctccgccagattggcccagcaaaggcaagatccagtttaacaactaccaagtgcggtaccgacctgagctggatctggtcctcagagggatcacttgtgacatcggtagcatggagaagattggtgtggtgggcaggacaggagctggaaagtcatccctcacaaactgcctcttcagaatcttagaggctgccggtggtcagattatcattgatggagtagatattgcttccattgggctccacgacctccgagagaagctgaccatcatcccccaggaccccatcctgttctctggaagcctgaggatgaatctcgaccctttcaacaactactcagatgaggagatttggaaggccttggagctggctcacctcaagtcttttgtggccagcctgcaacttgggttatcccacgaagtgacagaggctggtggcaacctgagcataggccagaggcagctgctgtgcctgggcagggctctgcttcggaaatccaagatcctggtcctggatgaggccactgctgcggtggatctagagacagacaacctcattcagacgaccatccaaaacgagttcgcccactgcacagtgatcaccatcgcccacaggctgcacaccatcatggacagtgacaaggtaatggtcctagacaacgggaagattatagagtgcggcagccctgaagaactgctacaaatccctggacccttttactttatggctaaggaagctggcattgagaatgtgaacagcacaaaattctagcagaaggccccatgggttagaaaaggactataagaataatttcttatttaattttattttttataaaatacagaatacatacaaaagtgtgtataaaatgtacgttttaaaaaaggataagtgaacacccatgaacctactacccaggttaagaaaataaatgtcaccaggtacttgagaaacccctcgattgtctacctcgatcgtacttccttgctacccacccctcccagggacaaccactgtcctgaatttcacgataattattcctttg

SEQ ID NO: 451 - DNA, 1825 bp, Homo Sapiens
  NM_000396
acacatgctgcatacacacagaaacactgcaaatccactgcctccttccctcctccctacccttccttctctcagcatttctatccccgcctcctcctcttacccaaattttccagccgatcactggagctgacttccgcaatcccgatggaataaatctagcacccctgatggtgtgcccacactttgctgccgaaacgaagccagacaacagatttccatcagcaggatgtgggggctcaaggttctgctgctacctgtggtgagctttgctctgtaccctgaggagatactggacacccactgggagctatggaagaagacccacaggaagcaatataacaacaaggtggatgaaatctctcggcgtttaatttgggaaaaaaacctgaagtatatttccatccataaccttgaggcttctcttggtgtccatacatatgaactggctatgaaccacctgggggacatgaccagtgaagaggtggttcagaagatgactggactcaaagtacccctgtctcattcccgcagtaatgacaccctttatatcccagaatgggaaggtagagccccagactctgtcgactatcgaaagaaaggatatgttactcctgtcaaaaatcagggtcagtgtggttcctgttgggcttttagctctgtgggtgccctggagggccaactcaagaagaaaactggcaaactcttaaatctgagtccccagaacctagtggattgtgtgtctgagaatgatggctgtggagggggctacatgaccaatgccttccaatatgtgcagaagaaccggggtattgactctgaagatgcctacccatatgtgggacaggaagagagttgtatgtacaacccaacaggcaaggcagctaaatgcagagggtacagagagatccccgaggggaatgagaaagccctgaagagggcagtggcccgagtgggacctgtctctgtggccattgatgcaagcctgacctccttccagttttacagcaaaggtgtgtattatgatgaaagctgcaatagcgataatctgaaccatgcggttttggcagtgggatatggaatccagaagggaaacaagcactggataattaaaaacagctggggagaaaactggggaaacaaaggatatatcctcatggctcgaaataagaacaacgcctgtggcattgccaacctggccagcttccccaagatgtgactccagccagccaaatccatcctgctcttccatttcttccacgatggtgcagtgtaacgatgcactttggaagggagttggtgtgctatttttgaagcagatgtggtgatactgagattgtctgttcagtttccccatttgtttgtgcttcaaatgatccttcctactttgcttctctccacccatgacctttttcactgtggccatcaggactttccctgacagctgtgtactcttaggctaagagatgtgactacagcctgcccctgactgtgttgtcccagggctgatgctgtacaggtacaggctggagattttcacataggttagattctcattcacgggactagttagctttaagcaccctagaggactagggtaatctgacttctcacttcctaagttcccttctatatcctcaaggtagaaatgtctatgttttctactccaattcataaatctattcataagtctttggtacaagtttacatgataaaaagaaatgtgatttgtcttcccttctttgcacttttgaaataaagtatttatctcctgtctacagtttaataaatagcatctagtacacattcaaaaaaaaaaaaaaaa

SEQ ID NO: 452 - DNA, 4353 bp, Homo Sapiens
  NM_000397
attggaagaagaagcatagtatagaagaaaggcaaacacaacacattcaacctctgccaccatggggaactgggctgtgaatgaggggctctccatttttgtcattctggtttggctggggttgaacgtcttcctctttgtctggtattaccgggtttatgatattccacctaagttcttttacacaagaaaacttcttgggtcagcactggcactggccagggcccctgcagcctgcctgaatttcaactgcatgctgattctcttgccagtctgtcgaaatctgctgtccttcctcaggggttccagtgcgtgctgctcaacaagagttcgaagacaactggacaggaatctcacctttcataaaatggtggcatggatgattgcacttcactctgcgattcacaccattgcacatctatttaatgtggaatggtgtgtgaatgcccgagtcaataattctgatccttattcagtagcactctctgaacttggagacaggcaaaatgaaagttatctcaattttgctcgaaagagaataaagaaccctgaaggaggcctgtacctggctgtgaccctgttggcaggcatcactggagttgtcatcacgctgtgcctcatattaattatcacttcctccaccaaaaccatccggaggtcttactttgaagtcttttggtacacacatcatctctttgtgatcttcttcattggccttgccatccatggagctgaacgaattgtacgtgggcagaccgcagagagtttggctgtgcataatataacagtttgtgaacaaaaaatctcagaatggggaaaaataaaggaatgcccaatccctcagtttgctggaaaccctcctatgacttggaaatggatagtgggtcccatgtttctgtatctctgtgagaggttggtgcggttttggcgatctcaacagaaggtggtcatcaccaaggtggtcactcaccctttcaaaaccatcgagctacagatgaagaagaaggggttcaaaatggaagtgggacaatacatttttgtcaagtgcccaaaggtgtccaagctggagtggcacccttttacactgacatccgcccctgaggaagacttctttagtatccatatccgcatcgttggggactggacagaggggctgttcaatgcttgtggctgtgataagcaggagtttcaagatgcgtggaaactacctaagatagcggttgatgggccctttggcactgccagtgaagatgtgttcagctatgaggtggtgatgttagtgggagcagggattggggtcacacccttcgcatccattctcaagtcagtctggtacaaatattgcaataacgccaccaatctgaagctcaaaaagatctacttctactggctgtgccgggacacacatgcctttgagtggtttgcagatctgctgcaactgctggagagccagatgcaggaaaggaacaatgccggcttcctcagctacaacatctacctcactggctgggatgagtctcaggccaatcactttgctgtgcaccatgatgaggagaaagatgtgatcacaggcctgaaacaaaagactttgtatggacggcccaactgggataatgaattcaagacaattgcaagtcaacaccctaataccagaataggagttttcctctgtggacctgaagccttggctgaaaccctgagtaaacaaagcatctccaactctgagtctggccctcggggagtgcatttcattttcaacaaggaaaacttctaacttgtctcttccatgaggaaataaatgtgggttgtgctgccaaatgctcaaataatgctaattgataatataaataccccctgcttaaaaatggacaaaaagaaactataatgtaatggttttcccttaaaggaatgtcaaagattgtttgatagtgataagttacatttatgtggagctctatggttttgagagcacttttacaaacattatttcatttttttcctctcagtaatgtcagtggaagttagggaaaagattcttggactcaattttagaatcaaaagggaaaggatcaaaaggttcagtaacttccctaagattatgaaactgtgaccagatctagcccatcttactccaggtttgatactctttccacaatactgagctgcctcagaatcctcaaaatcagtttttatattccccaaaagaagaaggaaaccaaggagtagctatatatttctactttgtgtcatttttgccatcattattatcatactgaaggaaattttccagatcattaggacataatacatgttgagagtgtctcaacacttattagtgacagtattgacatctgagcatactccagtttactaatacagcagggtaactgggccagatgttctttctacagaagaatattggattgattggagttaatgtaatactcatcatttaccactgtgcttggcagagagcggatactcaagtaagttttgttaaatgaatgaatgaatttagaaccacacaatgccaagatagaattaatttaaagccttaaacaaaatttatctaaagaaataacttctattactgtcatagaccaaaggaatctgattctccctagggtcaagaacaggctaaggatactaaccaataggattgcctgaagggttctgcacattcttatttgaagcatgaaaaaagagggttggaggtggagaattaacctcctgccatgactctggctcatctagtcctgctccttgtgctataaaataaatgcagactaatttcctgcccaaagtggtcttctccagctagcccttatgaatattgaacttaggaattgtgacaaatatgtatctgatatggtcatttgttttaaataacacccaccccttattttccgtaaatacacacacaaaatggatcgcatctgtgtgactaatggtttatttgtattatatcatcatcatcatcctaaaattaacaacccagaaacaaaaatctctatacagagatcaaattcacactcaatagtatgttctgaatatatgttcaagagagagtctctaaatcactgttagtgtggccaagagcagggttttctttttgttcttagaactgctcccatttctgggaactaaaaccagttttatttgccccaccccttggagccacaaatgtttagaactcttcaacttcggtaatgaggaagaaggagaaagagctgggggaagggcagaagactggtttaggaggaaaaggaaataaggagaaaagagaatgggagagtgagagaaaataaaaaaggcaaaagggagagagaggggaagggggtctcatattggtcattccctgccccagatttcttaaagtttgatatgtatagaatataattgaaggaggtatacacatattgatgttgttttgattatctatggtattgaatcttttaaaatctggtcacaaattttgatgctgagggggattattcaagggactaggatgaactaaataagaactcagttgttctttgtcatactactattcctttcgtctcccagaatcctcagggcactgagggtaggtctgacaaataaggcctgctgtgcgaatatagcctttctgaaatgtaccaggatggtttctgcttagagacacttaggtccagcctgttcacactgcacctcaggtatcaattcatctattcaacagatatttattgtgttattactatgagtcaggctctgtttattgtttcaattctttacaccaaagtatgaactggagagggtacctcagttataaggagtctgagaatattggccctttctaacctatgtgcataattaaaaccagcttcatttgttgctccgagagtgtttctccaaggttttctatcttcaaaaccaactaagttatgaaagtagagagatctgccctgtgttatccagttatgagataaaaaatgaatataagagtgcttgtcattataaaagtttccttttttattctctcaagccaccagctgccagccaccagcagccagctgccagcctagctttttttttttttttttttttttagcacttagtatttagcatttattaacaggtactctaagaatgatgaagcattgtttttaatcttaagactatgaaggtttttcttagttcttctgcttttgcaattgtgtttgtgaaatttgaatacttgcaggctttgtatgtgaataattctagcgggggacctgggagataattcctacggggaattcttaaaactgtgctcaactattaaaatgaatgagctttcaaaaaaaaaaaaaaaaaaaaaaaaaaaaaaaaaaa

SEQ ID NO: 453 - DNA, 2923 bp, Homo Sapiens
  NM_000398
ctgctccggagtgacgcgggcccgggcgcgacggtctcggcggcggcggcggcggcgacagagcgagcgcggcgcggggccaccatgggggcccagctcagcacgttgggccatatggtgctcttcccagtctggttcctgtacagtctgctcatgaagctgttccagcgctccacgccagccatcaccctcgagagcccggacatcaagtacccgctgcggctcatcgaccgggagatcatcagccatgacacccggcgcttccgctttgccctgccgtcaccccagcacatcctgggcctccctgtcggccagcacatctacctctcggctcgaattgatggaaacctggtcgtccggccctatacacccatctccagcgatgatgacaagggcttcgtggacctggtcatcaaggtttacttcaaggacacccatcccaagtttcccgctggagggaagatgtctcagtacctggagagcatgcagattggagacaccattgagttccggggccccagtgggctgctggtctaccagggcaaagggaagttcgccatccgacctgacaaaaagtccaaccctatcatcaggacagtgaagtctgtgggcatgatcgcgggagggacaggcatcaccccgatgctgcaggtgatccgcgccatcatgaaggaccctgatgaccacactgtgtgccacctgctctttgccaaccagaccgagaaggacatcctgctgcgacctgagctggaggaactcaggaacaaacattctgcacgcttcaagctctggtacacgctggacagagcccctgaagcctgggactacggccagggcttcgtgaatgaggagatgatccgggaccaccttccacccccagaggaggagccgctggtgctgatgtgtggccccccacccatgatccagtacgcctgccttcccaacctggaccacgtgggccaccccacggagcgctgcttcgtcttctgagggccgggcacggtcacacggccacccgccccgcgcaccccacgccctgttcacgctcacccagtcacctccccacatcgcacactggggccccgggttcagcctggcctgcccgtgccctggtgaatcacctggctgagcagttcccctggagccccttcgggagcagggctgtgtcccagatgggccacggctgagccttcagagtacgtcctgcctggcacttactggtccttaccagagacgcccagccccatccctgtcctcatgacccctcgtccaccccccacacacactataaggctgagggctgccagcagccccgtctgcccaccattcccggccgtggaccatagtcgggatgtcagcagacacacatgggcagcccaaagctgcaggtgccagggcccaccccagcctcgcctgtcacccccactcccgcctcagggccaggcccaggcctcaccacctgacgctgcatgagacattgacaccagaaagccctcttgggggcactgctccctaccccagggccctggccagccgggagcttggctctcctctggctagagtgggaagagggggctggccatggggccctcccagaacctcagcatttccttccagcccatccaaacactgaggcagccttggggaaccccgagctggggggttggcagcccactgcaccgcctcagggttttggggtcctgggctggggccaccatccctgatggcagaactcccacaaccacatgtatttattcctctgtcctaaaccgtcccctccttccctcacccccagcacagggggattctgagcagtgcctcttgtctgagggacatatcagtgacctcgacgttgcctttagactacagttgtgttagcctcttgcgtattggctttttcagagtcatttatgagcagaaaaaaaaaaagtaaaactttgctaatattaacccttctctagctcctcgagggtctgtgacctgcaacacaaggggtggggtcaggaaagggctggggaagacctagcattttttttttcttttttttttttttttgagacggagtctccctttgtcacccaggctggagtggcatgatctcagctcactacaacctccacctctcgggttcaagcgattctcctgcctcagcctcccgagtagctgggactaaaagtgcccaccaccacacccagctagtttttgtatttttttttttttttttttgagacggagtctcgctctgtcgcccaggctggagtgcagtggcgggatctcggctcactgcaagctccgcctcccgggttcacgccattctcctgcctcagcctcccaagtagctgggactacaggcgcccgccactacgcccggctaattttttgtatttttagtagagacggggtttcaccgttttagccgggatggtctcgatctcctgacctcgtgatccgcccgcctcggcctcccaaagtgctgggattacaggcgtgagccactgcgcccggctccagcatttatttctgatgtatctttgtggtagaaaatttggaaagtgcagagaagtatacacaggaagaaaaattcccaacccccagaggcaaaccagctgaaaccacgcaaccccagtcaccccaatgcaccgcgaggctgctgcctcctgtcagggtcagatgagcctcgaggctcaggaaagtcagaggatgccatctgcatggtggtaaattacagaggtgatgaggcaaggtgggtgtggggctgttcttaaaacggggcagcaggaaggccccaaggagatggatttgggctgggacgggaagagagagctggccatgctggggtgggtgggtgttcaaatggtggaaacagcagacgcaaaggccctgccgttggaaccagcttgtggaataaactttcagaaacaga

SEQ ID NO: 454 - DNA, 2568 bp, Homo Sapiens
  NM_000400
ttcatgagggaggcgggtcgaccccgctgcacagtccggccggcgccatgaagctcaacgtggacgggctcctggtctacttcccgtacgactacatctaccccgagcagttctcctacatgcgggagctcaaacgcacgctggacgccaagggtcatggagtcctggagatgccctcaggcaccgggaagacagtatccctgttggccctgatcatggcataccagagagcatatccgctggaggtgaccaaactcatctactgctcaagaactgtgccagagattgagaaggtgattgaagagcttcgaaagttgctcaacttctatgagaagcaggagggcgagaagctgccgtttctgggactggctctgagctcccgcaaaaacttgtgtattcaccctgaggtgacacccctgcgctttgggaaggacgtcgatgggaaatgccacagcctcacagcctcctatgtgcgggcgcagtaccagcatgacaccagcctgccccactgccgattctatgaggaatttgatgcccatgggcgtgaggtgcccctccccgctggcatctacaacctggatgacctgaaggccctggggcggcgccagggctggtgcccatacttccttgctcgatactcaatcctgcatgccaatgtggtggtttatagctaccactacctcctggaccccaagattgcagacctggtgtccaaggaactggcccgcaaggccgtcgtggtcttcgacgaggcccacaacattgacaacgtctgcatcgactccatgagcgtcaacctcacccgccggacccttgaccggtgccagggcaacctggagaccctgcagaagacggtgctcaggatcaaagagacagacgagcagcgcctgcgggacgagtaccggcgtctggtggaggggctgcgggaggccagcgccgcccgggagacggacgcccacctggccaaccccgtgctgcccgacgaagtgctgcaggaggcagtgcctggctccatccgcacggccgagcatttcctgggcttcctgaggcggctgctggagtacgtgaagtggcggctgcgtgtgcagcatgtggtgcaggagagcccgcccgccttcctgagcggcctggcccagcgcgtgtgcatccagcgcaagcccctcagattctgtgctgaacgcctccggtccctgctgcatactctggagatcaccgaccttgctgacttctccccgctcaccctccttgctaactttgccacccttgtcagcacctacgccaaaggcttcaccatcatcatcgagccctttgacgacagaaccccgaccattgccaaccccatcctgcacttcagctgcatggacgcctcgctggccatcaaacccgtatttgagcgtttccagtctgtcatcatcacatctgggacactgtccccgctggacatctaccccaagatcctggacttccaccccgtcaccatggcaaccttcaccatgacgctggcacgggtctgcctctgccctatgatcatcggccgtggcaatgaccaggtggccatcagctccaaatttgagacccgggaggatattgctgtgatccggaactatgggaacctcctgctggagatgtccgctgtggtccctgatggcatcgtggccttcttcaccagctaccagtacatggagagcaccgtggcctcctggtatgagcaggggatccttgagaacatccagaggaacaagctgctctttattgagacccaggatggtgccgaaaccagtgtcgccctggagaagtaccaggaggcctgcgagaatggccgcggggccatcctgctgtcagtggcccggggcaaagtgtccgagggaatcgactttgtgcaccactacgggcgggccgtcatcatgtttggcgtcccctacgtctacacacagagccgcattctcaaggcgcggctggaatacctgcgggaccagttccagattcgtgagaatgactttcttaccttcgatgccatgcgccacgcggcccagtgtgtgggtcgggccatcaggggcaagacggactacggcctcatggtctttgccgacaagcggtttgcccgtggggacaagcgggggaagctgccccgctggatccaggagcacctcacagatgccaacctcaacctgaccgtggacgagggtgtccaggtggccaagtacttcctgcggcagatggcacagcccttccaccgggaggatcagctgggcctgtccctgctcagcctggagcagctagaatcagaggagacgctgaagaggatagagcagattgctcagcagctctgagtggggcgggtggggccataaacggttcctggtgactcctgagtcttgcctggccctggttcccagcggcggtggtgctagaaggtcttatgaagtcaggtgacatttctcactgtcacgtccacagcctttaatcgcaggagaaggcagctatccaccaggtacccagaggcaagggggggccaggagatgatagaccccctctcaccccaccagcccatccctcctgcactgttcc

SEQ ID NO: 455 - DNA, 3469 bp, Homo Sapiens
  NM_000401
tcccttcctgctgccaccttcccgccagccacagggatctgattcctcccagggggatgtcctgcgcctcagggtccggtggtggcctgcggcatcccttgcggtgccagaagccgtgggacgaggagtgtgaggaagaggctgtctgtgtcattatgtgtgcgtcggtcaagtataatatccggggtcctgccctcatcccaagaatgaagaccaagcaccgaatctactatatcaccctcttctccattgtcctcctgggcctcattgccactggcatgtttcagttttggccccattctatcgagtcctcaaatgactggaatgtagagaagcgcagcatccgtgatgtgccggttgttaggctgccagccgacagtcccatcccagagcggggggatctcagttgcagaatgcacacgtgttttgatgtctatcgctgtggcttcaacccaaagaacaaaatcaaggtgtatatctatgctctgaaaaagtacgtggatgactttggcgtctctgtcagcaacaccatctcccgggagtataatgaactgctcatggccatctcagacagtgactactacactgatgacatcaaccgggcctgtctgtttgttccctccatcgatgtgcttaaccagaacacactgcgcatcaaggagacagcacaagcgatggcccagctctctaggtgggatcgaggtacgaatcacctgttgttcaacatgttgcctggaggtcccccagattataacacagccctggatgtccccagagacagggccctgttggctggtggcggcttttctacgtggacttaccggcaaggctacgatgtcagcattcctgtctatagtccactgtcagctgaggtggatcttccagagaaaggaccaggtccacggcaatacttcctcctgtcatctcaggtgggtctccatcctgagtacagagaggacctagaagccctccaggtcaaacatggagagtcagtgttagtactcgataaatgcaccaacctctcagagggtgtcctttctgtccgtaagcgctgccacaagcaccaggtcttcgattacccacaggtgctacaggaggctactttctgtgtggttcttcgtggagctcggctgggccaggcagtattgagcgatgtgttacaagctggctgtgtcccggttgtcattgcagactcctatattttgcctttctctgaagttcttgactggaagagagcatctgtggttgtaccagaagaaaagatgtcagatgtgtacagtattttgcagagcatcccccaaagacagattgaagaaatgcagagacaggcccggtggttctgggaagcgtacttccagtcaattaaagccattgccctggccaccctgcagattatcaatgaccggatctatccatatgctgccatctcctatgaagaatggaatgaccctcctgctgtgaagtggggcagcgtgagcaatccactcttcctcccgctgatcccaccacagtctcaagggttcaccgccatagtcctcacctacgaccgagtagagagcctcttccgggtcatcactgaagtgtccaaggtgcccagtctatccaaactacttgtcgtctggaataatcagaataaaaaccctccagaagattctctctggcccaaaatccgggttccattaaaagttgtgaggactgctgaaaacaagttaagtaaccgtttcttcccttatgatgaaatcgagacagaagctgttctggccattgatgatgatatcattatgctgacctctgacgagctgcaatttggttatgaggtctggcgggaatttcctgaccggttggtgggttacccgggtcgtctgcatctctgggaccatgagatgaataagtggaagtatgagtctgagtggacgaatgaagtgtccatggtgctcactggggcagctttttatcacaagtattttaattacctgtatacctacaaaatgcctggggatatcaagaactgggtagatgctcatatgaactgtgaagatattgccatgaacttcctggtggccaacgtcacgggaaaagcagttatcaaggtaaccccacgaaagaaattcaagtgtcctgagtgcacagccatagatgggctttcactagaccaaacacacatggtggagaggtcagagtgcatcaacaagtttgcttcagtcttcgggaccatgcctctcaaggtggtggaacaccgagctgaccctgtcctgtacaaagatgactttcctgagaagctgaagagcttccccaacattggcagcttatgaaacgtgtcattggtggaggtctgaatgtgaggctgggacagagggagagaacaaggcctcccagcactctgatgtcagagtagtaggttaagggtggaaggttgacctacttggatcttggcatgcacccacctaacccactttctcaagaacaagaacctagaatgaatatccaagcacctcgagctatgcaacctctgttcttgtatttcttatgatctctgatgggttcttctcgaaaatgccaagtggaagactttgtggcatgctccagatttaaatccagctgaggctccctttgttttcagttccatgtaacaatctggaaggaaacttcacggacaggaagactgctggagaagagaagcgtgttagcccatttgaggtctggggaatcatgtaaagggtacccagacctcacttttagttatttacatcaatgagttctttcagggaaccaaacccagaattcggtgcaaaagccaaacatcttggtgggatttgataaatgccttgggacctggagtgctgggcttgtgcacaggaagagcaccagccgctgagtcaggatcctgtcagttccatgagctattcctctttggtttggctttttgatatgattaaaattattttttattcctttttctactgtgtcttaaacaccaattcctgatagtccaaggaaccacctttctcccttgatatatttaactccgtctttggcctgacaacagtcttctgcccatgtctgggaacacacgccaggaggaatgtctgataccctctgcatcaagcgtaagaaggtcccaaatcataaccattttaagaacagatgactcagaaacctccagaggaatctgtttgcttcctgattagatccagtcaatgttttaaaggtattgtcagagaaaaacagagggtctgtactagccatgcaaggagtcgctctagctggtacccgtaaaagttgtgggaattgtgacccccatcccaaggggatgccaaaatttctctcattcttttggtataaacttaacattagccagggaggttctggctaacgttaaatgctgctatacaactgctttgcaacagttgctggtatatttaaatcattaaatttcagcatttactaatactgcaaaaaaaaaaaaaaa

SEQ ID NO: 456 - DNA, 2395 bp, Homo Sapiens
  NM_000402
agaggcaggggctggcctgggatgcgcgcgcacctgccctcgccccgccccgcccgcacgaggggtggtggccgaggccccgccccgcacgcctcgcctgaggcgggtccgctcagcccaggcgcccgcccccgcccccgccgattaaatgggccggcggggctcagcccccggaaacggtcgtacacttcggggctgcgagcgcggagggcgacgacgacgaagcgcagacagcgtcatggcagagcaggtggccctgagccggacccaggtgtgcgggatcctgcgggaagagcttttccagggcgatgccttccatcagtcggatacacacatattcatcatcatgggtgcatcgggtgacctggccaagaagaagatctaccccaccatctggtggctgttccgggatggccttctgcccgaaaacaccttcatcgtgggctatgcccgttcccgcctcacagtggctgacatccgcaaacagagtgagcccttcttcaaggccaccccagaggagaagctcaagctggaggacttctttgcccgcaactcctatgtggctggccagtacgatgatgcagcctcctaccagcgcctcaacagccacatgaatgccctccacctggggtcacaggccaaccgcctcttctacctggccttgcccccgaccgtctacgaggccgtcaccaagaacattcacgagtcctgcatgagccagataggctggaaccgcatcatcgtggagaagcccttcgggagggacctgcagagctctgaccggctgtccaaccacatctcctccctgttccgtgaggaccagatctaccgcatcgaccactacctgggcaaggagatggtgcagaacctcatggtgctgagatttgccaacaggatcttcggccccatctggaaccgggacaacatcgcctgcgttatcctcaccttcaaggagccctttggcactgagggtcgcgggggctatttcgatgaatttgggatcatccgggacgtgatgcagaaccacctactgcagatgctgtgtctggtggccatggagaagcccgcctccaccaactcagatgacgtccgtgatgagaaggtcaaggtgttgaaatgcatctcagaggtgcaggccaacaatgtggtcctgggccagtacgtggggaaccccgatggagagggcgaggccaccaaagggtacctggacgaccccacggtgccccgcgggtccaccaccgccacttttgcagccgtcgtcctctatgtggagaatgagaggtgggatggggtgcccttcatcctgcgctgcggcaaggccctgaacgagcgcaaggccgaggtgaggctgcagttccatgatgtggccggcgacatcttccaccagcagtgcaagcgcaacgagctggtgatccgcgtgcagcccaacgaggccgtgtacaccaagatgatgaccaagaagccgggcatgttcttcaaccccgaggagtcggagctggacctgacctacggcaacagatacaagaacgtgaagctccctgacgcctacgagcgcctcatcctggacgtcttctgcgggagccagatgcacttcgtgcgcagcgacgagctccgtgaggcctggcgtattttcaccccactgctgcaccagattgagctggagaagcccaagcccatcccctatatttatggcagccgaggccccacggaggcagacgagctgatgaagagagtgggtttccagtatgagggcacctacaagtgggtgaacccccacaagctctgagccctgggcacccacctccacccccgccacggccaccctccttcccgccgcccgaccccgagtcgggaggactccgggaccattgacctcagctgcacattcctggccccgggctctggccaccctggcccgcccctcgctgctgctactacccgagcccagctacattcctcagctgccaagcactcgagaccatcctggcccctccagaccctgcctgagcccaggagctgagtcacctcctccactcactccagcccaacagaaggaaggaggagggcgcccattcgtctgtcccagagcttattggccactgggtctcactcctgagtggggccagggtgggagggagggacaagggggaggaaaggggcgagcacccacgtgagagaatctgcctgtggccttgcccgccagcctcagtgccacttgacattccttgtcaccagcaacatctcgagccccctggatgtcccctgtcccaccaactctgcactccatggccaccccgtgccacccgtaggcagcctctctgctataagaaaagcagacgcagcagctgggacccctcccaacctcaatgccctgccattaaatccgcaaacagcc

SEQ ID NO: 457 - DNA, 2588 bp, Homo Sapiens
  NM_000404
aggcgcgagggctggctgctgggccgacgaggggcggtgccaggccgtgggtccttagtcaagtgacgcgaagcggccggcctgggcgccgactgcagagccgggaggctggtggtcatgccggggttcctggttcgcatcctccctctgttgctggttctgctgcttctgggccctacgcgcggcttgcgcaatgccacccagaggatgtttgaaattgactatagccgggactccttcctcaaggatggccagccatttcgctacatctcaggaagcattcactactcccgtgtgccccgcttctactggaaggaccggctgctgaagatgaagatggctgggctgaacgccatccagacgtatgtgccctggaactttcatgagccctggccaggacagtaccagttttctgaggaccatgatgtggaatattttcttcggctggctcatgagctgggactgctggttatcctgaggcccgggccctacatctgtgcagagtgggaaatgggaggattacctgcttggctgctagagaaagagtctattcttctccgctcctccgacccagattacctggcagctgtggacaagtggttgggagtccttctgcccaagatgaagcctctcctctatcagaatggagggccagttataacagtgcaggttgaaaatgaatatggcagctactttgcctgtgattttgactacctgcgcttcctgcagaagcgctttcgccaccatctgggggatgatgtggttctgtttaccactgatggagcacataaaacattcctgaaatgtggggccctgcagggcctctacaccacggtggactttggaacaggcagcaacatcacagatgctttcctaagccagaggaagtgtgagcccaaaggacccttgatcaattctgaattctatactggctggctagatcactggggccaacctcactccacaatcaagaccgaagcagtggcttcctccctctatgatatacttgcccgtggggcgagtgtgaacttgtacatgtttataggtgggaccaattttgcctattggaatggggccaactcaccctatgcagcacagcccaccagctacgactatgatgccccactgagtgaggctggggacctcactgagaagtattttgctctgcgaaacatcatccagaagtttgaaaaagtaccagaaggtcctatccctccatctacaccaaagtttgcatatggaaaggtcactttggaaaagttaaagacagtgggagcagctctggacattctgtgtccctctgggcccatcaaaagcctttatcccttgacatttatccaggtgaaacagcattatgggtttgtgctgtaccggacaacacttcctcaagattgcagcaacccagcacctctctcttcacccctcaatggagtccacgatcgagcatatgttgctgtggatgggatcccccagggagtccttgagcgaaacaatgtgatcactctgaacataacagggaaagctggagccactctggaccttctggtagagaacatgggacgtgtgaactatggtgcatatatcaacgattttaagggtttggtttctaacctgactctcagttccaatatcctcacggactggacgatctttccactggacactgaggatgcagtgcgcagccacctggggggctggggacaccgtgacagtggccaccatgatgaagcctgggcccacaactcatccaactacacgctcccggccttttatatggggaacttctccattcccagtgggatcccagacttgccccaggacacctttatccagtttcctggatggaccaagggccaggtctggattaatggctttaaccttggccgctattggccagcccggggccctcagttgaccttgtttgtgccccagcacatcctgatgacctcggccccaaacaccatcaccgtgctggaactggagtgggcaccctgcagcagtgatgatccagaactatgtgctgtgacgttcgtggacaggccagttattggctcatctgtgacctacgatcatccctccaaacctgttgaaaaaagactcatgcccccacccccgcaaaaaaacaaagattcatggctggaccatgtatgatgatgaaagcctgtgtctttgagggattctaccctgaacatacctcacagatcctccctgtcatgccacatttcactgattggaatgtggaaatggaaaaggaatttaggatgtgcattttcacctgaggtttccctgcatccctgcagtgccaaagccccaccttcagggaccacctggaatgtgtgaggggctgacagcacagtaacgtgcatacatatctgcagggctggaatggaagctttaaaggtggtagtgatttttattttggaagaatcatgttacctttttgttaaataaaatttgtactcaaatgatgatgtcactgtttttaatgtgcaggtattgaattatatggtctgacttaaatcataactagacttgagtgggctgaataaaccacttcactaacttgaagttcaaaaggatggaaaata

SEQ ID NO: 458 - DNA, 3690 bp, Homo Sapiens
  NM_000405
aatcggtccaattctcggccgggaagtctctggccgggacggggcagggcgaacctgccagtgactggactcagcttctttgcgtaaccaatactggaaggcatttaaaggcacctctgccgccacagaccttgcagttaactccgccctgacccacccttcccgatgcagtccctgatgcaggctcccctcctgatcgccctgggcttgcttctcgcggcccctgcgcaagcccacctgaaaaagccatcccagctcagtagcttttcctgggataactgtgatgaagggaaggaccctgcggtgatcagaagcctgactctggagcctgaccccatcatcgttcctggaaatgtgaccctcagtgtcatgggcagcaccagtgtccccctgagttctcctctgaaggtggatttagttttggagaaggaggtggctggcctctggatcaagatcccatgcacagactacattggcagctgtacctttgaacacttctgtgatgtgcttgacatgttaattcctactggggagccctgcccagagcccctgcgtacctatgggcttccttgccactgtcccttcaaagaaggaacctactcactgcccaagagcgaattcgttgtgcctgacctggagctgcccagttggctcaccaccgggaactaccgcatagagagcgtcctgagcagcagtgggaagcgtctgggctgcatcaagatcgctgcctctctaaagggcatataacatggcatctgccacagcagaatggagcggtgtgaggaaggtcccttttcctctgttttgtgtttgccaaggccaaactcccactctctgcccccctttaatcccctttctacagtgagtccactaccctcactgaaaatcattttgtaccacttacattttaggctggggcaagcagccctgacctaagggagaatgagttggacagttcttgatagcccagggcatctgctgggctgaccacgttactcatccccgttaacattctctctaaagagcctcgttcatttccaaagcagttaaggaatgggaaccagagtgttttaggacctgaagaatctttatgactctctctctttcactcttttttttttttgtcactaagttaaaagcgaagtgagagtattaacgtttttgttctcctccggccccctgttacaatgaaggggcaaaagtatttgctcttagtctattcctcccttaacttctgtgactaatttttatttcctttctagatttgcccaattaatactagggtgcagtgtatcctggagaggtagggtgtgtgggggaggaatcccttgggggagatattaggagtgctctgttgtttacaaactcaggtacccgcagggcctagcaagagacttaaatgactgataagaaccgtgagaaacatgttgcttccaggcttgatttcgatttttcgctttttttttttttgagacagaatctcactttgtcaccaggctggagtgcagtggtgcaatctcacctcactgcaacctccgcctcctgggttcaagcaattctcctgcctcagcctcccaagtagcttggactacaggccctgccaccacgcccggctaatttgtgtatttttagtagagatggggtttcaccatgttggccaggatggtctcgatctcttgacctcgtgatctgtccaccttggccttgcaaagcgctggattacaggcatgagccactacacccagccgatttttcctttttgattaaagatgctattacaatgtaaatatttcttacacagaaagtcacagcacatgtgcccattgatacaaggctgctgaggcctggtctccagttggaaatataattaagggtggcaaggactggagtcagttggagagtgcatagccagtctgtgaagacaactgccagatactggcaatactccagcctggtgacagagtgagactctgtctcaaaaaaaaagtttcaatgtttactcctagagaagccaaaaatccagatttgtatatgaaatcttaccattttaaaagattggcagctaattatttttttaaaaagctgtgcagtgtgatgtgtcccaaacggactggctcatgggtggccacgtcacaacctctgatctcagaccgtgcatgccttgtcctcttaagacaactcctgtggcaccgtttctccctccacagggccaaagccatagtgtccggtcccaaggacaaggctcttccagtgctaggagaggtatgagcagcctctcacctgtgagctgtggggatcacaaggctgcctgcctcagtcttggagtcctgttgggtgaatgaggcagatgggaaagagcctcaccagcagctgcttttggagcaggggtccaaggaagagagggtggcctcgacatcaaactgcctggatttttctaccaccctgttacatcataacaacttctgaaacacacaccagccctgagttctgggctcatttgaagcctggaatagcaataaatctttttaacttgcggacagtttccccttgccttggctgcatatttcactgatcacatctcaggatttcaaaagcatttttggggtggggctcttttggttggaagggtttgttggaacggtacaggtgagccgaggtgattccagggacggacccttctgcaggagcttgagcttgcttgttgtctctgcttcatcgccatccagctcccttgtttgctattttgctttccatcacatcatgactgcggagagcaaaaatcacctagtgaccattgaacaggtcccagagacaaaatctttttatctgaggaatttaaaagggagcaaagaccacctggtgactatcaggccatgcagaggcaaaacgccttatttggggaaaattaaaagtaattagactttcctattatctaaagcaggcatctggttccagatttcttttccccgaaaaaaaccttagaagtaactaaaatttctgtacatctccggaatgccatgctgaaactcactgcaaccccacggtcccgctttaaggtccataaatatccctaaggaaaaatccaccgtggtacattcagtcctctcaccgaggtgccccatggcagtcttctgcagcattcttctaatacctttcctttttcaaacctatactgttgttggtgaattctttttaccaacccacgagttgaccacttcccaatgccggggatctgacacctcacctggcaatgacctccacagccgtttccctctgttggatcttccagccttattctcaacagttcatttttagttcacattcttgaccgaatctcagtagctcagttaatctttttatgtctgctctgctcttgggtcatatgttccgtgaggtttcttaggggtgggggatgaggagttaaaggtggcatcttcaatcgcaggtcaaagcagactttaataaatggtgctgagccaactggaaagccccttggagaaagttgaagttagacctgtacttcacaccatatgcaagaatgaactccatctggatccaggatccaaatgtaagaaaatgaagccatataaatacagaaggaaacgtggtggaaatatccagtggcaacaaaatattgacacatttgactacatgaagataataaaaatgcttagtaaaaacacaataaaa

SEQ ID NO: 459 - DNA, 6010 bp, Homo Sapiens
  NM_000411
acgagagggcgcagcgcggcgcggcagggattcgcgggcgaccacccggcgcaggagcggccgcgtttcggcctcagaatccattgaagacttgaacaagtgggccctatttcttgtgtctccttttatacttgaagcagaacacatagcatttgtgacggagagcatttgggtacaaagtgagaatttacagagatcatcctcttcagaaacagttcggtttttgcccactagggatgatgtggtttctcatgaggttacttgctctaaaggactttatattttggaaccataagagcacccttgtggcccaggcactttatggatgatcccttttagtgctcccagtaaccttccaagattgtcaagtggtcagactgttgtttgccattagcttgcagacctggggatccttatcggctaattgctgaagcaagtgtggacaacttcagcaagctgggggtggcgttcatggaagatagactccacatggataatggactggtaccccaaaagattgtgtcggtgcacttgcaggactccactctgaaggaagttaaggatcaggtctcaaacaagcaagcccagatcctagagccgaagcctgaaccttctcttgagattaagcctgagcaggacggtatggagcatgttggcagagatgacccaaaggctcttggtgaagaacccaaacaaaggagaggcagtgcctctgggagtgagcctgctggggacagtgacaggggagggggccccgttgagcattatcacctccatctgtctagttgccacgagtgtctggaacttgagaacagcaccattgagtcagtcaagtttgcgtctgccgagaacattccagaccttccctacgattatagcagcagtttggagagtgttgctgatgagacctcccccgaaagagaagggaggagagtcaacctcacgggaaaggcacccaacatcctcctctatgtgggctccgactcccaggaagccctcggccggttccacgaggtccggtctgtgctggccgactgtgtggacattgacagttatattctctaccacctgctggaggacagtgctctcagagacccgtggacggacaactgtctgctgttggtcattgctaccagggagtccattcccgaagacctgtaccagaagttcatggcctatctttctcagggagggaaggtgttgggcctgtcttcatccttcacctttggtggctttcaggtgacaagcaagggtgcactgcacaagacagtccagaacttggttttctccaaggctgaccagagcgaggtgaagctcagcgtcttgagcagtggctgcaggtaccaggaaggccccgtccggctcagccccggcaggctccagggccacctggagaatgaggacaaggacaggatgattgtgcatgtgccttttggaactcgcgggggagaagctgttctttgccaggtgcacttagaactacctcccagctccaacatagtgcaaactccagaagattttaacttgctcaagtcaagcaattttagaagatacgaagtccttagagagattctgacaacccttggcctcagctgtgacatgaaacaagttcctgccttaactcctctttacttgctgtcagctgcggaggaaatcagggatcctcttatgcagtggcttgggaaacatgtggactccgagggagaaataaaatccggccagctctctcttagatttgtttcatcctacgtgtctgaagtagaaataaccccatcttgtatacctgtggtgaccaacatggaggccttctcatcagaacatttcaacttagagatctatcgccaaaatctgcagaccaagcagttggggaaagtaattttgtttgccgaagtgacccccacaacgatgcgtctcctggatgggctgatgtttcagacaccgcaggaaatgggcttaatagtgatcgcggcccggcagaccgagggcaaaggacggggagggaatgtgtggctgagccctgtgggatgtgctctttctactctgctcatctccattccactgagatcccagctgggacagaggatcccgtttgtccagcatctgatgtccgtggctgtcgtggaagcagtgaggtccattcccgagtatcaggatatcaacttacgagtgaagtggcccaacgatatttattacagtgacctcatgaagatcggcggagttctggttaactcaacactcatgggagaaacattttatatacttattggctgtggatttaatgtgactaacagtaaccctaccatctgcatcaacgacctcatcacagaatacaataaacaacacaaggcagaactgaagcccttaagagccgattatctcatcgccagagtcgtgactgtgctggagaaactgatcaaagagtttcaggacaaagggcccaacagcgtccttcccctttattaccgatactgggtccacagtggtcagcaagtccatctgggcagcgcagagggaccaaaggtgtccatcgttggcctggacgattctggcttcctccaggttcaccaggagggcggcgaggttgtgactgtgcacccggacggcaactccttcgacatgctgagaaacctcatcctccccaaacggcggtaatgccgggcgtccccgagacgcggctgcctgtccgtgcccatgcatctggaaatctaatttagagttgtaggtgaattttcttttcctccaattcatttgttaagtctttgttctttttctgtgtttctgtttgtttttaggtttgttttgttgtcgttttctttggtgtttgaagaggctctgggatagatggttaagaagtagaaaatttagtttagggaaagccctcccacaggtgggaaattgctctcccctctgtggcttggacttacgtttattgtcaaggggagtttttacatggaaatgacaatgggaaaattcagatattttcttagtagtgcagacctttacccctagtctatgaaaaaacaaaccaaaatatgctcttgcgcccaggccagtggtgagttagaggtatgctatcactgtttgtaagcatctggggaggtactgaactgtaagaacatgcttggacacttagtcattgttctgtgtttttattaatgaagaaaagggaagacagacttccaagagttactgtccacccggtggtgtggccccatagcgaagtctaaatgcctgtagagatagagctagctggtgtggttgcagtgaccttgtagaggaaatcagttcattactttgacatcattcagtgagctctcctttcctaaggaagtttaaatgtccttagttagggactgactttcttaagtaagtttaaatttactacatattgtgaagagacaggatcaagttcagaatccttaaatgtctgattaggcatcacttggatgaggaggtgggcgatttggctctgacagctggagatgaaggcacactcataccacatacaagggaggatttggagcttttaagccagtttcagatttactctgaaatgtggagcattcctgcaagactgtgcagctcacggaatatagaagacatggcattttactcagaagtcataagtttttgcccccctcatttacctcgtattaccaagaaagaaaatgttatcgatactaaacaccatcagttcagagggaggatgtgtgtgtgtgcccgcatatgtgtgtgcgtgcgtgtgtgcgcacatagctttaaaagaagacattcaaaatttgatgtgctacaagcctcatgaaagaacaaaagaaatgaagccttttgatatgcattcgctattcccagatgtacgccatgccttttccatgtccctcctatctctgttgaacttatgaatcatactcattacttttcagctttttaaaaggccaatttttgtccagttttctctcttccagtcccagctgaaattagtggaaagaaagtttgatggagctttcagctttgaacaaaatcccttcattgtaaactagcaccatctttatccaggtcttacccagtcaggctaattccagaaacttgtggtttttagtatagtctgtctacctttagccaggcacaggacagccctatgaaaaaatacccaatatatattttttggaaatgaaacattaaaagaacttaaaaagtaatttttggaaatgaggcttcaattagaattatttttctcaaaaaacaaacaaacaaaaaacacaaaaaaaaccactcttctccaaatgcccaagccttctttcaaaattagttagaaacttaagtaaaatacaagtccacaccatccccaaattacaaaatggacttacccttgagagggcatctgcagaatatcatcagggacaaagatctcgaggctaacgatgtaggtttcatttctcagactttgtaatataaggcaagccctctctcagagctgccatcatcactttttgaatttctttgggggttatttaatgaaaaacatgctatgttttgttttaagctgaagtcctattctggacactctgctttgggaaaaaatgttatcatttaatttcctttctgcaaattaaaactaatgaagtgtggccttgtcaaaggctatggagatgttccgggcatactgctgtgctctgtgctttccagcaggcgctcctccctcacgcaggagactcagttgtcctgagagagatgaagcagccttgaagcagatgctgcgttttccataaacctgattttgcctcacatgaaccaaagactctcaaaactccgcttctatagaattagctgaataaaggcattttactgatagctgttcgtgttagcgaaacctgtctacctgctatagcacactctccgatttgggccatttatgcaccccgcaacctgggatctcaaggagctttaaagtcttaatgggaacttggcattttcctgatgatctttaaaatgtggtcactaaactcaggattggcgtgtgcttttagaacactggagtagcccttgttttagaggctgtgcattgagtatcgaccgtattttgtaaaaggcaagatatcctcccttccaggctggtaacgggtttcaaggggactcttgaggaagtgccccctaaaatagaacacagcaataactgggcttcctgtccccacccccaccccagcagtgctctctggcactgggaactctgctagggagtggtggaagtaggaaggatttgtgtgcaaaggaaaatcgtggttgagtttcactgcagcaggctgacgttgcctgatgtgagagcaagtggccgactggggtgcgggtgcacaggtcgggggagcacaggccacagagcgcagcctctgggggtcccccaaggcacagcatatacagcatggtcgccccttgccctggagtctgggaacaaagagaggagccagcctccccgcactgcttcagatggaaaagggaggcagggtgggcttccgttctccagatctgtttgctcttaacaggcagaacatgggagaatccttattcctggttaatcactatgcatatttgaaataaaagaaagcgtaagcctctgcaattttaacttctcaaaggatgtctctgaaaagaatcactttaaaccaatgcctataaaaagcaagtctaccaaaataaactaagactttctatgtggtttgggctccctcttatttttacaagtttcatttttaaaagtaggcaactactttgggttacagtatttttattcatatttaaacatttttacaaaataaataaagtgttttacatagtaaggaatatgtacgtatttccaagtattaagaagccaagtgtttttttttttgacgtattattgacaaatgtattcagcgccatacacaagagaaatattattactccaaagaacgaaagttaacaaaactccaaagcaaaaacccttttaatggaggtgagaaataaatttaatgtaacaaca

SEQ ID NO: 460 - DNA, 2138 bp, Homo Sapiens
  NM_000416
acagaccccggtgacggaagtgacgtaaggccggggctggagggcagtgctgggctggtcccgcaggcgctcggggttggagccagcgaccgtcggtagcagcatggctctcctctttctcctaccccttgtcatgcagggtgtgagcagggctgagatgggcaccgcggatctggggccgtcctcagtgcctacaccaactaatgttacaattgaatcctataacatgaaccctatcgtatattgggagtaccagatcatgccacaggtccctgtttttaccgtagaggtaaagaactatggtgttaagaattcagaatggattgatgcctgcatcaatatttctcatcattattgtaatatttctgatcatgttggtgatccatcaaattctctttgggtcagagttaaagccagggttggacaaaaagaatctgcctatgcaaagtcagaagaatttgctgtatgccgagatggaaaaattggaccacctaaactggatatcagaaaggaggagaagcaaatcatgattgacatatttcacccttcagtttttgtaaatggagacgagcaggaagtcgattatgatcccgaaactacctgttacattagggtgtacaatgtgtatgtgagaatgaacggaagtgagatccagtataaaatactcacgcagaaggaagatgattgtgacgagattcagtgccagttagcgattccagtatcctcactgaattctcagtactgtgtttcagcagaaggagtcttacatgtgtggggtgttacaactgaaaagtcaaaagaagtttgtattaccattttcaatagcagtataaaaggttctctttggattccagttgttgctgctttactactctttctagtgcttagcctggtattcatctgtttttatattaagaaaattaatccattgaaggaaaaaagcataatattacccaagtccttgatctctgtggtaagaagtgctactttagagacaaaacctgaatcaaaatatgtatcactcatcacgtcataccagccattttccttagaaaaggaggtggtctgtgaagagccgttgtctccagcaacagttccaggcatgcataccgaagacaatccaggaaaagtggaacatacagaagaactttctagtataacagaagtggtgactactgaagaaaatattcctgacgtggtcccgggcagccatctgactccaatagagagagagagttcttcacctttaagtagtaaccagtctgaacctggcagcatcgctttaaactcgtatcactccagaaattgttctgagagtgatcactccagaaatggttttgatactgattccagctgtctggaatcacatagctccttatctgactcagaatttcccccaaataataaaggtgaaataaaaacagaaggacaagagctcataaccgtaataaaagcccccacctcctttggttatgataaaccacatgtgctagtggatctacttgtggatgatagcggtaaagagtccttgattggttatagaccaacagaagattccaaagaattttcatgagatcagctaagttgcaccaactttgaagtctgattttcctggacagttttctgctttaatttcatgaaaagattatgatctcagaaattgtatcttagttggtatcaaccaaatggagtgacttagtgtacatgaaagcgtaaagaggatgtgtggcattttcacttttggcttgtaaagtacagacttttttttttttttaaacaaaaaaagcattgtaacttatgaacctttacatccagataggttaccagtaacggaacagtatccagtactcctggttcctaggtgagcaggtgatgccccagggacctttgtagccacttcactttttttcttttctctgccttggtatagcatatgtttttgtaagtttatgcatacagtaattttaagtaatttcagaagaaattctgcaagcttttcaaaattggacttaaaatctaattcaaactaatagaattaatggaatatgtaaatagaaacgtgtatattttttatgaaacattacagttagagatttttaaataaagaattttaaaactcgaaaaaaaaaaaaaaaaaa

SEQ ID NO: 461 - DNA, 3678 bp, Homo Sapiens
  NM_000418
ccccgcgcggcgcgggccagggaagggccacccaggggtcccccacttcccgcttgggcgcccggacggcgaatggagcaggggcgcgcagataattaaagatttacacacagctggaagaaatcatagagaagccgggcgtggtggctcatgcctataatcccagcacttttggaggctgaggcgggcagatcacttgagatcaggagttcgagaccagcctggtgccttggcatctcccaatggggtggctttgctctgggctcctgttccctgtgagctgcctggtcctgctgcaggtggcaagctctgggaacatgaaggtcttgcaggagcccacctgcgtctccgactacatgagcatctctacttgcgagtggaagatgaatggtcccaccaattgcagcaccgagctccgcctgttgtaccagctggtttttctgctctccgaagcccacacgtgtatccctgagaacaacggaggcgcggggtgcgtgtgccacctgctcatggatgacgtggtcagtgcggataactatacactggacctgtgggctgggcagcagctgctgtggaagggctccttcaagcccagcgagcatgtgaaacccagggccccaggaaacctgacagttcacaccaatgtctccgacactctgctgctgacctggagcaacccgtatccccctgacaattacctgtataatcatctcacctatgcagtcaacatttggagtgaaaacgacccggcagatttcagaatctataacgtgacctacctagaaccctccctccgcatcgcagccagcaccctgaagtctgggatttcctacagggcacgggtgagggcctgggctcagtgctataacaccacctggagtgagtggagccccagcaccaagtggcacaactcctacagggagcccttcgagcagcacctcctgctgggcgtcagcgtttcctgcattgtcatcctggccgtctgcctgttgtgctatgtcagcatcaccaagattaagaaagaatggtgggatcagattcccaacccagcccgcagccgcctcgtggctataataatccaggatgctcaggggtcacagtgggagaagcggtcccgaggccaggaaccagccaagtgcccacactggaagaattgtcttaccaagctcttgccctgttttctggagcacaacatgaaaagggatgaagatcctcacaaggctgccaaagagatgcctttccagggctctggaaaatcagcatggtgcccagtggagatcagcaagacagtcctctggccagagagcatcagcgtggtgcgatgtgtggagttgtttgaggccccggtggagtgtgaggaggaggaggaggtagaggaagaaaaagggagcttctgtgcatcgcctgagagcagcagggatgacttccaggagggaagggagggcattgtggcccggctaacagagagcctgttcctggacctgctcggagaggagaatgggggcttttgccagcaggacatgggggagtcatgccttcttccaccttcgggaagtacgagtgctcacatgccctgggatgagttcccaagtgcagggcccaaggaggcacctccctggggcaaggagcagcctctccacctggagccaagtcctcctgccagcccgacccagagtccagacaacctgacttgcacagagacgcccctcgtcatcgcaggcaaccctgcttaccgcagcttcagcaactccctgagccagtcaccgtgtcccagagagctgggtccagacccactgctggccagacacctggaggaagtagaacccgagatgccctgtgtcccccagctctctgagccaaccactgtgccccaacctgagccagaaacctgggagcagatcctccgccgaaatgtcctccagcatggggcagctgcagcccccgtctcggcccccaccagtggctatcaggagtttgtacatgcggtggagcagggtggcacccaggccagtgcggtggtgggcttgggtcccccaggagaggctggttacaaggccttctcaagcctgcttgccagcagtgctgtgtccccagagaaatgtgggtttggggctagcagtggggaagaggggtataagcctttccaagacctcattcctggctgccctggggaccctgccccagtccctgtccccttgttcacctttggactggacagggagccacctcgcagtccgcagagctcacatctcccaagcagctccccagagcacctgggtctggagccgggggaaaaggtagaggacatgccaaagcccccacttccccaggagcaggccacagacccccttgtggacagcctgggcagtggcattgtctactcagcccttacctgccacctgtgcggccacctgaaacagtgtcatggccaggaggatggtggccagacccctgtcatggccagtccttgctgtggctgctgctgtggagacaggtcctcgccccctacaacccccctgagggccccagacccctctccaggtggggttccactggaggccagtctgtgtccggcctccctggcaccctcgggcatctcagagaagagtaaatcctcatcatccttccatcctgcccctggcaatgctcagagctcaagccagacccccaaaatcgtgaactttgtctccgtgggacccacatacatgagggtctcttaggtgcatgtcctcttgttgctgagtctgcagatgaggactagggcttatccatgcctgggaaatgccacctcctggaaggcagccaggctggcagatttccaaaagacttgaagaaccatggtatgaaggtgattggccccactgacgttggcctaacactgggctgcagagactggaccccgcccagcattgggctgggctcgccacatcccatgagagtagagggcactgggtcgccgtgccccacggcaggcccctgcaggaaaactgaggcccttgggcacctcgacttgtgaacgagttgttggctgctccctccacagcttctgcagcagactgtccctgttgtaactgcccaaggcatgttttgcccaccagatcatggcccacgtggaggcccacctgcctctgtctcactgaactagaagccgagcctagaaactaacacagccatcaagggaatgacttgggcggccttgggaaatcgatgagaaattgaacttcagggagggtggtcattgcctagaggtgctcattcatttaacagagcttccttaggttgatgctggaggcagaatcccggctgtcaaggggtgttcagttaaggggagcaacagaggacatgaaaaattgctatgactaaagcagggacaatttgctgccaaacacccatgcccagctgtatggctgggggctcctcgtatgcatggaacccccagaataaatatgctcagccaccctgtgggccgggcaatccagacagcaggcataaggcaccagttaccctgcatgttggcccagacctcaggtgctagggaaggcgggaaccttgggttgagtaatgctcgtctgtgtgttttagtttcatcacctgttatctgtgtttgctgaggagagtggaacagaaggggtggagttttgtataaataaagtttctttgtctctttaaaaaaaaaaa

SEQ ID NO: 462 - DNA, 3334 bp, Homo Sapiens
  NM_000419
attcctgcctgggaggttgtggaagaaggaagatggccagagctttgtgtccactgcaagccctctggcttctggagtgggtgctgctgctcttgggaccttgtgctgcccctccagcctgggccttgaacctggacccagtgcagctcaccttctatgcaggccccaatggcagccagtttggattttcactggacttccacaaggacagccatgggagagtggccatcgtggtgggcgccccgcggaccctgggccccagccaggaggagacgggcggcgtgttcctgtgcccctggagggccgagggcggccagtgcccctcgctgctctttgacctccgtgatgagacccgaaatgtaggctcccaaactttacaaaccttcaaggcccgccaaggactgggggcgtcggtcgtcagctggagcgacgtcattgtggcctgcgccccctggcagcactggaacgtcctagaaaagactgaggaggctgagaagacgcccgtaggtagctgctttttggctcagccagagagcggccgccgcgccgagtactccccctgtcgcgggaacaccctgagccgcatttacgtggaaaatgattttagctgggacaagcgttactgtgaagcgggcttcagctccgtggtcactcaggccggagagctggtgcttggggctcctggcggctattatttcttaggtctcctggcccaggctccagttgcggatattttctcgagttaccgcccaggcatccttttgtggcacgtgtcctcccagagcctctcctttgactccagcaacccagagtacttcgacggctactgggggtactcggtggccgtgggcgagttcgacggggatctcaacactacagaatatgtcgtcggtgcccccacttggagctggaccctgggagcggtggaaattttggattcctactaccagaggctgcatcggctgcgcggagagcagatggcgtcgtattttgggcattcagtggctgtcactgacgtcaacggggatgggaggcatgatctgctggtgggcgctccactgtatatggagagccgggcagaccgaaaactggccgaagtggggcgtgtgtatttgttcctgcagccgcgaggcccccacgcgctgggtgcccccagcctcctgctgactggcacacagctctatgggcgattcggctctgccatcgcacccctgggcgacctcgaccgggatggctacaatgacattgcagtggctgccccctacgggggtcccagtggccggggccaagtgctggtgttcctgggtcagagtgaggggctgaggtcacgtccctcccaggtcctggacagccccttccccacaggctctgcctttggcttctcccttcgaggtgccgtagacatcgatgacaacggatacccagacctgatcgtgggagcttacggggccaaccaggtggctgtgtacagagctcagccagtggtgaaggcctctgtccagctactggtgcaagattcactgaatcctgctgtgaagagctgtgtcctacctcagaccaagacacccgtgagctgcttcaacatccagatgtgtgttggagccactgggcacaacattcctcagaagctatccctaaatgccgagctgcagctggaccggcagaagccccgccagggccggcgggtgctgctgctgggctctcaacaggcaggcaccaccctgaacctggatctgggcggaaagcacagccccatctgccacaccaccatggccttccttcgagatgaggcagacttccgggacaagctgagccccattgtgctcagcctcaatgtgtccctaccgcccacggaggctggaatggcccctgctgtcgtgctgcatggagacacccatgtgcaggagcagacacgaatcgtcctggactgtggggaagatgacgtatgtgtgccccagcttcagctcactgccagcgtgacgggctccccgctcctagttggggcagataatgtcctggagctgcagatggacgcagccaacgagggcgagggggcctatgaagcagagctggccgtgcacctgccccagggcgcccactacatgcgggccctaagcaatgtcgagggctttgagagactcatctgtaatcagaagaaggagaatgagaccagggtggtgctgtgtgagctgggcaaccccatgaagaagaacgcccagataggaatcgcgatgttggtgagcgtggggaatctggaagaggctggggagtctgtgtccttccagctgcagatacggagcaagaacagccagaatccaaacagcaagattgtgctgctggacgtgccggtccgggcagaggcccaagtggagctgcgagggaactcctttccagcctccctggtggtggcagcagaagaaggtgagagggagcagaacagcttggacagctggggacccaaagtggagcacacctatgagctccacaacaatggccctgggactgtgaatggtcttcacctcagcatccaccttccgggacagtcccagccctccgacctgctctacatcctggatatacagccccaggggggccttcagtgcttcccacagcctcctgtcaaccctctcaaggtggactgggggctgcccatccccagcccctcccccattcacccggcccatcacaagcgggatcgcagacagatcttcctgccagagcccgagcagccctcgaggcttcaggatccagttctcgtaagctgcgactcggcgccctgtactgtggtgcagtgtgacctgcaggagatggcgcgcgggcagcgggccatggtcacggtgctggccttcctgtggctgcccagcctctaccagaggcctctggatcagtttgtgctgcagtcgcacgcatggttcaacgtgtcctccctcccctatgcggtgcccccgctcagcctgccccgaggggaagctcaggtgtggacacagctgctccgggccttggaggagagggccattccaatctggtgggtgctggtgggtgtgctgggtggcctgctgctgctcaccatcctggtcctggccatgtggaaggtcggcttcttcaagcggaaccggccacccctggaagaagatgatgaagagggggagtgatggtgcagcctacactattctagcaggagggttgggcgtgctacctgcaccgccccttctccaacaagttgcctccaagctttgggttggagctgttccattgggtcctcttggtgtcgtttccctcccaacagagctgggctaccccccctcctgctgcctaataaagagactgagccctg

SEQ ID NO: 463 - DNA, 2162 bp, Homo Sapiens
  NM_000421
cactccctgggctaaacagcatcaccatgtctgttcgatacagctcaagcaagcactactcttcctcccgcagtggaggaggaggaggaggaggaggatgtggaggaggaggaggagtgtcatccctaagaatttctagcagcaaaggctcccttggtggaggatttagctcaggggggttcagtggtggctcttttagccgtgggagctctggtgggggctgctttgggggctcatcaggtggctatggaggattaggaggttttggtggaggtagctttcgtggaagctatggaagtagcagctttggtgggagttatggaggcagctttggagggggcagtttcggaggtggcagctttggtgggggcagctttggtggaggcggctttggtggaggcggctttggaggaggctttggtggtggatttggaggagatggtggccttctctctggaaatgaaaaagtaaccatgcagaatctgaatgaccgcctggcttcctacttggacaaagttcgggctctggaagaatcaaactatgagctggaaggcaaaatcaaggagtggtatgaaaagcatggcaactcacatcagggggagcctcgtgactacagcaaatactacaaaaccatcgatgaccttaaaaatcagattctcaacctaacaactgataatgccaacatcctgcttcagatcgacaatgccaggctggcagctgatgacttcaggctgaagtatgagaatgaggtagctctgcgccagagcgtggaggctgacatcaacggcctgcgtagggtgctggatgagctgaccctgaccaaggctgacctggagatgcaaattgagagcctgactgaagagctggcctatctgaagaagaaccacgaggaggaaatgaaagaccttcgaaatgtgtccactggtgatgtgaatgtggaaatgaatgctgccccgggtgttgatctgactcaacttctgaataacatgagaagccaatatgaacaacttgctgaacaaaaccgcaaagatgctgaagcctggttcaatgaaaagagcaaggaactgactacagaaattgataataacattgaacagatatccagctataaatctgagattactgaattgagacgtaatgtacaagctctggagatagaactacagtcccaactggccttgaaacaatccctggaagcctccttggcagaaacagaaggtcgctactgtgtgcagctctcacagattcaggcccagatatccgctctggaagaacagttgcaacagattcgagctgaaaccgagtgccagaatactgaataccaacaactcctggatattaagatccgactggagaatgaaattcaaacctaccgcagcctgctagaaggagagggaagttccggaggcggcggacgcggcggcggaagtttcggcggcggctacggcggcggaagctccggcggcggaagctccggcggcggccacggcggcggccacggcggcagttccggcggcggctacggaggcggaagctccggcggcggaagctccggcggcggctacgggggcggaagctccagcggcggccacggcggcagttccagcggcggctacggtggtggcagttccggcggcggcggcggcggctacgggggcggcagctccggcggcggcagcagctccggcggcggatacggcggcggcagctccagcggaggccacaagtcctcctcttccgggtccgtgggcgagtcttcatctaagggaccaagatactaacaaaaccagagtaatcaagacaattattgaagaggtggcgcccgacggtagagttctttcatctatggttgaatcagaaaccaagaaacactactattaaactgcatcaagaggaaagagtctcccttcacacagaccattatttacagatgcatggaaaacaaagtctccaagaaaacacttctgtcttgatggtctatggaaatagaccttgaaaataaggtgtctacaaggtgttttgtggtttctgtatttcttcttttcactttaccagaaagtgttctttaatggaaagaaaaacaactttctgttctcatttactaatgaatttcaataaactttcttactgatgcaaactaaaaaaaaaaaaaaaaaaaaaaa

SEQ ID NO: 464 - DNA, 2429 bp, Homo Sapiens
  NM_000433
acactccacccctactcgccctctctctctctgcttctttccttttctctctcatggtagggttatgagtcagttgccaaaaggtggggacatttcctgatgcatttgcaacactgagaagttatcttaagggaggctgggccccattctactcatctggcccagaaagtgaacaccttgggggccactaaggcagccctgctaggggagacgctccaacctgtcttctctctgtctcctggcagctctcttggcctcctagtttctacctaatcatgtccctggtggaggccatcagcctctggaatgaaggggtgctggcagcggacaagaaggactggaagggagccctggatgccttcagtgccgtccaggacccccactcccggatttgcttcaacattggctgcatgtacactatcctgaagaacatgactgaagcagagaaggcctttaccagaagcattaaccgagacaagcacttggcagtggcttacttccaacgagggatgctctactaccagacagagaaatatgatttggctatcaaagaccttaaagaagccttgattcagcttcgagggaaccagctgatagactataagatcctggggctccagttcaagctgtttgcctgtgaggtgttatataacattgctttcatgtatgccaagaaggaggaatggaaaaaagctgaagaacagttagcattggccacgagcatgaagtctgagcccagacattccaaaatcgacaaggcgatggagtgtgtctggaagcagaagctatatgagccagtggtgatccctgtgggcaagctgtttcgaccaaatgagagacaagtggctcagctggccaagaaggattacctaggcaaggcgacggtcgtggcatctgtggtggatcaagacagtttctctgggtttgcccctctgcaaccacaggcagctgagcctccacccagaccgaaaaccccagagatcttcagggctctggaaggggaggctcaccgtgtgctatttgggtttgtgcctgagacaaaagaagagctccaggtcatgccagggaacattgtctttgtcttgaagaagggcaatgataactgggccacggtcatgttcaacgggcagaaggggcttgttccctgcaactaccttgaaccagttgagctgcggatccaccctcagcagcagccccaggaggaaagctctccgcagtccgacatcccagctcctcctagttccaaagcccctggaagaccccagctgtcaccaggccagaaacaaaaagaagagcctaaggaagtgaagctcagtgttcccatgccctacacactcaaggtgcactacaagtacacggtagtcatgaagactcagcccgggctcccctacagccaggtccgggacatggtgtctaagaaactggagctccggctggaacacactaagctgagctatcggcctcgggacagcaatgagctggtgcccctttcagaagacagcatgaaggatgcctggggccaggtgaaaaactactgcctgactctgtggtgtgagaacacagtgggtgaccaaggctttccagatgaacccaaggaaagtgaaaaagctgatgctaataaccagacaacagaacctcagcttaagaaaggcagccaagtggaggcactcttcagttatgaggctacccaaccagaggacctggagtttcaggaaggggatataatcctggtgttatcaaaggtgaatgaagaatggctggaaggggagtgcaaagggaaggtgggcattttccccaaagtttttgttgaagactgcgcaactacagatttggaaagcactcggagagaagtctaggatgtttcacaaactacaaagctgaagaaaatgaagccctattacttgtttgtaagatttagcacccttctgctgtatactgtactgagacattacagtttggaagtgttaactatttattccctgttaaaatttaacctactagacaatgatgtgagtacccaggatgatttcctggggcacagtgggtgaggagatggggacaggtgaatggaggagttaggggagaggaaaagtggatggaagtgtctggaaagggcacgagagagtcttccaggtactgatcctgtttcttgctctgagtgctagctagccagctgtgttcacactgtaaacattcatcaagctgtacatttggtgcacttttctgtgtcataccacaataaaaaaaaacctagcatcttacaaaaacaagacacccaagtccaggcccaaggagtaagtacaaatattcctgtttctgaaccattactgtaattggctcttaaggcttgaagtaaccttataggttactcataaggcatatacaaataaacttgtttgttttcttttttcaaaaaaaaaaaaaaaaaa

SEQ ID NO: 465 - DNA, 2088 bp, Homo Sapiens
  NM_000434
gagctacttgaagaccaattagagtccgggaagcgcggcggggcctccagaccggggcgggcttaagggtgacatctgcgctttaaagggtccgggtcagctgactcccgactctgtggagtctagctgccagggtcgcggcagctgcggggagagatgactggggagcgacccagcacggcgctcccggacagacgctgggggccgcggattctgggcttctggggaggctgtagggtttgggtgtttgccgcgatcttcctgctgctgtctctggcagcctcctggtccaaggctgagaacgacttcggtctggtgcagccgctggtgaccatggagcaactgctgtgggtgagcgggagacagatcggctcagtggacaccttccgcatcccgctcatcacagccactccgcggggcactcttctcgcctttgctgaggcgaggaaaatgtcctcatccgatgagggggccaagttcatcgccctgcggaggtccatggaccagggcagcacatggtctcctacagcgttcattgtcaatgatggggatgtccccgatgggctgaaccttggggcagtagtgagcgatgttgagacaggagtagtatttcttttctactccctttgtgctcacaaggccggctgccaggtggcctctaccatgttggtatggagcaaggatgatggtgtttcctggagcacaccccggaatctctccctggatattggcactgaagtgtttgcccctggaccgggctctggtattcagaaacagcgggagccacggaagggccgcctcatcgtgtgtggccatgggacgctggagcgggacggagtcttctgtctcctcagcgatgatcatggtgcctcctggcgctacggaagtggggtcagcggcatcccctacggtcagcccaagcaggaaaatgatttcaatcctgatgaatgccagccctatgagctcccagatggctcagtcgtcatcaatgcccgaaaccagaacaactaccactgccactgccgaattgtcctccgcagctatgatgcctgtgatacactaaggccccgtgatgtgaccttcgaccctgagctcgtggaccctgtggtagctgcaggagctgtagtcaccagctccggcattgtcttcttctccaacccagcacatccagagttccgagtgaacctgaccctgcgatggagcttcagcaatggtacctcatggcggaaagagacagtccagctatggccaggccccagtggctattcatccctggcaaccctggagggcagcatggatggagaggagcaggccccccagctctacgtcctgtatgagaaaggccggaaccactacacagagagcatctccgtggccaaaatcagtgtctatgggacactctgagctgtgccactgccacaggggtattctgccttcaggactctgccttcaggaacacgggtctgtagagggtctgctggagacgcctgaaagacagttccatcttcctttagactccagccttggcaaaatcaccttccctttaccagggaaatcacttcctttaggactgaaagctaggcgtcctctcccacaaaaaagtcctgccctcatctgagaatactgtctttccatatggctaagtgtggccccaccaccctctctgccctcccgggacattgattggtcctgtcttgggcaggtctagtgagctgtagaattgaatcaatgtgaactcagggaactggggaaggctgagcctcctctttggtgttgcggtaagataaccgacagggctggtgaaagtccccagatggcaggatatttggtttcagagtaaggactaggtgcaccaccatgactgactatcaatcaaaatgtttgtaacttaaaatttttaatgaaggataatgaatatttgtagagtctctatggttctgtcaatgcacatcttcgtgtctgttttcctcatgtatccttgtgagcctgggtgagttctggggagagacctgatgtgcgtactgcctgtgaaaatctgactttggcaaatcaaatcctcttttccttttgaaaaaaaaaaaaaaaaaa

SEQ ID NO: 466 - DNA, 3572 bp, Homo Sapiens
  NM_000436
atcgaagctaaagggctgacagaagggctgtagcggcaagtgtgcgccaacacagctgcacacgcccagacacctgaggcgctgagaggaacttccccgcgatccgccccggctgcacagagcctcttctccccgccggggccccgcccagcctcacttcttttaaaagcagcagccagcagcgcgccggtggcgtgcggctcgaaaggccgggaggacgtcatcgacgcgctgtcgagcctccagcccgcccgggtttccttcgcagtcgcgcaccgacgctcaaacgcgcgctccaacccgcagcctcctcctgcctcaccgcccgaagatggcggctctcaaactcctctcctccgggcttcggctctgcgcctctgcccgcggatctggggcaacctggtacaagggatgtgtttgttccttttccaccagtgctcatcgccataccaagttttatacagatccagtagaagctgtaaaagacatccctgatggtgccacggttttggttggtggttttgggctatgtggaattccagagaatcttatagatgctttactgaaaactggagtaaaaggactaactgcagtcagcaacaatgcaggggttgacaattttggtttggggcttttgcttcggtccaagcagataaaacgcatggtctcttcatatgtgggagaaaatgcagaatttgaacgacagtacttatctggtgaattagaagtggagctgacaccacagggcacacttgcagagaggatccgtgcaggcggggctggagttcctgcattttacaccccaacagggtatgggaccctggtacaagaaggaggatcgcccatcaaatacaacaaagatggcagtgttgccattgccagtaagccaagagaggtgagggagttcaatggtcagcactttattttggaggaagcaattacaggggattttgctttggtgaaagcctggaaggcggaccgagcaggaaacgtgattttcaggaaaagtgcaaggaatttcaacttgccaatgtgcaaagctgcagaaaccacagtggtagaggttgaagaaattgtggatattggagcatttgctccagaagacatccatattcctcagatttatgtacatcgccttataaagggagaaaaatatgagaaaagaattgagcgtttatcaatccggaaagagggagatggggaagccaaatctgctaaacctggagatgacgtaagggaacgaatcatcaagagggccgctcttgagtttgaggatggcatgtatgctaatttgggcataggaatccctctcctggccagcaattttatcagcccaaatataactgttcatcttcaaagtgaaaatggagttctgggtttgggtccatatccacgacaacatgaagctgatgcagatctcatcaatgcaggcaaggaaacagttactattcttccaggagcctcttttttctccagcgatgaatcatttgcaatgattagaggtggacacgtcgatctgacaatgctaggagcgatgcaggtttccaaatatggtgacctggctaactggatgatacctgggaagatggtgaaaggaatgggaggtgctatggatttagtgtccagtgcgaaaaccaaagtggtggtcaccatggagcattctgcaaagggaaatgcacataaaatcatggagaaatgtacattaccattgactggaaagcaatgtgtcaaccgcattattactgaaaaggctgtgtttgatgtggacaagaagaaagggttgactctgattgagctctgggaaggcctgacagtggatgacgtacagaagagtactgggtgtgattttgcagtttcaccaaaactcatgccaatgcagcagatcgcaaattgaaatatggatatttgtaccaggctgcgtgtttttcattttaaacacacaagatttaattgaaaggacatcaataatcataattgtgtatttaacaggtggttttttattagttttcttgtgtttcagactttatgcagccatataaactgttctctaggcatgctgtgacattttaataaaaagcaaaaggagcatttataattatctcatttgttaaggctgagaaggttgtttttataataggtaattatattgaatgcattttcactgaatatggtatgtatgctaaattatatgaacctttccccaagaagggccctagaaattgatgtggctttcctcttaaatattaattattagtcctgaaagaaagataacatatgtgatttttgtggttaggagagttgctgtcatgattgttttttcttcagcctcctctgacttttcttttggggcttcagattttatgattacatcttgtccccctagaacatcccccttcctcccatactgcttttaaacagatgcccaagaaggcaagcaggaatgcctcttgtgggggagggcagggagaaataactagttcaaaccaactatctatctatgctttgcaaagactaaggcgtattataggaagagggctagaaacctaactgattcttctcagttttctcattttaaaacagcccagtattcctttgtatcctcaagggtccttgagaatacttctgttattgagaccctgtgggctacttgtactgtacctcctctcaagccaagaagggctgtgggataatttaccatgaatccttagtagcaatgacagcagagttaaaaaataaaaggtgttttactttcaggctcttgttttggttcagaggagattttaaatattgaatgacacttctacagaacaacggtttttcttctgccaaggctacttcctttaacgaagtgcctttaattcagccttatccaactagggaaaataatgttggacaagtctaggatttgaagagtcagtgaacttttagtgtcagggaataaacatggtgggtagattaggtttgaaaaaaacttccttagaggtatttattctcaatacctgacaggggcccatgggaatgacttcagaagcatcccggataatagatgggtaaaaagtctaggcaccctgaagaacaggtgagacagctggcctctggacagaggtaggcatagtacagtacgatatatcattcctctggtcctaaatatacaaacttattcatgtttttaggtgatgatggtcattgaaactcacttcttttcaggtgtagctacaattgtgtaatgtacaatattagagaaaggacaggctttttatgagtaacacacaccatatataaaacagcctttctggctgaccacatggttaaatgcataccttcccagtactggggggaaaaaatgacccttcttagaatgtgcaagttccatgagagtaatatattgatatgattttgaaaagaattgttgatagttacatcttcaaacttatcattccagtatgcatctttaagataatgtgattctaagtagatgactttatattcttgattaaagagtgctatacatgttaagaaatgcattaaggaatacaataaatattctaaagtgatgtaaaaaaaaaaaaaaa

SEQ ID NO: 467 - DNA, 3581 bp, Homo Sapiens
  NM_000437
cgagaagtgcttccaagcgtccattttgagccttggaaactacgacgaccaaagggccacgggttcatgggtcgtttctcatttccgtcgagttaaacgtctggggctgcttctgaggaatcagcttgactggccagcaagttcagctccggcaagtcatttgattcacccggtgatgaaatgggggtcaaccagtctgtgggctttccacctgtcacaggaccccacctcgtaggctgtggggatgtgatggagggtcagaatctccaggggagcttctttcgactcttctacccctgccaaaaggcagaggagaccatggagcagcccctgtggattccccgctatgagtactgcactggcctggccgagtacctgcagtttaataagcgctgcgggggcttgctgttcaacctggcggtgggatcttgtcgcctgcctgttagctggaatggcccctttaagacaaaggactctggataccccttgatcatcttctcccatggcctaggagccttcaggactttgtattcagccttctgcatggagctggcctcacgtggctttgtggttgctgtgccagagcacagggaccggtcagcggcaaccacctatttctgcaagcaggccccagaagagaaccagcccaccaatgaatcgctgcaggaggaatggatccctttccgtcgagttgaggaaggggagaaggaatttcatgttcggaatccccaggtgcatcagcgggtaagcgagtgtttacgggtgttgaagatcctgcaagaggtcactgctgggcagactgtcttcaacatcttgcctggtggcttggatctgatgactttgaagggcaacattgacatgagccgtgtggctgtgatgggacattcatttggaggggccacagctattctggctttggccaaggagacccaatttcggtgtgcggtggctctggatgcttggatgtttcctctggaacgtgacttttaccccaaggcccgaggacctgtgttctttatcaatactgagaaattccagacaatggagagtgtcaatttgatgaagaagatatgtgcccagcatgaacagtctaggatcataaccgttcttggttctgttcatcggagtcaaactgactttgcttttgtgactggcaacttgattggtaaattcttctccactgaaacccgtgggagcctggacccctatgaagggcaggaggttatggtacgggccatgttggccttcctgcagaagcacctcgacctgaaagaagactataatcaatggaacaaccttattgaaggcattggaccgtcgctcaccccaggggccccccaccatctgtccagcctgtaggcacaactggccatttgtaaagtcacttcagccaagttttcatttgggagctacccaagggcacccatgagctcctatcaagaagtgatcaacgtgaccccttttcacagattgaaaggtgtaatcacactgctgcttggataactgggtactttgatcttagatttgatcttaaaatcactttgggactgggatcccttgctgattgacaaacagactttctgggaccttgatggagtggggaacaagcagtagagtgggactgggggagacccaggccccgggctgagcactgtgaggcctggatgtgaagactcagcccagcgaagctcattcccttacccccggccagtgctgctgcttcagtggaagagatgaagccaaaggacagaatgaaaatccctaccttcagagactctagcccagcccaacaccatctcttcctacctctcagccttctccctccccagggccacttgttgaagtctgagcactttatgtaaatttctaggtgtgagccgtgatcacattttctatttatttccaagtcttctcattgtatggaacatagtactacttatacttacagtagtaagttatacttgtgagcccacagagtggcagacagcatggctctcacagcacagggagaaaaactgaggtacacagaggtacctcagaagctctggatgtctttgggggttttgctaagtgtatcttgataggaaacaacaaaagcaggttgagatggggaagatgacagaacaacagtgttaaatggccatttgcacaggcctttgccacaacagagaagtagtttggtcagctaaaactcagctgcagcctggacagtagagcgagaccccatcttaaaaataaagaaggctgggcgtggtggctcatgcctgtaatcccaacactttgggaggccaaggcaggcagatcacttaaggccaggagttcaagaccacctggccaacatggtgaaaccccgtctctactaaaaatacaaaaaattagcctggcgtaatggcaggcgcctataatcccagctactcaggaggctgaagcagaagaatcacttgaacctaggaggcggaggttgcagtgagtcaagatcgcgccactgcactccagcctgggtgacagagcaagactctgtcttaaaaaaaaaaaaaagaaaaagaaaaatttaaaataaataaaatttaaaaacgcagaaggccactcccagagaggcctaggagtaccttggtcattttttcttgcctcaaatattataaacctccaacttgctcagaatcagggtgcttttattgtctgttttctggctctgaggcccttgccccaaatttaagtcagatacagactgaatttccattctgttctgtttataatatgaatgatattaatactcttgtttgcttaatgttatgttggaattttctgtttaatctgcagtagagcaagatggagagccatctggaattgacttccttctgtctttcttctgtgttcgcttactacttgggcccatgtgggaaaaaaactttaaaaggaaggaagtcttcttagggatccagttcaaagctatttgggggcatcaaactgaaactctcttctccactactcaagacttcgtgcctcagtccaagtaggtaagagcaaaagggaaatgcatctctacacaatggcccatggtcagggccaccagagcaagctgggcctagatctccacctgtcagtgactggccattctaagaggtgaaacagcagatcgttgaggctgtgagggaggatctttgaattcccatgagacatagcataagaagggtatcattaaagccctgggctctaaagttacagagcctggttttgagtcctggctccaccactgccaactgggtaaatttgagcaaatggtattctctttcttatctcagctcctgcgtttctaaaatgagggtctgcgttatgaatagttaggaggattaagtgagaggatgtataacccatgggttacttaaaagtatatttcctaccttccaaacatgagatttttctagttatagtttcttttctagcttgattgctttgtggtcagagaaaatgacccatatggtttccatccttcaaaatttgttgaaacttggttgttggcctagtatgagatcaatgttgtaaatgtgccatgtatgtttaaaaagactatatattctgaa

SEQ ID NO: 468 - DNA, 6831 bp, Homo Sapiens
  NM_000442
ccaggccccattgttcccggtttccagccatggctgccattacctgaccagcgccacagccggtctctctgcaggcgccgggagaagtgaccagagcaatttctgcttttcacagggcgggtttctcaacggtgacttgtgggcagtgccttctgctgagcgagtcatggcccgaaggcagaactaactgtgcctgcagtcttcactctcaggatgcagccgaggtgggcccaaggggccacgatgtggcttggagtcctgctgacccttctgctctgttcaagccttgagggtcaagaaaactctttcacaatcaacagtgttgacatgaagagcctgccggactggacggtgcaaaatgggaagaacctgaccctgcagtgcttcgcggatgtcagcaccacctctcacgtcaagcctcagcaccagatgctgttctataaggatgacgtgctgttttacaacatctcctccatgaagagcacagagagttattttattcctgaagtccggatctatgactcagggacatataaatgtactgtgattgtgaacaacaaagagaaaaccactgcagagtaccaggtgttggtggaaggagtgcccagtcccagggtgacactggacaagaaagaggccatccaaggtgggatcgtgagggtcaactgttctgtcccagaggaaaaggccccaatacacttcacaattgaaaaacttgaactaaatgaaaaaatggtcaagctgaaaagagagaagaattctcgagaccagaattttgtgatactggaattccccgttgaggaacaggaccgcgttttatccttccgatgtcaagctaggatcatttctgggatccatatgcagacctcagaatctaccaagagtgaactggtcaccgtgacggaatccttctctacacccaagttccacatcagccccaccggaatgatcatggaaggagctcagctccacattaagtgcaccattcaagtgactcacctggcccaggagtttccagaaatcataattcagaaggacaaggcgattgtggcccacaacagacatggcaacaaggctgtgtactcagtcatggccatggtggagcacagtggcaactacacgtgcaaagtggagtccagccgcatatccaaggtcagcagcatcgtggtcaacataacagaactattttccaagcccgaactggaatcttccttcacacatctggaccaaggtgaaagactgaacctgtcctgctccatcccaggagcacctccagccaacttcaccatccagaaggaagatacgattgtgtcacagactcaagatttcaccaagatagcctcaaagtcggacagtgggacgtatatctgcactgcaggtattgacaaagtggtcaagaaaagcaacacagtccagatagtcgtatgtgaaatgctctcccagcccaggatttcttatgatgcccagtttgaggtcataaaaggacagaccatcgaagtccgttgcgaatcgatcagtggaactttgcctatttcttaccaacttttaaaaacaagtaaagttttggagaatagtaccaagaactcaaatgatcctgcggtattcaaagacaaccccactgaagacgtcgaataccagtgtgttgcagataattgccattcccatgccaaaatgttaagtgaggttctgagggtgaaggtgatagccccggtggatgaggtccagatttctatcctgtcaagtaaggtggtggagtctggagaggacattgtgctgcaatgtgctgtgaatgaaggatctggtcccatcacctataagttttacagagaaaaagagggcaaacccttctatcaaatgacctcaaatgccacccaggcattttggaccaagcagaaggctagcaaggaacaggagggagagtattactgcacagccttcaacagagccaaccacgcctccagtgtccccagaagcaaaatactgacagtcagagtcattcttgccccatggaagaaaggacttattgcagtggttatcatcggagtgatcattgctctcttgatcattgcggccaaatgttattttctgaggaaagccaaggccaagcagatgccagtggaaatgtccaggccagcagtaccacttctgaactccaacaacgagaaaatgtcagatcccaatatggaagctaacagtcattacggtcacaatgacgatgtcagaaaccatgcaatgaaaccaataaatgataataaagagcctctgaactcagacgtgcagtacacggaagttcaagtgtcctcagctgagtctcacaaagatctaggaaagaaggacacagagacagtgtacagtgaagtccggaaagctgtccctgatgccgtggaaagcagatactctagaacggaaggctcccttgatggaacttagacagcaaggccagatgcacatccctggaaggacatccatgttccgagaagaacagataatccctgtatttcaagacctctgtgcacttatttatgaacctgccctgctcccacagaacacagcaattcctcaggctaagctgccggttcttaaatccatcctgctaagttaatgttgggtagaaagagatacagaggggctgttgaatttcccacataccctccttccaccaagttggaacatccttggaaattggaagagcacaagaggagatccagggcaaggccattgggatattctgaaacttgaatattttgttttgtgcagagataaagaccttttccatgcaccctcatacacagaaaccaattttcttttttatactcaatcatttctagcgcatggcctggttagaggctggttttttctcttttcctttggtccttcaaaggcttgtagttttggctagtccttgttctttggaaatacacagtgctgaccagacagcctccccctgtcccctctatgacctcgccctccacaaatgggaaaaccagactacttgggagcaccgcctgtgaaataccaacctgaagacaccgttcattcaggcaacgcacaaaacagaaaatgaaggtggaacaagcacagatgttcttcaactgtttttgtctacactctttctcttttcctctaccatgctgaaggctgaaagacaggaagatggtgccatcagcaaatattattcttaattgaaaacttgaaatgtgtatgtttcttactaatttttaaaaatgtattccttgccagggcaggcaaggtggctcacgcctgtaatcccagcacttcaggaggctgaggtgggcggatcacctgaggtcaggagtttgagaccagcctgatgaaaccctgtctctactaaaaatacaagaattagccgggcgtggtggcgcatgcctgtagtatcagctactcaagaggctgaggtgagattatcgcttgaacccaggaaacggaggttgtagtgagcggagatcgcgccactgcactccagcctgagtgacagagtgagaatccatctcaaaaaaaacaaaaaacaaaattgcttgctaaagaagtggtctcctgaggtcttaagacattcctgacagtgtcttgagtgggtgggagagaggctgctgtcattgcgctgtggaatttcacagatgagaaccacgcctagccaaaatcacttttcctgtttgcctcagtgacacagctgcagggaccctcgtggatgttgtattaaataaatttgacctttgctctttgcagatctgtgaaatgttgtcttctgaggggccacatgcatctatagtgctgaggactccttgggcctctgaagtcacagagagaaccgagcaggtctatgtttttgttttgttgttttgagacggagattcgctcttgttgcccgggctggactgcagcggcgcaacctctgctcactgcaacctccgcctcctgggttcaagcagttctcctgtctcagcctcccgagtagctgggattacaggcacatgtcaccacgcctggctaatttttgtatttttagtagagatggggtttcaccacgttggccaggctgatctcgaatgcctgacctttggtgatctgcccgccttgtcctcatgtgtgctccacaggcctttgggttgggattgcaggcgtgagccaccatgcccagcctagactcttttgacaatatgatgaaagctgttggttcctttccccaacacacacacaccgagttgtatcacgaaaatgtcatacaatttccaggttttctgagtggtgggctcagattgaggtcaaaggatcagacgacctctaacgaccttcatgtctctgttgatgatctggggacagccagatcccctgtgtccagggagttccttagtcccttgccaccaccagagaagggcaattgccacgggagctgcaaagaccctattcctactcctggtgccttacttatgcagcacgactgaattttttgttttgttttgttttgttgagacaggggcttgctctgttgcccaggctggagtgcagtggcacaacaatggctcaccgcagcctcgaacccctgggctcaagcgatcctcccatctcagcttcctgggtagctgggaccagaggcgtgagccgccatagctggctaatttttaattttttttttgcagagatgaggtttcaccatggtgcccaggctggtctcgaacttctgggctcaagtgatcctccctccttggcctcgcaaagtgctgggattgcaggcatgagccaccgcccccggcctgtggagcacacatgagtttaaaattactttcccttctgcctatatttccgaggaggaaacttcatgcgcagggatctttcttagtggatttaatggctaaaaggtctgtctgaatccaggacgctggctttagccttcctcggcagctgccgtaaccccggtgtctaaacctgaagcatcccaggagcacccactccaggagttttctcggccgcggaactcattagttagagcgccctcttgtgttctcatgtggtaatcggtcactgaaggacttaaaatggtccttagccaacacacagtaaaacttttccctcttctgaccccaagaggtcagccacccatttcatgagcatatactggtcgccccatcagcgttctctgattggctaactgaacccactccccgacctagactcaagacaggcgaagtgacgcttaggtcaacattcactcactaaagcaacgactgtcgggcgattttgtctcccgctggttttggaatggtgtctggagacatttttggttgtcacagctgggtgggtgtgctcccggcatctggtgggtagaaaccaagcatgctcctaaacatcctacaggcacagaaccgtctcccacgaccaagcatgatcaagtcccaaatgccaataatggccaggttgagaaactctgcacagaagcatccagttatttgtctgtttgctcaacaagcttgtgctcatcatgctctgtgttcctgacgctgtgctgggtgttggcggtgggaagattacaagagtcacatggcagctgtcctcctggaaggtacaacccagtagagatgcagactaacagagagccaattacaaagcagtgtgacaagcgtcatggtggaaaattaaaagctcaaacaagggcacatgggaggggcttccaacacagactttgggggatccaggaaggtctaagaggaaagtgggtctcaccaaagccttgaccataggcagagggtaccagtggaaaaggtggggtgaagaacattgaggacaaaaggaagaagtgcaggaaggccctgaggcaagggagtggggggtgccctggagggatggcagcagggcagtctgtcagacccaagtggcctccagccctagaagccaattagtcctcctcaaaaagctgtcactgtcccctaagaattgctgccaggctcccactggcctgactcagtctttgagagtcttaaggaggaggtctctgaaaggtacacaccaagaactctccccagcacagctgtttttaagactctccaccagcgtcattggcgtgttgggaagaaaccctctgccacagaggccagcttcagcctttgcctaacaccgcaagggcaaatggaaaggtaaacgggaaggagatgtctccccagcaggctatttgaggacagtcttccctgcagaagatctcaacctggggtccacagagtggaaatgttagagtagggagctaggcaaacatgagcaggacaggtgagggcccccacaggaatgtcaggctaccatcaggtgatggtcaggtggttgttaaactgtctctgtaaaataataattggttgcagccagctccaagcaaggacagtctctcaatagatacaaaacaccctgatctggtgatcagccgcttcccgataagatctcaggagctgggcaagcagcctggagcatgcgcaccaagaggcaaaatggcggaatttaaccagtatatgacctaccttcctctgggaacgcacgactggtaaggggaaaaatgcctcaagtgagcatgcgcgcaacttcagtaatcacactgtgcatgcgaccccttccaagtgctggcaggtcaccacatacgcggacagcctgctgcaagggaagaatcaggggagatgagacgtaaatcccagaactatgccaaatacataaaaccccaagttaagggtcaggcagggcacttagatctctcaagttgcctgcctgacccaagtgtagtgtacttccttttgttcctgctctaaaactttttaataaactctcactcctgctctaaaa

SEQ ID NO: 469 - DNA, 14798 bp, Homo Sapiens
  NM_000445
agtctggctgcggcggcagagctgaagtgagcggagccaccaggaggccatgtcgggtgaggacgctgaggtccgggcagtctctgaagatgtctccaatggaagcagtggctcgcccagccctggggacacactgccctggaaccttgggaaaacgcagcggagccggcgcagcgggggtggcgctgggagcaacgggagtgtcctggacccagctgagcgggcggtcattcgcatcgcagatgagcgggatcgtgtgcagaagaaaaccttcaccaagtgggtcaacaagcacctcatcaaggcccagaggcacatcagtgacctgtatgaagacctccgcgatggccacaacctcatctccctgctggaggtcctctcgggggacagcctgccccgggagaaggggaggatgcgtttccacaagctgcagaatgtccagattgccctggactacctccggcaccgccaggtgaagctggtgaacatcaggaatgatgacatcgctgacggcaaccccaagctgacccttggcctcatctggacaatcattctgcacttccagatctcagatatccaggtgagtgggcagtcggaggacatgacggccaaggagaagctgctgctgtggtcgcagcgaatggtggaggggtaccagggcctgcgatgcgacaacttcacctccagctggagagacggccgcctcttcaatgccatcatccaccggcacaagcccctgctcatcgacatgaacaaggtgtaccggcagaccaacctggagaacctggaccaggccttctctgtggcggagcgggacctgggagtgacgcggctcctggaccctgaggacgtggatgtccctcagcccgacgagaagtccatcatcacctacgtctcgtcgctgtatgacgccatgccccgcgtgccggacgtgcaggatggggtgagggccaacgagctgcagctgcgctggcaggagtaccgggagctggtgctgctgctgcttcagtggatgcgacaccacacggccgcctttgaggaacgcaggttcccctccagcttcgaggagattgagatcctgtggtctcagttcctgaagtttaaggagatggagctaccagccaaggaggccgacaagaacaggtccaagggcatctaccaatccctggagggagcggtgcaagcaggccagctcaaggtgccccctggctaccacccgctggatgtggagaaggagtggggcaagctgcacgtggccatcctggagcgggagaagcagctccgcagcgagtttgagaggctggagtgtcttcagcgcatcgtgaccaagctgcagatggaggcggggctgtgtgaggagcagctgaaccaggccgacgccctgctgcagtcggatgtccggctgctggctgcaggcaaagtgccacagcgggcgggggaggtggaacgggacttggacaaggcggatagcatgatccggctgctcttcaacgacgtgcagaccctcaaggatggacggcacccgcagggcgagcagatgtaccgcagggtgtaccgtctgcacgagcgcctggtagccatccgcaccgagtacaacctacggctgaaggcaggcgtggcggcccctgcaacccaggtggcccaggtgactctgcagagtgtgcagaggcgccccgagctggaggactccactctgcgctacctgcaggacctgctggcctgggtggaggagaaccagcaccgtgtggatggcgctgagtggggtgtggacctgcccagcgtggaggcgcagctgggcagccaccgaggcctgcaccagtccatcgaagaattccgggccaagatcgagcgggcacggagtgacgagggccagctctcccccgccacccggggtgcctaccgtgactgcctgggtcggctggacctgcagtacgccaagctgctgaactcctccaaggcccgcctcaggtccctggagagcttgcacagctttgtggcagccgccactaaggagctaatgtggctgaatgagaaggaggaggaggaggtgggcttcgactggagcgaccgcaacaccaacatgaccgccaagaaggagagctactcggcgctgatgcgggagctggagctgaaggagaagaagatcaaggagctccaaaatgctggggaccggctgctgcgggaggaccacccggcccggcccacggtggagtccttccaggcggccctgcagacgcagtggagctggatgctacagctgtgctgctgtatcgaggcacacctgaaggagaacgctgcctactttcagttcttctcagatgtgcgggaggccgaggggcagttgcagaagctgcaggaggcactgcgtaggaaatacagttgtgatcgctccgccaccgtcacccggctggaggacctgctgcaggatgcccaggacgagaaggaacagctgaacgagtacaagggccacctctcaggcctggccaagcgggccaaggccgtcgtgcagctgaagccccgccacccagcccaccccatgcggggccgcctgcccctgctggccgtgtgcgactataagcaggtggaggtgactgtgcacaagggtgacgagtgccagctggtgggccctgcacagccgtcccactggaaggtgctcagcagctccggcagcgaggccgccgtgccctccgtgtgcttcctggtgcccccgcccaaccaggaggcccaggaggccgtcaccaggctggaggcccagcaccaggccctggtcacgctgtggcaccagttgcacgtggacatgaagagccttctggcctggcagagccttcgccgcgacgtgcagctcatccgctcctggtccctggccacgttccgcaccctgaagccagaggagcagcgccaagccctgcacagcctggagctgcactaccaggccttcctgcgggacagccaggacgcgggcggcttcggacccgaggaccggctgatggctgagcgcgagtacggctcctgcagccaccactaccagcagctgctgcagagcctggaacagggtgcacaggaagagtctcgctgccagcgctgcatctccgagctcaaagacatccggctgcagctggaggcctgtgagacgcgcaccgtgcaccgcctgcggctgccgctggacaaagagccggcacgggagtgtgcccagcgcatcgccgagcagcagaaggcacaggcagaggtggaggggctgggcaagggggtcgcccggctctctgccgaggccgagaaggtcttggccctaccagagccatcgcctgcggcccccacgctgcgctcggagctggagctgacgctgggcaagctggagcaggtccgcagcctgtctgccatctacctggagaagctcaagaccatcagcctggtgatccgcggcacgcagggggccgaggaggtgctcagggcccacgaggagcagctcaaggaggcccaggccgtgccggccaccctcccggagctcgaggccaccaaggcctctctgaagaagctgcgggcccaggccgaggcacagcagcccacgttcgacgccctgcgggatgagctgcggggggcacaggaggtgggggagcgactgcagcagcggcacggggagcgggacgtggaggtggagcgctggcgggagcgggtcgcccagttgcttgagcgctggcaggctgtgctggcccagaccgacgtgcggcagcgcgagctcgagcaactgggccgccagctgcgttactaccgcgagagtgcagaccccttgggcgcctggctgcaggacgccaggcggcggcaggagcagatccaggccatgccgctggccgacagccaggctgtgcgggagcagctgcggcaggagcaggccctgctggaggagatcgagcgccacggcgagaaggtcgaggagtgccagaggtttgcgaaacagtacatcaacgccatcaaggactatgaactccagctggtgacgtacaaggcgcagcttgagccggtggcctccccggccaagaagcccaaggtccagtcgggatcagagagtgtcatccaggagtacgtggacctgcgtacgcactacagcgagctgaccacactgacgagccagtacatcaagttcatcagcgagactctgcggcgcatggaggaggaggagaggctggctgagcagcagcgggcagaggagcgcgagcggctggccgaggtggaggccgcgctggagaagcagcggcagctggccgaggcgcacgcccaggcaaaggcacaggcggagcgggaggcgaaggagctgcagcagcgcatgcaggaggaggtggtgcggcgggaggaggcggcggtggacgcgcagcagcagaagcgcagcattcaggaggagctgcagcagctgcggcagagctcggaggcggagatccaggccaaggcccggcaggcagaggcggctgagcgcagccggctgcgcatcgaggaggagatccgcgtggtgcgcctgcagttggaggccaccgagcgccagcgtggcggggctgagggggagctgcaggcactgcgtgcacgggcggaggaggctgaggcacaaaagcgacaggcgcaggaggaggccgagcgcttgcggaggcaggtgcaggacgagagccagcgtaagcggcaggcggaggtggagctggcctcgcgcgtgaaggccgaggccgaggcggcgcgcgagaagcagcgggccctgcaggccctggaggagctgcggctgcaggcggaggaggcggagcggcgcctgcggcaggccgaggtggagcgagcgcggcaggtacaggtggccctggagacggcgcagcgcagtgcagaggcggagctgcagagcaaacgcgcctccttcgccgagaagacggcacagctggagcgctccctgcaggaggaacacgtggctgtggcacagctgcgggaggaggctgagcggcgggcacagcagcaggccgaggccgagcgggcgcgcgaggaggcagagcgggagctggagcgctggcagctcaaggccaacgaggcgctacggctgcggctgcaggcggaggaggtggcgcagcagaagagcctggcgcaggccgaggctgagaagcagaaggaggaggcggagcgcgaggcgcggcggcgcggcaaggcggaggagcaggccgtccggcagcgggagctggctgaacaagagctggagaagcagcggcagctggcggaaggcaccgcgcagcagcgcctggccgcggagcaggagttgatccggctgcgggccgagacggagcagggggagcagcagcggcagctgctggaggaggagctggcccggctgcagcgtgaggcggctgcagccacgcagaaacggcaggagctggaagccgagctggccaaggtgcgggccgagatggaggtgctgctggccagcaaggcgagggctgaggaggagtcgcgctccaccagcgagaagtccaagcagaggctggaggccgaggccggccggttccgcgagctggccgaggaggccgcccgcctgcgtgccctggcggaagaggccaagcggcagcggcagctggccgaggaagacgcggcgcggcagcgggccgaggcggagcgggtgcttgcggagaagctggccgccatcggcgaggccacgcggctcaagacggaggcggagatcgcgctcaaggagaaggaggcggagaacgagcgcctgcggcggctggcggaggacgaggccttccagcggcggcggctggaggagcaggccgcgcaacacaaggctgacatcgaggagcgcctggcccagctgcgcaaggcatcggacagcgagctggagcggcagaaggggctggtggaggacacgctgaggcagcggcggcaggtggaggaggagatcctggcgctgaaggcgagcttcgagaaggcggccgctggcaaggcggagctggagctggagctgggacgcatccgcagcaacgcggaggacacgctgcgcagcaaggagcaggccgagctggaggctgcgaggcagcggcagctggcggcggaggaggagcggcggcgccgtgaggctgaggagcgcgtgcagaagagcctggcggccgaggaggaggccgcacggcagcggaaggcggcgctggaggaagtcgagcggctgaaagccaaggtggaggaggcgcggcgcctgcgggagcgagcggagcaggagtcggcgcggcagctgcagctggcccaggaggccgcccagaagcggctgcaggcggaagagaaggcacacgccttcgcggtgcagcagaaggagcaggagctacagcagacgctgcagcaggagcagagcgtgctggaccagctgcgcggcgaggcggaggcggcccggcgggcggctgaggaggcggaggaggcccgggtgcaggcggagcgtgaggcggcgcagtcccggcggcaggtggaagaggccgagcggctgaagcagtcggcagaggagcaggcacaggcccgggctcaggcacaggcggctgcagagaagctgcgcaaggaggccgagcaagaggcggcgcggcgggcacaggcggagcaggcggccctgcggcagaagcaggcagctgacgcggagatggagaagcataagaaattcgccgagcagacgctgcggcagaaggcgcaggtggagcaggagctgacaacactgcggctgcagctggaggagaccgaccaccagaagaacctgctggacgaggagctgcagcggctgaaggcggaggccacggaggccgcacgccagcgcagccaggtggaggaggagctcttctcggtgcgcgtgcagatggaggagctgagcaagctcaaggcacgcatcgaggctgagaaccgcgcactcatcttgcgtgacaaggacaatacgcagcgcttcctgcaggaggaggctgagaagatgaagcaggtggcggaggaggccgcgcggctgagtgtggcggcccaagaggctgcgcgactgcggcagctggcagaggaggacctggcacagcagcgggccttggcagagaagatgctcaaggagaagatgcaggcggtgcaggaggccacgcgactcaaggctgaggcggaactgctgcagcagcagaaggagcttgcgcaggagcaggcgcggcggctgcaggaggacaaggagcagatggcgcagcagctggcggaggagacgcagggcttccagcggacgctggaggccgagcggcagcggcagctggagatgagcgctgaggctgagcgcctcaagctgcgtgtggccgagatgagccgagcccaggcccgcgctgaggaggacgcccagcgcttccggaagcaggcggaggagatcggtgagaagctgcaccgcacggagctcgccacccaggagaaggtgaccctggtgcagacactggagatccagcgacagcagagtgaccatgatgccgagcgcctgcgggaggccatcgctgagctggagcgtgagaaggagaagctccaacaggaggccaaactgctgcagctcaagtctgaggagatgcagacggtgcagcaggagcagctgctgcaggagacgcaggccctgcagcaaagcttcctctctgaaaaggacagcctgctacagcgggagcgcttcatcgagcaggagaaggccaagctggagcagctcttccaggacgaggtggccaaggcacagcagctgcgtgaggagcagcagcggcagcagcagcagatggagcaggaacggcagcggctggtggccagcatggaggaggcgcggcggcggcagcatgaggccgaggagggcgtgcggcgcaagcaggaggagctgcagcagctggagcagcagcggcggcagcaggaggagctgctggctgaggagaaccagaggctgcgtgagcagctgcagctcctggaggagcagcaccgggccgcgctggcgcactcagaggaggtcactgcctcgcaggtggctgccacaaagaccctgcccaatggccgggatgcacttgatggccccgcggcagaggcagagccggagcacagcttcgatggcctgcggcggaaggtgtcagctcagaggctgcaggaggccggcatcctgagtgcggaggagctgcagcggttggcgcagggccacaccacggtggacgagctcgcacggcgggaagacgtgcgccactacctgcagggccgcagcagtatcgcagggctgttgctgaaggccaccaatgagaagctgagtgtttacgccgccctgcagaggcagctgctgagtcccggcacggccctcatcctgctggaggcgcaggcggcctcaggcttcctgctggaccctgtgcggaaccggcggctgaccgtcaacgaggctgtgaaggagggtgtggtgggccccgagctgcaccacaagctgctgtcggccgagcgcgccgtcactggctacaaggacccctacactggccagcagatctctctcttccaagccatgcagaagggcctcatcgtccgggagcacggcatccgcctgctggaggcccagatcgccacgggcggcgttatcgaccccgtgcacagccaccgcgtgcccgtggacgtggcctaccggcgcggctacttcgacgaggagatgaaccgcgtcctggcggaccccagcgacgacaccaagggcttctttgaccccaacacgcacgagaacctcacgtacctgcagctactggagcgctgcgtggaggaccccgagacgggcctgtgccttctgccactcacggataaggctgccaagggcggggagctggtctacactgactccgaggcccgggacgtctttgagaaggccaccgtgtctgcgccgttcggcaagttccagggcaagacggtgaccatttgggagatcatcaactcggaatacttcacggcagagcagcggcgggacctgctgcggcagttccgcacgggccggatcacagtggagaagatcatcaagatcatcatcacggtggtggaggagcaggagcagaagggccggctttgctttgagggcctgcgcagcctggtgccagccgccgagctgctggagagcagggtcatcgaccgcgagctctaccagcagctgcagcgaggtgagcgctctgtgcgagacgtagccgaggtggacactgtgcggcgggctctccggggtgccaacgtcatcgcgggtgtatggctggaggaggcggggcagaagctgagtatctacaatgccctgaagaaagacctgctgccatccgacatggccgtggccctgttggaagcccaggccggcaccgggcacatcatcgaccccgccaccagcgcccggctgaccgtggacgaggcagtgcgtgctggcctggtgggccccgagtttcatgagaagctgctatcagccgagaaggctgtgacagggtacagggacccctacacagggcagagcgtctccctgttccaggccctgaagaagggcctcattccccgggagcagggcctgcgcctgttggacgcccagctgtccacgggcggcatcgtggaccccagcaagagccaccgcgtgcccctggatgtcgcctgcgcccgaggctgcctggatgaggagaccagcagggccctgtcggcaccaagggccgacgccaaggcctacagtgaccccagcacaggggagccggccacctacggcgagctccagcagcggtgccggcccgaccagctgaccgggctgagcctgctgccgctctcagaaaaggctgctcgggcccggcaggaggagctctactcagagctgcaggcccgtgagacctttgaaaagaccccggttgaggtccccgtgggtggcttcaagggcaggacggtgacggtgtgggagctcatcagctctgagtacttcactgcggagcagcggcaggagctgttgcgtcagttccgcacgggcaaggtcaccgtggagaaggtcatcaagattctcattaccatcgtggaggaggtggagaccctgcggcaggagaggctgtccttcagcggcctccgtgcccctgtgccagccagcgagctcctggcttccggggtcctcagcagagcccagtttgagcagctcaaggacggcaagacgacggtcaaggacctttcggagctgggctccgtgcggacgctgctgcagggcagtggctgcctcgccggcatctacctggaggacaccaaggagaaggtgtccatctacgaggccatgcgccggggcctgctgagagccacaacggctgcgctcctgctggaggcgcaggcggccactggcttcctggtggaccccgtgcggaaccagcgcctgtatgtccacgaggccgtgaaggcgggcgtggtgggccccgagcttcacgagcagctgctgtctgccgagaaggccgtcaccggctacagagacccctactcgggcagcaccatctccctcttccaggccatgcagaagggcctggttctccggcagcacggcatccgcctgctggaggcccagatcgccacgggcggcatcatcgaccccgtgcacagccaccgcgtgcctgtggacgtggcctaccagcgcggctacttcagtgaggagatgaaccgcgtcctggcggaccccagcgacgacaccaagggcttctttgaccccaacacgcatgagaacctcacgtacaggcagctgctggagcggtgcgtggaggaccccgagacgggcttgcgccttctgccactgaaaggggcggagaaggctgaggtggtggagaccacgcaggtgtacactgaggaggagacaagaagggcatttgaagagacacagatcgacattcccggcggcggcagccacggcggctccaccatgtccctgtgggaggtgatgcagtcggacctgatccccgaggagcagcgggcccagctgatggctgacttccaggccggccgggtgaccaaggaacgcatgatcatcatcatcatcgagatcattgagaagacagagatcatccgccagcagggtctggcctcctacgactacgtgcgccgccgcctcacggctgaggacctgttcgaggctcggatcatctctctcgagacctacaacctgctccgggagggcaccaggagcctccgtgaggctctcgaggcggagtccgcctggtgctacctctatggcacgggctccgtggctggtgtctacctgcccggttccaggcagacactgagcatctaccaggctctcaagaaagggctgctgagtgccgaggtggcccgcctgctgctggaggcacaggcagccacaggcttcctgctggacccggtgaagggggagcggctgactgtggatgaggctgtgcggaagggcctcgtggggcccgagctgcacgaccgcctgctctcggctgagcgggcggtcaccggctaccgtgacccctacaccgagcagaccatctcgctcttccaggccatgaagaaggagctgatccctactgaggaggccctgcggctgctggatgcccagctggccaccggcggcatcgtggacccccgcctgggcttccaccttcccctggaggtggcttaccagcgtggctacctcaacaaggacacgcacgaccagctgtcagagcccagcgaggtgcgcagctacgtggacccgtccaccgacgagcgcctcagctacacgcagctgctcaggcggtgccgtcgtgacgacggcaccggccagctgctcctgccactgtcggacgcccgcaagctgaccttccgtggcctgcggaagcagatcaccatggaggagctggtgcgctcgcaggtcatggacgaggccacggcgctgcagctgcgggagggcctgacctccatcgaggaggtcaccaagaacttgcagaagttcctggaaggcaccagctgcatcgctggtgtcttcgtggacgccaccaaggaacggctctcggtgtaccaggccatgaagaagggcatcatccgccccggcacagcctttgagctcctggaggcgcaggcggccaccggttacgtcatcgaccccatcaagggactgaagctgacggtggaggaggctgtgcgtatgggcattgtgggccccgagttcaaggacaagctgctgtcggccgagcgcgccgtcactgggtacaaggacccctactctgggaagctcatctccctcttccaggccatgaagaagggcctgatcctgaaggaccatggcatccgcctgctggaggcccagatcgccacgggcggcatcatcgaccctgaggagagccaccggctgcccgtggaggtggcctacaagcgcggcctcttcgatgaggagatgaacgagatcctgaccgacccctcggacgacaccaagggcttctttgaccctaacacggaggagaacctcacctacctgcagctgatggagcgttgtatcactgacccccagacgggcctgtgtctcttgccgctgaaggagaagaagcgggagcggaagacgtcctccaagtcctccgtgcgcaagcgccgagtggtcatcgtggaccccgagacgggcaaggagatgtcagtgtacgaggcctaccgcaagggcctgattgaccaccagacgtacctggagctgtccgagcaggagtgcgagtgggaggagatcaccatctcctcctcggacggcgtggtcaagtccatgatcatcgaccgccgctccgggcgccagtacgacatcgatgatgccatcgccaagaacctcatcgaccgctcggcactggaccagtaccgcgccggcacgctctccatcaccgagttcgccgacatgctctcgggcaacgccggtggtttccgctcccgttcctcctcggtgggatcctcctcctcctaccccatcagccccgccgtctccaggacccagctggcctcctggtcagaccccactgaggagacgggccccgtggctggcatcctggacacggagacgctggagaaggtgtccatcaccgaggccatgcaccggaacctggtggataacatcacggggcagcggctgctggaggcgcaggcctgcaccgggggcatcatcgaccccagcaccggtgagcgcttccctgtcaccgacgccgtcaacaagggcctggtggacaagatcatggtggaccgcatcaacctggcccagaaggccttctgcggcttcgaggacccacgcaccaagaccaagatgtcggccgcccaggccctgaagaagggctggctctactacgaggccggccagcgcttcctggaggtgcagtacctgaccggcggcttgatcgagcccgacacgccgggccgcgtgcccctggacgaggccctgcagcgcggcacggtggacgcccgcaccgcacagaagctgcgtgacgtgggcgcctactccaagtacctcacctgccctaagaccaagctcaagatctcctataaggacgcgctggaccgcagcatggtggaggagggcacggggctgcggctgctggaggctgccgcgcagtccaccaagggctactacagcccctacagcgtcagcggctccggctctaccgctggctcccgcaccggctcgcgcaccggctcccgggccggctcccgccgcggcagctttgacgccaccggctccggcttctccatgaccttctcttcatcctcctactcctcctcgggctacggccgccgctacgcctcggggtcctcggcctccctggggggccctgagtctgccgtggcctgaggctgcctgcgcccaccccgctctgcatgcggcccagcccggctcccaccgaggcgcgggggccgttttcaacgcttaaaggtgtcttcctcccaagtggtgcctaaagtttaaccaaaaagaccagactaatatattaatatatatctgctgtccagacagcctgtatcttgggggacagggctggcccagccctgctggccgcctcaccccctcgggtctcctcactcccttctacctgccactcacacagccaggtgccttggagggtcccaagctgggccccagcccaccctcctgtcttcccagggtagcccgcctgccagtcctagctgcacagggcagctgggcccaaccctgtctgtagagggccctggtgtttctagcactggcctgcacggtgggccttgctggggacggggggccccagtcagcctctctcccagtctacccagagaagccccttccccatgggaagacgaggccctcgggcccagcccccacagtgctgtctgatctgtgctttccagctcaccccccacactcactcctgagacccctggcctccggcgtcagcctccagcctctgttcccctagtaagtgccttccatgtcggcctctaaccccaggccccgaggacccagacccagtggggaggcggacgttccagccggcatggctgggaactgcagacctgtcctcctggtgggtccaggggcccctccagcttgtggagccccacactggggtgccgcctgcccgtctctctcccatggagccccagccccctttgggcccagggacaccagccaggctctgtgctgaccctcctgttgcacccagccctggtctcagcagcgaccacccctgcctccaccctctgagctttgcatgttccactaaccccgggcgggtggcaggtggaggtgtcaggctgctggcgcctctgcaagggcagaacactaacctgaccgtgggcggggccttgcggtatccgcccccaataaaagcaattccaacctt

SEQ ID NO: 470 - DNA, 2302 bp, Homo Sapiens
  NM_000447
ggggcctgggccggcgccgggtccggccgggcgctcagccagctgcgtaaactccgctggagcgcggcggcagagcaggcatttccagcagtgaggagacagccagaagcaagcttttggagctgaaggaacctgagacagaagctagtcccccctctgaattttactgatgaagaaactgaggccacagagctaaagtgacttttcccaaggtcgcccagcgaggacgtgggacttctcagacgtcaggagagtgatgtgagggagctgtgtgaccatagaaagtgacgtgttaaaaaccagcgctgccctctttgaaagccagggagcatcattcatttagcctgctgagaagaagaaaccaagtgtccgggattcagacctctctgcggccccaagtgttcgtggtgcttccagaggcagggctatgctcacattcatggcctctgacagcgaggaagaagtgtgtgatgagcggacgtccctaatgtcggctgagagccccacgccgcgctcctgccaggagggcaggcagggcccagaggatggagagaacactgcccagtggagaagccaggagaacgaggaggacggtgaggaggaccctgaccgctatgtctgtagtggggttcccgggcggccgccaggcctggaggaagagctgaccctcaaatacggagcgaagcacgtgatcatgctgtttgtgcctgtcactctgtgcatgatcgtggtggtagccaccatcaagtctgtgcgcttctacacagagaagaatggacagctcatctacacgccattcactgaggacacaccctcggtgggccagcgcctcctcaactccgtgctgaacaccctcatcatgatcagcgtcatcgtggttatgaccatcttcttggtggtgctctacaagtaccgctgctacaagttcatccatggctggttgatcatgtcttcactgatgctgctgttcctcttcacctatatctaccttggggaagtgctcaagacctacaatgtggccatggactaccccaccctcttgctgactgtctggaacttcggggcagtgggcatggtgtgcatccactggaagggccctctggtgctgcagcaggcctacctcatcatgatcagtgcgctcatggccctagtgttcatcaagtacctcccagagtggtccgcgtgggtcatcctgggcgccatctctgtgtatgatctcgtggctgtgctgtgtcccaaagggcctctgagaatgctggtagaaactgcccaggagagaaatgagcccatattccctgccctgatatactcatctgccatggtgtggacggttggcatggcgaagctggacccctcctctcagggtgccctccagctcccctacgacccggagatggaagaagactcctatgacagttttggggagccttcataccccgaagtctttgagcctcccttgactggctacccaggggaggagctggaggaagaggaggaaaggggcgtgaagcttggcctcggggacttcatcttctacagtgtgctggtgggcaaggcggctgccacgggcagcggggactggaataccacgctggcctgcttcgtggccatcctcattggcttgtgtctgaccctcctgctgcttgctgtgttcaagaaggcgctgcccgccctccccatctccatcacgttcgggctcatcttttacttctccacggacaacctggtgcggccgttcatggacaccctggcctcccatcagctctacatctgagggacatggtgtgccacaggctgcaagctgcagggaattttcattggatgcagttgtatagttttacactctagtgccatatatttttaagacttttctttccttaaaaaataaagtacgtgtttacttggtgaggaggaggcagaaccagctctttggtgccagctgtttcatcaccagactttggctcccgctttggggagcgcctcgcttcacggacaggaagcacagcaggtttatccagatgaactgagaaggtcagattagggcggggagaagagcatccggcatgagggctgagatgcgcaaagagtgtgctcgggagtggcccctggcacctgggtgctctggctggagaggaaaagccagttccctacgaggagtgttcccaatgctttgtccatgatgtccttgttattttattgcctttagaaactgagtcctgttcttgttacggcagtcacactgctgggaagtggcttaatagtaatatcaataaatagatgagtcctgttagaatcttgaaaa

SEQ ID NO: 471 - DNA, 3286 bp, Homo Sapiens
  NM_000455
gcgtgtcgggcgcggaagggggaggcggcccggggcgcccgcgagtgaggcgcggggcggcgaagggagcgcgggtggcggcacttgctgccgcggccttggatgggctgggcccccctcgccgctccgcctcctccacacgcgcggcggccgcggcgagggggacgcgccgcccggggcccggcaccttcgggaaccccccggcccggagcctgcggcctgcgccgcctcggccgccgggagccccgtggagcccccgccgccgcgccgccccgcggaccggacgctgagggcactcggggcggggcgcgcgctcgggcagacgtttgcggggaggggggcgcctgccgggccccggcgaccaccttgggggtcgcgggccggctcggggggcgcccagtgcgggccctcgcgggcgccgggcagcgaccagccctgagcggagctgttggccgcggcgggaggcctcccggacgcccccagccccccgaacgctcgcccgggccggcgggagtcggcgccccccgggaggtccgctcggtcgtccgcggcggagcgtttgctcctgggacaggcggtgggaccggggcgtcgccggagacgcccccagcgaagttgggctctccaggtgtgggggtcccggggggtagcgacgtcgcggacccggcctgtgggatgggcggcccggagaagactgcgctcggccgtgttcatacttgtccgtgggcctgaggtccccggaggatgacctagcactgaaaagccccggccggcctccccagggtccccgaggacgaagttgaccctgaccgggccgtctcccagttctgaggcccgggtcccactggaactcgcgtctgagccgccgtcccggacccccggtgcccgccggtccgcagaccctgcaccgggcttggactcgcagccgggactgacgtgtagaacaatcgtttctgttggaagaagggtttttcccttccttttggggtttttgttgccttttttttttcttttttctttgtaaaattttggagaagggaagtcggaacacaaggaaggaccgctcacccgcggactcagggctggcggcgggactccaggaccctgggtccagcatggaggtggtggacccgcagcagctgggcatgttcacggagggcgagctgatgtcggtgggtatggacacgttcatccaccgcatcgactccaccgaggtcatctaccagccgcgccgcaagcgggccaagctcatcggcaagtacctgatgggggacctgctgggggaaggctcttacggcaaggtgaaggaggtgctggactcggagacgctgtgcaggagggccgtcaagatcctcaagaagaagaagttgcgaaggatccccaacggggaggccaacgtgaagaaggaaattcaactactgaggaggttacggcacaaaaatgtcatccagctggtggatgtgttatacaacgaagagaagcagaaaatgtatatggtgatggagtactgcgtgtgtggcatgcaggaaatgctggacagcgtgccggagaagcgtttcccagtgtgccaggcccacgggtacttctgtcagctgattgacggcctggagtacctgcatagccagggcattgtgcacaaggacatcaagccggggaacctgctgctcaccaccggtggcaccctcaaaatctccgacctgggcgtggccgaggcactgcacccgttcgcggcggacgacacctgccggaccagccagggctccccggctttccagccgcccgagattgccaacggcctggacaccttctccggcttcaaggtggacatctggtcggctggggtcaccctctacaacatcaccacgggtctgtaccccttcgaaggggacaacatctacaagttgtttgagaacatcgggaaggggagctacgccatcccgggcgactgtggccccccgctctctgacctgctgaaagggatgcttgagtacgaaccggccaagaggttctccatccggcagatccggcagcacagctggttccggaagaaacatcctccggctgaagcaccagtgcccatcccaccgagcccagacaccaaggaccggtggcgcagcatgactgtggtgccgtacttggaggacctgcacggcgcggacgaggacgaggacctcttcgacatcgaggatgacatcatctacactcaggacttcacggtgcccggacaggtcccagaagaggaggccagtcacaatggacagcgccggggcctccccaaggccgtgtgtatgaacggcacagaggcggcgcagctgagcaccaaatccagggcggagggccgggcccccaaccctgcccgcaaggcctgctccgccagcagcaagatccgccggctgtcggcctgcaagcagcagtgaggctggccgcctgcagcccgtgtccaggagccccgccaggtgcccgcgccaggccctcagtcttcctgccggttccgcccgccctcccggagaggtggccgccatgcttctgtgccgaccacgccccaggacctccggagcgccctgcagggccgggcagggggacagcagggaccgggcgcagccctcccccctcggccgcccggcagtgcacgcggcttgttgacttcgcagccccgggcggagccttcccgggcgggcgtgggaggagggaggcggcctccatgcactttatgtggagactactggccccgcccgtggcctcgtgctccgcagggcgcccagcgccgtccggcggccccgccgcagaccagctggcgggtgtggagaccaggctcctgaccccgccatgcatgcagcgccacctggaagccgcgcggccgctttggttttttgtttggttggttccattttctttttttctttttttttttaagaaaaaataaaaggtggatttgagctgtggctgtgaggggtgtttgggagctgctgggtggcaggggggctgtggggtcgggctcacgtcgcggccgcctttgcgctctcgggtcaccctgctttggcggcccggccggagggcaggaccctcacctctcccccaaggccactgcgctcttgggaccccagagaaaacccggagcaagcaggagtgtgcggtcaatatttatatcatccagaaaagaaaaacacgagaaacgccatcgcgggatggtgcagacgcggcggggactcggagggtgccgtgcgggcgaggccgcccaaatttggcaataaataaagcttgggaagcttggacctgaaaaaaaaaa

SEQ ID NO: 472 - DNA, 4516 bp, Homo Sapiens
  NM_000462
atggagaagctgcaccagtgttattggaaatcaggagaacctcagtctgacgacattgaagctagccgaatgaagcgagcagctgcaaagcatctaatagaacgctactaccaccagttaactgagggctgtggaaatgaagcctgcacgaatgagttttgtgcttcctgtccaacttttcttcgtatggataataatgcagcagctattaaagccctcgagctttataagattaatgcaaaactctgtgatcctcatccctccaagaaaggagcaagctcagcttaccttgagaactcgaaaggtgcccccaacaactcctgctctgagataaaaatgaacaagaaaggcgctagaattgattttaaagatgtgacttacttaacagaagagaaggtatatgaaattcttgaattatgtagagaaagagaggattattcccctttaatccgtgttattggaagagttttttctagtgctgaggcattggtacagagcttccggaaagttaaacaacacaccaaggaagaactgaaatctcttcaagcaaaagatgaagacaaagatgaagatgaaaaggaaaaagctgcatgttctgctgctgctatggaagaagactcagaagcatcttcctcaaggataggtgatagctcacagggagacaacaatttgcaaaaattaggccctgatgatgtgtctgtggatattgatgccattagaagggtctacaccagattgctctctaatgaaaaaattgaaactgcctttctcaatgcacttgtatatttgtcacctaacgtggaatgtgacttgacgtatcacaatgtatactctcgagatcctaattatctgaatttgttcattatcgtaatggagaatagaaatctccacagtcctgaatatctggaaatggctttgccattattttgcaaagcgatgagcaagctaccccttgcagcccaaggaaaactgatcagactgtggtctaaatacaatgcagaccagattcggagaatgatggagacatttcagcaacttattacttataaagtcataagcaatgaatttaacagtcgaaatctagtgaatgatgatgatgccattgttgctgcttcgaagtgcttgaaaatggtttactatgcaaatgtagtgggaggggaagtggacacaaatcacaatgaagaagatgatgaagagcccatccctgagtccagcgagctgacacttcaggaacttttgggagaagaaagaagaaacaagaaaggtcctcgagtggaccccctggaaactgaacttggtgttaaaaccctggattgtcgaaaaccacttatcccttttgaagagtttattaatgaaccactgaatgaggttctagaaatggataaagattatacttttttcaaagtagaaacagagaacaaattctcttttatgacatgtccctttatattgaatgctgtcacaaagaatttgggattatattatgacaatagaattcgcatgtacagtgaacgaagaatcactgttctctacagcttagttcaaggacagcagttgaatccatatttgagactcaaagttagacgtgaccatatcatagatgatgcacttgtccggctagagatgatcgctatggaaaatcctgcagacttgaagaagcagttgtatgtggaatttgaaggagaacaaggagttgatgagggaggtgtttccaaagaattttttcagctggttgtggaggaaatcttcaatccagatattggtatgttcacatacgatgaatctacaaaattgttttggtttaatccatcttcttttgaaactgagggtcagtttactctgattggcatagtactgggtctggctatttacaataactgtatactggatgtacattttcccatggttgtctacaggaagctaatggggaaaaaaggaacttttcgtgacttgggagactctcacccagttctatatcagagtttaaaagatttattggagtatgaagggaatgtggaagatgacatgatgatcactttccagatatcacagacagatctttttggtaacccaatgatgtatgatctaaaggaaaatggtgataaaattccaattacaaatgaaaacaggaaggaatttgtcaatctttattctgactacattctcaataaatcagtagaaaaacagttcaaggcttttcggagaggttttcatatggtgaccaatgaatctcccttaaagtacttattcagaccagaagaaattgaattgcttatatgtggaagccggaatctagatttccaagcactagaagaaactacagaatatgacggtggctataccagggactctgttctgattagggagttctgggaaatcgttcattcatttacagatgaacagaaaagactcttcttgcagtttacaacgggcacagacagagcacctgtgggaggactaggaaaattaaagatgattatagccaaaaatggcccagacacagaaaggttacctacatctcatacttgctttaatgtgcttttacttccggaatactcaagcaaagaaaaacttaaagagagattgttgaaggccatcacgtatgccaaaggatttggcatgctgtaaaacaaaacaaaacaaaataaaacaaaaaaaaggaaggaaaaaaaaagaaaaaatttaaaaaattttaaaaatataacgagggataaatttttggtggtgatagtgtcccagtacaaaaaggctgtaagatagtcaaccacagtagtcacctatgtctgtgcctcccttctttattggggacatgtgggctggaacagcagatttcagctacatatatgaacaaatcctttattattattataattatttttttgcgtgaaagtgttacatattctttcacttgtatgtacagagaggtttttctgaatatttattttaagggttaaatcacttttgcttgtgtttattactgcttgaggttgagccttttgagtatttaaaaaatatataccaacagaactactctcccaaggaaaatattgccaccatttgtagaccacgtaaccttcaagtatgtgctacttttttgtccctgtatctaactcaaatcaggaactgtattttttttaatgatttgcttttgaaacttgaagtcttgaaaacagtgtgatgcaattactgctgttctagcccccaaagagttttctgtgcaaaatcttgagaatcaatcaataaagaaagatggaaggaagggagaaattggaatgttttaactgcagccctcagaactttagtaacagcacaacaaattaaaaacaaaaacaactcatgccacagtatgtcgtcttcatgtgtcttgcaatgaactgtttcagtagccaatcctctttcttagtatatgaaaggacagggatttttgttcttgttgttctcgttgttgttttaagtttactggggaaagtgcatttggccaaatgaaatggtagtcaagcctattgcaacaaagttaggaagtttgttgtttgtttattataaacaaaaagcatgtgaaagtgcacttaagatagagtttttattaattacttacttattacctagattttaaatagacaatccaaagtctccccttcgtgttgccatcatcttgttgaatcagccattttatcgaggcacgtgatcagtgttgcaacataatgaaaaagatggctactgtgccttgtgttacttaatcatacagtaagctgacctggaaatgaatgaaactattactcctaagaattacattgtatagccccacagattaaatttaattaattaattcaaaacatgttaaacgttactttcatgtactatggaaaagtacaagtaggtttacattactgatttccagaagtaagtagtttcccctttcctagtcttctgtgtatgtgatgttgttaatttcttttattgcattataaaataaaaggattatgtatttttaactaaggtgagacattgatatatccttttgctacaagctatagctaatgtgctgagcttgtgccttggtgattgattgattgattgactgattgttttaactgattactgtagatcaacctgatgatttgtttgtttgaaattggcaggaaaaatgcagctttcaaatcattggggggagaaaaaggatgtctttcaggattattttaattaatttttttcataattgagacagaactgtttgttatgtaccataatgctaaataaaactgtggcacttttcaccataatttaatttagtggaaaaagaagacaatgctttccatattgtgataaggtaacatggggtttttctgggccagcctttagaacactgttagggtacatacgctaccttgatgaaagggaccttcgtgcaactgtagtcatcttaaaggcttctcatccactgtgcttcttaatgtgtaattaaagtgaggagaaattaaatactctgagggcgttttatataataaattcgtgaaga

SEQ ID NO: 473 - DNA, 4390 bp, Homo Sapiens
  NM_000466
cgatcgatctcctccggctccgacgtcctcggcctgccgggtcccgggtcctttgcggcgctagggtgggcgaacccagagcgacgctccgggacgatgtggggcagcgatcgcctggcgggtgctgggggaggcggggcggcagtgactgtggccttcaccaacgctcgcgactgcttcctccacctgccgcggcgtctcgtggcccagctgcatctgctgcagaatcaagctatagaagtggtctggagtcaccagcctgcattcttgagctgggtggaaggcaggcattttagtgatcaaggtgaaaatgtggctgaaattaacagacaagttggtcaaaaacttggactctcaaatgggggacaggtatttctcaagccatgttcccatgtggtatcttgtcaacaagttgaggtggaacccctctcagcagatgattgggagatactggagctgcatgctgtttcccttgaacaacatcttctagatcaaattcgaatagtttttccaaaagccatttttcctgtttgggttgatcaacaaacgtacatatttatccaaattgttgcactaataccagctgcctcttatggaaggctggaaactgacaccaaactccttattcagccaaagacacgccgagccaaagagaatacattttcaaaagctgatgctgaatataaaaaacttcatagttatggaagagaccagaaaggaatgatgaaagaacttcaaaccaagcaacttcagtcaaatactgtgggaatcactgaatctaatgaaaacgagtcagagattccagttgactcatcatcagtagcaagtttatggactatgataggaagcattttttcctttcaatctgagaagaaacaagagacatcttggggtttaactgaaatcaatgcattcaaaaatatgcagtcaaaggttgttcctctagacaatattttcagagtatgcaaatctcaacctcctagtatatataacgcgtcagcaacctctgtttttcataaacactgtgccattcatgtatttccatgggaccaggaatattttgatgtagagcccagctttactgtgacatatggaaagctagttaagctactttctccaaagcaacagcaaagtaaaacaaaacaaaatgtgttatcacctgaaaaagagaagcagatgtcagagccactagatcaaaaaaaaattaggtcagatcataatgaagaagatgagaaggcctgtgtgctacaagtagtctggaatggacttgaagaattgaacaatgccatcaaatataccaaaaatgtagaagttctccatcttgggaaagtctggattccagatgacctgaggaagagactaaatatagaaatgcatgccgtagtcaggataactccagtggaagttacccctaaaattccaagatctctaaagttacaacctagagagaatttacctaaagacataagtgaagaagacataaaaactgtattttattcatggctacagcagtctactaccaccatgcttcctttggtaatatcagaggaagaatttattaagctggaaactaaagatggactgaaggaattttctctgagtatagttcattcttgggaaaaagaaaaagataaaaatatttttctgttgagtcccaatttgctgcagaagactacaatacaagtccttctagatcctatggtaaaagaagaaaacagtgaggaaattgactttattcttccttttttaaagctgagctctttgggaggagtgaattccttaggcgtatcctccttggagcacatcactcacagcctcctgggacgccctttgtctcggcagctgatgtctcttgttgcaggacttaggaatggagctcttttactcacaggaggaaagggaagtggaaaatcaactttagccaaagcaatctgtaaagaagcatttgacaaactggatgcccatgtggagagagttgactgtaaagctttacgaggaaaaaggcttgaaaacatacaaaaaaccctagaggtggctttctcagaggcagtgtggatgcagccatctgttgtcctgctggatgaccttgacctcattgctggactgcctgctgtcccggaacatgagcacagtcctgatgcggtgcagagccagcggcttgctcatgctttgaatgatatgataaaagagtttatctccatgggaagtttggttgcactgattgccacaagtcagtctcagcaatctctacatcctttacttgtttctgctcaaggagttcacatatttcagtgcgtccaacacattcagcctcctaatcaggaacaaagatgtgaaattctgtgtaatgtaataaaaaataaattggactgtgatataaacaagttcaccgatcttgacctgcagcatgtagctaaagaaactggcgggtttgtggctagagattttacagtacttgtggatcgagccatacattctcgactctctcgtcagagtatatccaccagagaaaaattagttttaacaacattggacttccaaaaggctctccgcggatttcttcctgcgtctttgcgaagtgtcaacctgcataaacctagagacctgggttgggacaagattggtgggttacatgaagttaggcagatactcatggatactatccagttacctgccaagtatccagaattatttgcaaacttgcccatacgacaaagaacaggaatactgttgtatggtccgcctggaacaggaaaaaccttactagctggggtaattgcacgagagagtagaatgaattttataagtgtcaaggggccagagttactcagcaaatacattggagcaagtgaacaagctgttcgggatatttttattagagcacaggctgcaaagccctgcattcttttctttgatgaatttgaatccattgctcctcggcggggtcatgataatacaggagttacagaccgagtagttaaccagttgctgactcagttggatggagtagaaggcttacagggtgtttatgtattggctgctactagtcgccctgacttgattgaccctgccctgcttaggcctggtcgactagataaatgtgtatactgtcctcctcctgatcaggtgtcacgtcttgaaattttaaatgtcctcagtgactctctacctctggcagatgatgttgaccttcagcatgtagcatcagtaactgactcctttactggagctgatctgaaagctttactttacaatgcccaattggaggccttacatggaatgctgctctcgagtggactccaggatggaagttccagctctgatagtgacctaagtctgtcttcaatggtctttcttaaccatagcagtggctctgacgattcagctggagatggagaatgtggcttagatcagtcccttgtttctttagagatgtccgagatccttccagatgaatcaaaattcaatatgtaccggctctactttggaagctcttatgaatcagaacttggaaatggaacctcttctgatttgagctcacaatgtctctctgcaccaagctccatgactcaggatttgcctggagttcctgggaaagaccagttgttttcacagcctccagtgttaaggacagcttcacaagagggttgccaagaacttacacaagaacaaagagatcaactgagggcagatatcagtattatcaaaggcagataccggagccaaagtggagaggacgaatccatgaaccaaccaggaccaatcaaaaccagactggctattagtcagtcacatttaatgactgcacttggtcacacaagaccatccattagtgaagatgactggaagaattttgctgagctatatgaaagctttcaaaatccaaagaggagaaaaaatcaaagtggaacaatgtttcgacctggacagaaagtaactttagcataaaatatacttctttttgatttggttctgttaagttttttgatggcttttccatatgttgtaacaggaaaaaaatggtgtctatgaatttcttcttaatttaacaaatttggttaatttataaaatcacagattggtaaatgctataattatgtaatgatcaggattgagattaatactgtagtataaattgggacattataacagattccatattttatttcctaaaatctaaattcagtctttaatgaaataatattagccaaatggtggaactaatttatttcttttgaggaaaagataataaagaatgtaattaaatttaaatttcttggaattcccagttgtatattcatcacctttgtagcatttgacaaattttatgcttagcagcttcttcactgttttgaaataaaatatcctattacctactgataaaaaaaaa

SEQ ID NO: 474 - DNA, 2266 bp, Homo Sapiens
  NM_000476
gggaacgccggctcccggcatgccgcgcgctgacagccttataaatagtcgcctttgccggccgccgcgaggacgggcagggcacgcactggccccggcgcccacccgcacccctccccagagcactgacacggctcccgggacctcggcaggatggaagagaagctgaagaaaaccaagatcatctttgtggtgggtgggcctggctcagggaagggcacccagtgtgagaagatcgtgcagaagtatggctacacccacctctccaccggggacctcctgcggtccgaggtcagctcaggctcggccaggggcaagaagctgtcggaaatcatggagaaggggcagctggttccactggagacagtgttggacatgctccgggatgccatggtggccaaagtcaatacttccaaaggcttcctgattgatggctacccgcgggaggtgcagcaaggagaagagtttgagcgacggattggacagcccacactgctgctgtatgtggacgcaggccctgagaccatgacccagcggctcttgaaacgtggagagaccagcgggcgtgtggacgacaatgaggagaccatcaaaaagcggctggagacctattacaaggccacagaacccgtcatcgccttctatgagaaacgtggcattgtgcgcaaggtcaacgctgagggctccgtggacagtgtcttctcccaggtctgcacccacctggacgccctaaagtagcaacgctggagccgcttccccagctcagagccccgccccaccccgtcctgattcgaggtcctcctggcctgagcgcagcgcctccaccctgccctgctgagcacagacggaggaagccgcttatcctgttttcatggacagctgagcactaaaggaatttctaaggacatttggttttactgctttttctctgcttccagttggagttgattcatgtgcttgtgcctacctggccgcaagtccccagcccctcaaccctccgttcctcctcagcctccctttgccagccacccctcctctagctctggtgggaggcccggggcccttcctcgcacagggcatgcctggcctgaggacccggcgctgagtggcggggcccctgctccgaggggctcatgttcaggcagaaccggtcccagcctgggctcctctgcatcttgctctgtggccttggccctgacccccatcgctctgagcatatgttccatgcctggcccttgccggggcctggactgcacaggcagcaaggtcatggtctgagtggggcttcctgggcagttggggcggcccacgccagctggcccagtgggtagtgaattggcttccttgacgcgagaggctctgagggtctgaaaagggcatctcaatggcatgggtgggtggggagtcagtcatgtcactgaaattgaatgggggaggcccaatgaggtggctcatgcctgtaatcccagcactttgggaagctgaggcaggaggatcccctgaggtcaggagttcgagagcagcctggccaacatggcaaaaccccttatttactaaaaatacaaaaattagccgggcatggtggcatgtgcctgtattcccagctactcatgaggctgaggcaggagaatggcgtgaacccgggaggtggagcttgcaatgagccaagattgcgccactgcactccagcctgggtgacagagcaagactccgtctcaaaaaaaaaaaaaaaaaaaaagaaattgaattgggggagtcatggtcaggggtgagacctgaaggacctccccctgtgtggccctggacacagcccaccctctgtgagccgtttccaattctaaaacagactcaatgtccccctcacccccacctcaaggtcaggatgagaacacactgagtgaggagtggacgctgtccattgccacggccatgagggctggagaccagaacagcatggcccgaagcgtgcggggccccggatgacttggggacaccccagaatcccctggggagaacccttcctgcgcgctttcattttttgacctcatcactgagaaaggctcaatttggtgctcacgtgtccttaacacctgatctggcccaagctgggctccctttaagccaagagagcctcttgtggaccccgcctgcccgaatgaaatccgaacagttggggctgttcatggcaagtggggctggtttttcatttccattggttatttaaagtttcctttaaaataaacgattttaagttataaaaggtgaa

SEQ ID NO: 475 - DNA, 2606 bp, Homo Sapiens
  NM_000478
ccgggcctcactcgggccccgcggccgcctttataaggcggcgggggtggtggcccgggccgcgttgcgctcccgccactccgcgcccgctatcctggctccgtgctcccacgcgcttgtgcctggacggaccctcgccagtgctctgcgcaggattggaacatcagttaacatctgaccactgccagcccaccccctcccacccacgtcgattgcatctctgggctccagggataaagcaggtcttggggtgcaccatgatttcaccattcttagtactggccattggcacctgccttactaactccttagtgccagagaaagagaaagaccccaagtactggcgagaccaagcgcaagagacactgaaatatgccctggagcttcagaagctcaacaccaacgtggctaagaatgtcatcatgttcctgggagatgggatgggtgtctccacagtgacggctgcccgcatcctcaagggtcagctccaccacaaccctggggaggagaccaggctggagatggacaagttccccttcgtggccctctccaagacgtacaacaccaatgcccaggtccctgacagcgccggcaccgccaccgcctacctgtgtggggtgaaggccaatgagggcaccgtgggggtaagcgcagccactgagcgttcccggtgcaacaccacccaggggaacgaggtcacctccatcctgcgctgggccaaggacgctgggaaatctgtgggcattgtgaccaccacgagagtgaaccatgccacccccagcgccgcctacgcccactcggctgaccgggactggtactcagacaacgagatgccccctgaggccttgagccagggctgtaaggacatcgcctaccagctcatgcataacatcagggacattgacgtgatcatggggggtggccggaaatacatgtaccccaagaataaaactgatgtggagtatgagagtgacgagaaagccaggggcacgaggctggacggcctggacctcgttgacacctggaagagcttcaaaccgagatacaagcactcccacttcatctggaaccgcacggaactcctgacccttgacccccacaatgtggactacctattgggtctcttcgagccaggggacatgcagtacgagctgaacaggaacaacgtgacggacccgtcactctccgagatggtggtggtggccatccagatcctgcggaagaaccccaaaggcttcttcttgctggtggaaggaggcagaattgaccacgggcaccatgaaggaaaagccaagcaggccctgcatgaggcggtggagatggaccgggccatcgggcaggcaggcagcttgacctcctcggaagacactctgaccgtggtcactgcggaccattcccacgtcttcacatttggtggatacaccccccgtggcaactctatctttggtctggcccccatgctgagtgacacagacaagaagcccttcactgccatcctgtatggcaatgggcctggctacaaggtggtgggcggtgaacgagagaatgtctccatggtggactatgctcacaacaactaccaggcgcagtctgctgtgcccctgcgccacgagacccacggcggggaggacgtggccgtcttctccaagggccccatggcgcacctgctgcacggcgtccacgagcagaactacgtcccccacgtgatggcgtatgcagcctgcatcggggccaacctcggccactgtgctcctgccagctcggcaggcagccttgctgcaggccccctgctgctcgcgctggccctctaccccctgagcgtcctgttctgagggcccagggcccgggcacccacaagcccgtgacagatgccaacttcccacacggcagcccccccctcaaggggcagggaggtgggggcctcctcagcctctgcaactgcaagaaaggggacccaagaaaccaaagtctgccgcccacctcgctcccctctggaatcttccccaagggccaaacccacttctggcctccagcctttgctccctccccgctgccctttggccaacagggtagatttctcttgggcaggcagagagtacagactgcagacattctcaaagcctcttatttttctagcgaacgtatttctccagacccagaggccctgaagcctccgtggaacattctggatctgaccctcccagtctcatctcctgaccctcccactcccatctccttacctctggaaccccccaggccctacaatgctcatgtccctgtccccaggcccagccctccttcaggggagttgaggtctttctcctcaggacaaggccttgctcactcactcactccaagaccaccagggtcccaggaagccggtgcctgggtggccatcctacccagcgtggcccaggccgggaagagccacctggcagggctcacactcctgggctctgaacacacacgccagctcctctctgaagcgactctcctgtttggaacggcaaaaaaaaatttttttttctctttttggtggtggttaaaagggaacacaaaacatttaaataaaactttccaaatatttccgaggacaaaaaaaaaaa

SEQ ID NO: 476 - DNA, 4371 bp, Homo Sapiens
  NM_000480
cccctgctgctctcaagtttcccgttggcggcgcggcccgggcgcttcaggtagcctctcggctctctctgctccgctccgcgcccaggtagggcaccgacgggggctgcacgcggctggccggcttcctccctgctgaggcggccctccctcctcccgcggggccctcctggccggggatccgcagcgctgcgccctctgaacgcccggcccccgcgcctgctgcggggcgcggcctggccgggccctggccccggctggcctcagtgcccagcagccccgctccgctctgcccagcgcgtcccctttgctccagccctgcggccgtccctttcggccggcggcatggccctgtcgtccgaacccgctgagatgccgcggcagtttcccaagctgaacatctctgaagtggatgagcaagtccggctcctggcggagaaggtgtttgctaaagtgctccgagaagaggacagcaaagatgccctgtccctgttcactgtcccagaggactgccccatcgggcaaaaggaagccaaggagagggagctgcagaaggagctggcagagcagaagtctgtggagaccgcaaaaagaaagaaaagtttcaagatgattcggtcccagtccctgtctctgcaaatgccgccacagcaagattggaagggccccccggcagccagtccggccatgtctcccacaacccctgtggtcactggagccacttccctgcccacgccagcaccctatgccatgcctgagttccagcgggtcaccatcagcggagattactgtgccgggatcactttggaggactatgagcaggcagccaagagtctggccaaggccctaatgatccgggagaagtatgcgcggctcgcctaccaccgcttcccgcggatcacatcccagtacctgggtcatccgcgggcggatactgcacctccggaagagggccttccagacttccaccctcctccactgccccaggaagacccctactgcctggatgatgcaccccccaacctggattacttggtccacatgcaggggggcatcctctttgtgtatgataacaagaagatgctggagcaccaggagccgcacagcctaccctaccccgacctggagacctacacggtggacatgagccacatcctggctctcatcaccgatggccccacgaaaacctattgtcaccggcgactgaactttctggaatccaagttcagccttcatgagatgttaaacgaaatgtccgagttcaaagagttgaagagtaacccccaccgggacttctataacgtgagaaaggtggacacacacatccatgcggccgcctgcatgaaccaaaagcatctgctgcgcttcatcaagcacacataccagacggagcctgacaggactgtggcagagaagcggggccggaagatcaccctgcggcaggtgtttgacggcctgcacatggacccctacgacctcactgtggactcactggatgtccacgcgggccggcagacattccaccgctttgacaagttcaactccaaatacaaccctgtgggggccagtgagctgcgtgacctgtatttgaaaactgaaaactatctgggaggagagtactttgctcggatggtcaaggaggttgcccgggagctggaggagagcaagtaccagtactcagagccacggctctccatctacggccgcagtcctgaggagtggcccaacctggcctactggttcatccagcacaaggtctactctcccaacatgcgctggatcatccaggtgccccggatttatgacatatttaggtcaaagaagctgctgccaaactttgggaagatgctggagaacatcttcctgccccttttcaaggccactatcaacccccaagatcatcgagagcttcacctcttccttaaatatgtgacggggtttgacagcgtggatgatgagtccaagcacagcgaccacatgttttccgacaagagcccaaacccggacgtctggaccagtgagcagaacccaccctacagctactacctgtactacatgtatgccaacatcatggtgctcaacaacctccgcagggagcgcggcctgagcacgttcctgttccggccgcactgtggggaagccggctccatcacccacctggtgtctgccttcctcactgctgacaacatttcccacgggctgctcctcaagaagagtccggtattgcagtatctctactaccttgctcagatccccattgccatgtctcctcttagcaacaacagtttgttcctcgaatattccaagaaccctctgagggaattcctacacaagggactgcatgtttctctttccaccgatgaccccatgcagttccactacacgaaggaagcacttatggaagaatatgccattgcagctcaagtgtggaagctgagcacctgcgacctgtgtgagatcgccaggaacagcgtgctgcagagcggcctctcgcatcaggaaaagcaaaagtttctgggacaaaattattataaagaaggacctgaaggaaatgatattcgaaagacaaatgtggctcagatccggatggcattccgatatgagaccttatgcaatgagctcagcttcctgtctgatgctatgaaatcagaagagatcaccgccttgaccaactaggtccagcatttgacatgcattttaactttttggttcaatttcaagtctgctgtggctaatagtggtcaagattccgaactaggactttcctctgtgaagaggatgcctctgaagaaattttaaactggtgattttggttgcactgctcactttaagagttaacatgctcacttgttagtatttctgagtaacaagatggtgacttctccttggggatctgggagctgagcacttgtctatacttgttcctaattttccaagtatttctcttgaaactgccagtgcctgaactgttggggccaggattttccctggtcagatgccaagtaacatgtggttttctgccatacttttctccattggcccaggtaggctaattggtagttgttcatttcagcctctggatggctggctgccttaaacacaatcaatttcaaagctccatttcataaaggggctactttgaaggagttaagatggaagacttccttcttgacaaattgtgtttttagtgaatttcttaaaccgttttatttagccctccttccctctttctagttggaagccaaatgtactcatgaaaacagccactcctattctgagtcttggtttcttcacctagaaagtgagggtttggactagatgagtggctttcagggtgttctgtgaatctcctcatgaatactttagggtaggggagggaagggagtgagtgatgctcaggggctgtcaaagtgactgcgttcatcagttttacactggggctgctacataatattttcatttgaacgaagaacttcaaaaagcacaggactagatgatctctgttccttttggctctaatatgctacaactgtaggccaattatcactttaccaattaagagttaggccagataagtgaaatttaacttaagggcacacagctaataagtaataggcctaaactggatttccttattccaaatcctgtcttttccccactattccattagaccccacaaatgttagttgtgtgtgtgtgtgtgtgtgtttttaatcactgtaaccggatgcatttttttaaggcaaaatttctcccttatctactatgatgacttcagaagatacaatggtcccaggggccaagtagaaagcatttttaaagattaatctgaattaagctttatcagtgtactctttatctgtgttactagtgcctggtatgtagtaggtgctcaataaatgcatattgaataactaagtgaatttcttttggcaactttttaaggacatgtgctcttagtacttaagaggctgctcaaggaccttcctatctatttctgtggtcaaattcagactacaggaggtctttttgaatcattatagttagaagaagaatccagtttctgcctgtgaacttatttgactttagattgtctcatcttgtgactttataatgcctgtcccctccactggtcaattcagcatatggaagtataaatgcagtctttttactaggcagatatatatgctatcttacagctaattatgaaattgaatgaaaatccattgttatcttagggattagttttgaaaagcccccgtttatatacatttgccctaacataggaagtattgtgtagtttctcattgtcattttatctgtatcaagtatctttttttaaattgttaaataaagtcagctaggactgtg

SEQ ID NO: 477 - DNA, 2215 bp, Homo Sapiens
  NM_000481
gagctgccctgaagagtcagccgaaagagctggaggcttcttccctgtggttgcgggttcctgcattctctgctctaaatcccagcctgcccttggggctgcccacgcccccttcagatcctttgctccggagagagacctgtccgagcagaggcctggactacatctcccggcgtgcctggcagtgtggtggcctctgtgcgccgtctgcactcgttgcaggcgacgatgcagagggctgtaagtgtggtggcccgtctgggctttcgcctgcaggcattccccccggccttgtgtcgtccacttagttgcgcacaggaggtgctccgcaggacaccgctctatgacttccacctggcccacggcgggaaaatggtggcgtttgcgggttggagtctgccagtgcagtaccgggacagtcacactgactcgcacctgcacacacgccagcactgctcgctctttgacgtgtctcatatgctgcagaccaagatacttggtagtgaccgggtgaagctgatggagagtctagtggttggagacattgcagagctaagaccaaaccaggggacactgtcgctgtttaccaacgaggctggaggcatcttagatgacttgattgtaaccaatacttctgagggccacctgtatgtggtgtccaacgctggctgctgggagaaagatttggccctcatgcaggacaaggtcagggagcttcagaaccagggcagagatgtgggcctggaggtgttggataatgccctgctagctctgcaaggccccactgcagcccaggtactacaggccggcgtggcagatgacctgaggaaactgcccttcatgaccagtgctgtgatggaggtgtttggcgtgtctggctgccgcgtgacccgctgtggctacacaggagaggatggtgtggagatctcggtgccggtagcgggggcagttcacctggcaacagctattctgaaaaacccagaggtgaagctggcagggctggcagccagggacagcctgcgcctggaggcaggcctctgcctgtatgggaatgacattgatgaacacactacacctgtggagggcagcctcagttggacactggggaagcgccgccgagctgctatggacttccctggagccaaggtcattgttccccagctgaagggcagggtgcagcggaggcgtgtggggttgatgtgtgagggggcccccatgcgggcacacagtcccatcctgaacatggagggtaccaagattggtactgtgactagtggctgcccctccccctctctgaagaagaatgtggcgatgggttatgtgccctgcgagtacagtcgtccagggacaatgctgctggtagaggtgcggcggaagcagcagatggctgtagtcagcaagatgccctttgtgcccacaaactactataccctcaagtgaagctggctcagggtggggctgtcccttccaggagttttgcccctacaaggggttagtcaagaagctgaggcagaactcactgggggtgggcagttaaggtggaggctgattctaattgtctggttgaggggccacaccacctattccccccacctaactcatgccattccagcttccttcaggaccctgcttctgagtgacggaccagctcacacaatgtcttgtttcagtccatgatcccactgacctactcttgcctgctggagggtaatgagaagctttggttctgccatctctcccactctgccaggtgctggctgtggagcaaaggctcacctttgtggagaggataaaacctgcccaacctacctcaccatggtttttcacattgcaaagggtaataacatgggcagtgcggacttaggctaccccctccagtttgctttccgtaaatgcaaattgtccttactgcaagtcaggaatgattgctgactcacagtagggctgctatgcctgtgtgtaaacttggggatggctgagggaacatagactcactcttccacattcccaagttggtctagtgtgctgcccagtagcaaaccatggcagactcaccacctattctgagttccagggctgctgtagggcagggtgggcttcctcccagacttgccttaccctgggctgatctttgcccctggtatgcattaatggactccactgaatcctgaaaaaaaaattaaacttccttcttacttgccaaaaaaaaaaaaaa

SEQ ID NO: 478 - DNA, 807 bp, Homo Sapiens
  NM_000485
gcgctcgggctgccgctggctcttcgcacgcggccatggccgactccgagctgcagctggttgagcagcggatccgcagcttccccgacttccccaccccaggcgtggtattcagggacatctcgcccgtcctgaaggaccccgcctccttccgcgccgccatcggcctcctggcgcgacacctgaaggcgacccacgggggccgcatcgactacatcgcaggcctagactcccgaggcttcctctttggcccctccctggcccaggagcttggactgggctgcgtgctcatccgaaagcgggggaagctgccaggccccactctgtgggcctcctattccctggagtacgggaaggctgagctggagattcagaaagacgccctggagccaggacagagggtggtcgtcgtggatgatctgctggccactggtggaaccatgaacgctgcctgtgagctgctgggccgcctgcaggctgaggtcctggagtgcgtgagcctggtggagctgacctcgcttaagggcagggagaagctggcacctgtacccttcttctctctcctgcagtatgagtgaccacagggcctcccagcccaacatctccagctggatcccagggaaatatcagccttgggcaactgcagtgaccaggggcaccggctgcccacagggaacacattcctttgctggggttcagcgcctctcctggggctggaagtgccaaagcctggggcaaagctgtgtttcagccacactgaacccaattacacacagcgggagaacgcagtaaacagctttcccacaa

SEQ ID NO: 479 - DNA, 1044 bp, Homo Sapiens
  NM_000491
gcccttcccgcctctggggaagggaacttccgcttcggaccgagggcagtaggctctcggctcctggtcccactgctgctcagcccagtggcctcacaggacaccagcttcccaggaggcgtctgacacagtatgatgatgaagatcccatggggcagcatcccagtactgatgttgctcctgctcctgggcctaatcgatatctcccaggcccagctcagctgcaccgggcccccagccatccctggcatcccgggtatccctgggacacctggccccgatggccaacctgggaccccagggataaaaggagagaaagggcttccagggctggctggagaccatggtgagttcggagagaagggagacccagggattcctgggaatccaggaaaagtcggccccaagggccccatgggccctaaaggtggcccaggggcccctggagccccaggccccaaaggtgaatcgggagactacaaggccacccagaaaatcgccttctctgccacaagaaccatcaacgtccccctgcgccgggaccagaccatccgcttcgaccacgtgatcaccaacatgaacaacaattatgagccccgcagtggcaagttcacctgcaaggtgcccggtctctactacttcacctaccacgccagctctcgagggaacctgtgcgtgaacctcatgcgtggccgggagcgtgcacagaaggtggtcaccttctgtgactatgcctacaacaccttccaggtcaccaccggtggcatggtcctcaagctggagcagggggagaacgtcttcctgcaggccaccgacaagaactcactactgggcatggagggtgccaacagcatcttttccgggttcctgctctttccagatatggaggcctgacctgtgggctgcttcacatccaccccggctccccctgccagcaacgctcactctacccccaacaccaccccttgcccaaccaatgcacacagtagggcttggtgaatgctgctgagtgaatgagtaaataaactcttcaaggccaaggga

SEQ ID NO: 480 - DNA, 5610 bp, Homo Sapiens
  NM_000494
aacatttttgaaagatcactcagctttaacacaccttggctgggtctggataaaaaaaaagtgagcactgcaaatttctagaagaaaacatcaggagaagaaagagagagggggatttattcaaagttgtttccaattccttcaaaacctcaaaccaggtggctatggtatggatgtaaccaagaaaaacaaacgagatggaactgaagtcactgagagaattgtcactgaaacagtaaccacaagacttacatccttaccaccaaaaggcgggaccagcaatggctatgctaaaacagcctctcttggtggagggagccggctggagaaacaaagcctgactcatggcagcagcggctacataaactcaactggaagcacacgaggccatgcctccacctctagttacaggagggctcactcacctgcctccactctgcccaactccccaggctcaacctttgaaaggaaaactcacgttacccgccatgcgtatgaagggagctccagtggcaactcttctccggagtaccctcggaaggaatttgcatcttcttcaaccagaggacggagtcaaacacgagagagtgaaattcgagttcgactgcagagtgcgtccccatccacccgatggacagaattggatgatgttaagcgtttgctcaaggggagtcgatcggcaagtgtgagccccacccggaattcctccaacacactccccatccccaagaaaggcactgtggagaccaaaattgtgacagcgagctcccagtcggtgtcaggcacctacgatgcaacgatcctggatgccaaccttccctcccatgtgtggtcctccaccctgcccgcggggtcctccatggggacctatcacaacaacatgacaacccagagctcatccctcctcaacaccaatgcctactctgcgggatcagtcttcggagttccaaacaacatggcgtcctgctcacccactttgcaccctggactcagcacatcctcctcagtgtttggcatgcagaacaatctggcccccagcttgaccaccctgtcccatggcaccaccaccacttccacagcatatggggtgaagaaaaacatgccccagagtcctgcggctgtgaacactggcgtttccacctccgccgcctgcaccacaagtgtgcagagcgatgaccttttgcacaaggactgcaagttcctgatcctagagaaagacaacacacctgccaagaaggagatggagctgctcatcatgaccaaggacagcgggaaggtctttacagcctcccctgccagcatcgctgcaacttctttttcagaagacaccctaaaaaaagaaaagcaagctgcctacaatgctgactcaggcctaaaagccgaagctaatggagacctgaagactgtgtccacaaagggcaagaccaccactgcagatatccacagctacggcagcagtggtggtggtggcagtggaggaggtggcggtgttggtggcgctggcggcggcccttggggaccagcgccagcctggtgcccctgcggctcctgctgcagctggtggaagtggctgctgggcctgctgctcacctggctgctactcctggggctgctcttcggcctcattgctctggcggaggaggtgaggaagctgaaggcgcgtgtggatgagctggagaggatcaggaggagcatactgccctatggggacagcatggatagaatagaaaaggaccgcctccagggcatggcacccgcggcgggagcagacctggacaaaattgggctgcacagtgacagccaggaggagctctggatgttcgtgaggaagaagctaatgatggaacaggaaaatggaaatctccgaggaagccctggccctaaaggtgacatgggaagtccaggccctaaaggagatcgagggttccctgggactccaggtatccctgggcccttgggccacccaggtccacaaggaccaaagggtcaaaaaggcagcgtgggagatcctggcatggaaggccccatgggccagagagggcgagaaggccccatgggacctcgtggtgaggcagggcctcctggatctggagagaaaggggaaagaggggctgctggtgaaccaggtcctcatggcccacctggtgtcccaggttctgtgggtcccaaaggttccagcggctctcctggcccacagggccctccaggtcctgtaggtctccaagggctccgaggtgaagtaggacttcctggtgtcaaaggtgacaaaggaccaatgggaccaccaggacccaaaggtgaccagggtgagaaaggacctcgaggcctcacaggcgagcctggcatgagaggtttgcctggtgctgttggtgagcccggggctaaaggagcaatgggtcctgctggcccagacggacaccaaggcccaagaggtgaacaaggtcttactgggatgcctggaatccgtggcccaccaggaccttctggagacccaggaaagccaggtctcacaggaccccagggacctcagggacttcccggtacccctggccgaccaggaataaaaggtgaaccaggagctccaggcaagatcgtgacttcggaggggtcatcgatgctcactgtcccaggccccccaggacctcctggagccatgggacccccaggacctccaggtgccccaggccctgccggcccagctggtctcccaggacatcaagaagttcttaatttacaaggtcccccaggcccacccggcccacgcgggccaccagggccttccattccaggcccaccaggaccccgaggcccaccaggggagggtttgccaggcccaccaggcccaccaggatcgttcctgtccaactcagaaaccttcctctccggccccccaggcccacctggccccccaggtcccaagggagaccaaggtcccccaggccccagaggacaccaaggcgagcaaggcctcccaggtttctcaacctcagggtccagttctttcggactcaaccttcagggaccaccaggcccacctggcccccagggacccaaaggtgacaaaggtgatccaggtgttccaggggctcttggcattcctagtggtccttctgaagggggatcatcaagtaccatgtacgtgtcaggcccgccagggccccctgggccccctgggcctccgggctctatcagcagctctggccaggagattcagcagtacatctctgagtacatgcagagtgacagtattagatcttacctatccggagttcagggtcccccaggcccacctggtcccccaggacctgtcaccaccatcacaggcgagactttcgactactcagagctggcaagccacgttgtgagctacttacggacttcggggtacggtgtcagcttgttctcgtcctccatctcttctgaagacattctggctgtgctgcagcgggatgacgtgcgtcagtacctacgtcagtacttgatgggccctcggggtccgccagggccaccaggagccagtggagatgggtccctcctgtctttggactatgcagagctgagtagtcgcattctcagctacatgtcgagttctgggatcagcattgggcttcctggtcccccggggccccctggcttgccgggaacctcctatgaggagctcctctccttgctgcgagggtctgaattcagaggcatcgttggacccccaggtcccccgggtccaccagggatcccaggcaatgtgtggtccagcatcagcgtggaggacctctcgtcttacttacatactgccggcttgtcattcatcccaggccctccaggacctcctggtcccccagggcctcgagggcccccgggtgtctcaggagccctggcaacctatgcagctgaaaacagcgacagcttccggagcgagctgatcagctacctcacaagtcctgatgtgcgcagcttcattgttggccccccaggccctcctgggccgcagggaccccctggggacagccgcctcctgtccacggatgcctcccacagtcggggtagcagctcctcctcacacagctcatctgtcaggcggggcagctcctacagctcttccatgagcacaggaggaggtggtgcaggctccctgggtgcaggcggtgcctttggtgaagctgcaggagacaggggtccctatggcactgacatcggcccaggcggaggctatggggcagcagcagaaggcggcatgtatgctggcaatggcggactattgggagctgactttgctggagatctggattacaatgagctggctgtgagggtgtcagagagcatgcagcgtcagggcctactgcaagggatggcctacactgtccagggcccaccaggccagcctgggccacaggggccacccggcatcagcaaggtcttctctgcctacagcaacgtgactgcggacctcatggacttcttccaaacttatggagccattcaaggaccccctgggcaaaaaggagagatgggcactccaggacccaaaggtgacaggggccctgctgggccaccaggtcatcctgggccacctggccctcgaggacacaagggagaaaaaggagacaaaggtgaccaagtctatgctgggcggagaaggagaagaagtattgctgtcaagccgtgagctagccatggcaggacagctcctggaccaggtctcataatgcatgtggcacttaggtccaaggtctccagagggtgaaagctggagtctgtcaatgtcctactgagacagcacagccaacctagctagcaacatttgttttagtctgaacaatatatacttatagaattcagtcaaagatacacaatctgaaacagcttcatggggtggactctaacagtagttgcaatgttttagaatgagacttacttctctgctatctagatctgaactccttggcttctttacttagttcaagccccagcctaggaaagccagttacataaaagttggctcaggagtcttagagctttacctaaatatgagcccagaaaacggaggatgggggtggggcgccttcctggaggtgacacttgatgggggtgtgttctggttactgttctaaggctgtgccatcagctccttcctcccctgttcattctgcattctctagtcagttggctaagaagtgactcttgcaactaaaaaaattaagaaattcacttcccctctaggaggtgatgatagggtttctaatggttatatgtatatcacattcccatttgcttagaaagtctgattgtagctatgattgtccgtaggcccatactagagttcatggatatgttatactgaaccaggccagagcaaacagaaaaagaaggttgagggcaatggacaaggaaggaataaagggagaagagggaaaacagaaaacctgatgctggggacacagcatcagctcaagacgtcaccctccattctgcactcagaaaatggcacttgggggactgggcgcagttggtctttaaccacttttcaatgtctaaaaacatttgtttgtggtctataagatgaaacatcatttcaatcgtaaaatttcccattaaagaagtttttttttctaa

SEQ ID NO: 481 - DNA, 2060 bp, Homo Sapiens
  NM_000505
ctattgatctggactcctggataggcagctggaccaacggacggatgccatgagggctctgctgctcctggggttcctgctggtgagcttggagtcaacactttcgattccaccttgggaagcccccaaggagcataagtacaaagctgaagagcacacagtcgttctcactgtcaccggggagccctgccacttccccttccagtaccaccggcagctgtaccacaaatgtacccacaagggccggccaggccctcagccctggtgtgctaccacccccaactttgatcaggaccagcgatggggatactgtttggagcccaagaaagtgaaagaccactgcagcaaacacagcccctgccagaaaggagggacctgtgtgaacatgccaagcggcccccactgtctctgtccacaacacctcactggaaaccactgccagaaagagaagtgctttgagcctcagcttctccggtttttccacaagaatgagatatggtatagaactgagcaagcagctgtggccagatgccagtgcaagggtcctgatgcccactgccagcggctggccagccaggcctgccgcaccaacccgtgcctccatgggggtcgctgcctagaggtggagggccaccgcctgtgccactgcccggtgggctacaccggagccttctgcgacgtggacaccaaggcaagctgctatgatggccgcgggctcagctaccgcggcctggccaggaccacgctctcgggtgcgccctgtcagccgtgggcctcggaggccacctaccggaacgtgactgccgagcaagcgcggaactggggactgggcggccacgccttctgccggaacccggacaacgacatccgcccgtggtgcttcgtgctgaaccgcgaccggctgagctgggagtactgcgacctggcacagtgccagaccccaacccaggcggcgcctccgaccccggtgtcccctaggcttcatgtcccactcatgcccgcgcagccggcaccgccgaagcctcagcccacgacccggaccccgcctcagtcccagaccccgggagccttgccggcgaagcgggagcagccgccttccctgaccaggaacggcccactgagctgcgggcagcggctccgcaagagtctgtcttcgatgacccgcgtcgttggcgggctggtggcgctacgcggggcgcacccctacatcgccgcgctgtactggggccacagtttctgcgccggcagcctcatcgccccctgctgggtgctgacggccgctcactgcctgcaggaccggcccgcacccgaggatctgacggtggtgctcggccaggaacgccgtaaccacagctgtgagccgtgccagacgttggccgtgcgctcctaccgcttgcacgaggccttctcgcccgtcagctaccagcacgacctggctctgttgcgccttcaggaggatgcggacggcagctgcgcgctcctgtcgccttacgttcagccggtgtgcctgccaagcggcgccgcgcgaccctccgagaccacgctctgccaggtggccggctggggccaccagttcgagggggcggaggaatatgccagcttcctgcaggaggcgcaggtaccgttcctctccctggagcgctgctcagccccggacgtgcacggatcctccatcctccccggcatgctctgcgcagggttcctcgagggcggcaccgatgcgtgccagggtgattccggaggcccgctggtgtgtgaggaccaagctgcagagcgccggctcaccctgcaaggcatcatcagctggggatcgggctgtggtgaccgcaacaagccaggcgtctacaccgatgtggcctactacctggcctggatccgggagcacaccgtttcctgattgctcagggactcatctttccctccttggtgattccgcagtgagagagtggctggggcatggaaggcaagattgtgtcccattcccccagtgcggccagctccgcgccaggatggcgcaggaactcaataaagtgctttgaaaatgctgagaaaaaaaaaaa

SEQ ID NO: 482 - DNA, 1647 bp, Homo Sapiens
  NM_000507
gaagatccaagcaggcggagccgcggtctggtccgcggggtaggcggggcgcaagagtgttcccgggggcggggggccgacccgcgtctaaaggtttccgcgattcacccgccggcgcctggcctggcccagttgcaccacgagcgctgcggacactcggggcggcagtcggtctgtcagtcctcccgccaggtcccgcggcccgcacctgccgcccgcacctgcagctccgcacctgcggccagtgcctactgccctctcttgccgcccgcacctgcagccccgcacctgccgcttgcacctgcagccccgcgctctacccggttcaagcatggctgaccaggcgcccttcgacacggacgtcaacaccctgacccgcttcgtcatggaggagggcaggaaggcccgcggcacgggcgagttgacccagctgctcaactcgctctgcacagcagtcaaagccatctcttcggcggtgcgcaaggcgggcatcgcgcacctctatggcattgctggttctaccaacgtgacaggtgatcaagttaagaagctggacgtcctctccaacgacctggttatgaacatgttaaagtcatcctttgccacgtgtgttctcgtgtcagaagaagataaacacgccatcatagtggaaccggagaaaaggggtaaatatgtggtctgttttgatccccttgatggatcttccaacatcgattgccttgtgtccgttggaaccatttttggcatctatagaaagaaatcaactgatgagccttctgagaaggatgctctgcaaccaggccggaacctggtggcagccggctacgcactgtatggcagtgccaccatgctggtccttgccatggactgtggggtcaactgcttcatgctggacccggccatcggggagttcattttggtggacaaggatgtgaagataaaaaagaaaggtaaaatctacagccttaacgagggctacgccagggactttgaccctgccgtcactgagtacatccagaggaagaagttccccccagataattcagctccttatggggcccggtatgtgggctccatggtggctgatgttcatcgcactctggtctacggagggatatttctgtaccccgctaacaagaagagccccaatggaaagctgagactgctgtacgaatgcaaccccatggcctacgtcatggagaaggctgggggaatggccaccactgggaaggaggccgtgttagacgtcattcccacagacattcaccagagggcgccggtgatcttgggatcccccgacgacgtgctcgagttcctgaaggtgtatgagaagcactctgcccagtgagcacctgccctgcctgcatccggagaattgcctctacctggaccttttgtctcacacagcagtaccctgacctgctgtgcaccttacattcctagagagcagaaataaaaagcatgactatttccaccatcaaatgctgtagaatgcttggcactccctaaccaaatgctgtctccataatgccactggtgttaagatatattttgagtggatggaggagaaataaacttattcctccttaaaaaaaaaaaaaaaaaaaaaaaaaaaaaaaaaaaaaaaaaaaaaaaaaaaaaaaaaaa

SEQ ID NO: 483 - DNA, 3810 bp, Homo Sapiens
  NM_000514
ccgcctccagcgcgcccttgctgccccgcgcgaccccaggattgcgaactcttgcccctgacctgttgggcggggctccgcgctccagccatcagcccggatgggtctcctggctgggacttggggcacctggagttaatgtccaacctagggtctgcggagacccgatccgaggtgccgccgccggacgggactttaagatgaagttatgggatgtcgtggctgtctgcctggtgctgctccacaccgcgtccgccttcccgctgcccgccggtaagaggcctcccgaggcgcccgccgaagaccgctccctcggccgccgccgcgcgcccttcgcgctgagcagtgactcaaatatgccagaggattatcctgatcagttcgatgatgtcatggattttattcaagccaccattaaaagactgaaaaggtcaccagataaacaaatggcagtgcttcctagaagagagcggaatcggcaggctgcagctgccaacccagagaattccagaggaaaaggtcggagaggccagaggggcaaaaaccggggttgtgtcttaactgcaatacatttaaatgtcactgacttgggtctgggctatgaaaccaaggaggaactgatttttaggtactgcagcggctcttgcgatgcagctgagacaacgtacgacaaaatattgaaaaacttatccagaaatagaaggctggtgagtgacaaagtagggcaggcatgttgcagacccatcgcctttgatgatgacctgtcgtttttagatgataacctggtttaccatattctaagaaagcattccgctaaaaggtgtggatgtatctgactccggctccagagactgctgtgtattgcattcctgctacagtgcaaagaaagggaccaaggttcccaggaaatgtttgcccagaatggaagatgaggaccaaggaggcggaggaggaggaagaagaagaggaggaggaggaggaggaggaggaggaggaggaaggcagccatcatgggagcctggtagagggagatccagctacagacaactggacaggagagagagaaaacagccctctggattctccaggatggcagccgatgtcactagaagctcagggctgatgttcctggttggctattgccaccatttcagctgatacagtccaccatcactgattaccggcgcggttgcggtggatgcacttgaaccaaaccagtgtatctcctgtgatttgttttcatgtgtccgaagacaccagggaaacagagatcctggtgttgttccttgttattacgttttactgctgaaagtaagaggtttatttttctgtcactcagtggagacataccctggaaaggagaggggaaaaaaaaagcaaagatacaagagataatcacctttgcatttgaaagttgaggcccgaggtttactacaaccagcatttttgccaacggttggtgattgatttccatcacggtgtgtggggtgggaagaagttggctaggaaccaaaaaggctgtgctcatgattaaacacaaacctgaaggtatttcctttatgtccttggaaacaggaaacgagttgtggttttcgccagcattcttgtaggagagaatcggggaaggccccgaactgcccccgggcagggagagcccctcaggcctgttggtttacagagagacagatgttacataaccagctccgttgatgcgtggtcaccagtgaccagagaagctactcgatgcaatgcatctgtttcagatacagaaatatagagaagatatttattgaaatttaagttattgttatttattaccgttcactaatgaatttctcttttttcccttatttattaaagtttcttttcaaaggtgccaaagtatatgtgctcgcaaaatgcaaagaaaggtgacaaaaggaaatttgaattgggaacaagggtccatgcttttcaaagtattaaaaagttttttgccaggcaaaaatcacttactttacctttttaagaaaatttgtcattaattttccccagatttcagcatttttcccaatttttatttgtggagcatctcaggcaagccccctttcctggagcagcgtgcagagaccactggcacttgactttatttcttccttgctccattgctgaacagaaatgtcgtgggctccacttcctgttgtctttaagctcttagtcccctccacgtatacctatctgtactatgcataaccatatgtagaaaaggttcagttccttttagtaggtagtcctggatttaatgctgacctaaaagtaatgtcgacaatgctgtcaggtagctgccgttctaccgactccctccatccctgcccacccactgccctcccgagaatatgctggctgcccagtgcagcccgggagacacaggggccttccagaggtagggtctaccaggtcctgtacaacccctgggctgtcaccgggggtcaacagctgctgctcctatatacccaaacacctgacagctccctggggagcagatggctgagaagggtgctgaggaagccatattgggaccagccacagccacacacatggagcctcatacttaggagcgtgctgcctttaaatgaaggtggtcggggccagtgcagcggctcacacccataatcccaacactttggaaagccaaggtgggaggatctcttgaacccaggagtttgagaccagcttgggcaacatagggagaccctgtctctacagaaactttaaaaattaggcaggcatgatggtgcacacctgtggtcccagctactcaagaggctgaaggaggatcacttgagtccagaaggtcgaggctgcagtgagctgtgatcatgccactgcactccagcctaagtgacagtgcggtaccctgtctcaaaaaaaaaaaaaaaaaaaaaaagaggttggagcaggaggaagcataggggcgggaacagccacctcctccatgccctagattgtgaatttatcgggcagccaacacatgtatgacacactaggccctgtattacagcttgttacgcatttcataaaagggattttcattaaggagataatctattactacctaccttagtggctactagtataaaactatgacagatttagcaattaaatgaaatactggcctccatcaaataatcatagtaacaagaagcagcagttaccagacatctgatccccttcccccaaaatacccaaattcttcatggttctgcccttctctgtcctttctgctccccttgctcgcctgggaaatggaggaaaggccttccctctcacactgtcttgggatcttgctgagaattcagactgctcgaaacagtgacaaaccccagccatccagtcattcgtggagcacaatttggatgtggccccaggggcatctgtcccattcagagaaccttggcagtgcgatggccactgttcccaggcttcaacctcagtgaccccccccaacaactccccatggagagtccctgcccaaaaaagctgtaggatccaaggggtgtcaatagctcgttcccggcatcacctacacaccacaagcaggttttaatggaagcaagttgctccaccaaatccacaaaagggtaaagtttgtgatttttctttatcattgcgatcaccatctgataccgtaaggagtgcacttgtttggaagttctgacttctctgatctgtcttggtcgtttgtgttataaaaccaaagttctctacagactttatttttgtacaatatcattttgtaactttttacaaataaaaactcatttctattgc

SEQ ID NO: 484 - DNA, 626 bp, Homo Sapiens
  NM_000518
acatttgcttctgacacaactgtgttcactagcaacctcaaacagacaccatggtgcatctgactcctgaggagaagtctgccgttactgccctgtggggcaaggtgaacgtggatgaagttggtggtgaggccctgggcaggctgctggtggtctacccttggacccagaggttctttgagtcctttggggatctgtccactcctgatgctgttatgggcaaccctaaggtgaaggctcatggcaagaaagtgctcggtgcctttagtgatggcctggctcacctggacaacctcaagggcacctttgccacactgagtgagctgcactgtgacaagctgcacgtggatcctgagaacttcaggctcctgggcaacgtgctggtctgtgtgctggcccatcactttggcaaagaattcaccccaccagtgcaggctgcctatcagaaagtggtggctggtgtggctaatgccctggcccacaagtatcactaagctcgctttcttgctgtccaatttctattaaaggttcctttgttccctaagtccaactactaaactgggggatattatgaagggccttgagcatctggattctgcctaataaaaaacatttattttcattgc

SEQ ID NO: 485 - DNA, 774 bp, Homo Sapiens
  NM_000519
agggcaagttaagggaatagtggaatgaaggttcatttttcattctcacaaactaatgaaaccctgcttatcttaaaccaacctgctcactggagcagggaggacaggaccagcataaaaggcagggcagagtcgactgttgcttacactttcttctgacataacagtgttcactagcaacctcaaacagacaccatggtgcatctgactcctgaggagaagactgctgtcaatgccctgtggggcaaagtgaacgtggatgcagttggtggtgaggccctgggcagattactggtggtctacccttggacccagaggttctttgagtcctttggggatctgtcctctcctgatgctgttatgggcaaccctaaggtgaaggctcatggcaagaaggtgctaggtgcctttagtgatggcctggctcacctggacaacctcaagggcactttttctcagctgagtgagctgcactgtgacaagctgcacgtggatcctgagaacttcaggctcttgggcaatgtgctggtgtgtgtgctggcccgcaactttggcaaggaattcaccccacaaatgcaggctgcctatcagaaggtggtggctggtgtggctaatgccctggctcacaagtaccattgagatcctggactgtttcctgataaccataagaagaccctatttccctagattctattttctgaacttgggaacacaatgcctacttcaagggtatggcttctgcctaataaagaatgttcagctcaacttcctgat

SEQ ID NO: 486 - DNA, 5292 bp, Homo Sapiens
  NM_000527
ctcttgcagtgaggtgaagacatttgaaaatcaccccactgcaaactcctccccctgctagaaacctcacattgaaatgctgtaaatgacgtgggccccgagtgcaatcgcgggaagccagggtttccagctaggacacagcaggtcgtgatccgggtcgggacactgcctggcagaggctgcgagcatggggccctggggctggaaattgcgctggaccgtcgccttgctcctcgccgcggcggggactgcagtgggcgacagatgcgaaagaaacgagttccagtgccaagacgggaaatgcatctcctacaagtgggtctgcgatggcagcgctgagtgccaggatggctctgatgagtcccaggagacgtgcttgtctgtcacctgcaaatccggggacttcagctgtgggggccgtgtcaaccgctgcattcctcagttctggaggtgcgatggccaagtggactgcgacaacggctcagacgagcaaggctgtccccccaagacgtgctcccaggacgagtttcgctgccacgatgggaagtgcatctctcggcagttcgtctgtgactcagaccgggactgcttggacggctcagacgaggcctcctgcccggtgctcacctgtggtcccgccagcttccagtgcaacagctccacctgcatcccccagctgtgggcctgcgacaacgaccccgactgcgaagatggctcggatgagtggccgcagcgctgtaggggtctttacgtgttccaaggggacagtagcccctgctcggccttcgagttccactgcctaagtggcgagtgcatccactccagctggcgctgtgatggtggccccgactgcaaggacaaatctgacgaggaaaactgcgctgtggccacctgtcgccctgacgaattccagtgctctgatggaaactgcatccatggcagccggcagtgtgaccgggaatatgactgcaaggacatgagcgatgaagttggctgcgttaatgtgacactctgcgagggacccaacaagttcaagtgtcacagcggcgaatgcatcaccctggacaaagtctgcaacatggctagagactgccgggactggtcagatgaacccatcaaagagtgcgggaccaacgaatgcttggacaacaacggcggctgttcccacgtctgcaatgaccttaagatcggctacgagtgcctgtgccccgacggcttccagctggtggcccagcgaagatgcgaagatatcgatgagtgtcaggatcccgacacctgcagccagctctgcgtgaacctggagggtggctacaagtgccagtgtgaggaaggcttccagctggacccccacacgaaggcctgcaaggctgtgggctccatcgcctacctcttcttcaccaaccggcacgaggtcaggaagatgacgctggaccggagcgagtacaccagcctcatccccaacctgaggaacgtggtcgctctggacacggaggtggccagcaatagaatctactggtctgacctgtcccagagaatgatctgcagcacccagcttgacagagcccacggcgtctcttcctatgacaccgtcatcagcagagacatccaggcccccgacgggctggctgtggactggatccacagcaacatctactggaccgactctgtcctgggcactgtctctgttgcggataccaagggcgtgaagaggaaaacgttattcagggagaacggctccaagccaagggccatcgtggtggatcctgttcatggcttcatgtactggactgactggggaactcccgccaagatcaagaaagggggcctgaatggtgtggacatctactcgctggtgactgaaaacattcagtggcccaatggcatcaccctagatctcctcagtggccgcctctactgggttgactccaaacttcactccatctcaagcatcgatgtcaacgggggcaaccggaagaccatcttggaggatgaaaagaggctggcccaccccttctccttggccgtctttgaggacaaagtattttggacagatatcatcaacgaagccattttcagtgccaaccgcctcacaggttccgatgtcaacttgttggctgaaaacctactgtccccagaggatatggttctcttccacaacctcacccagccaagaggagtgaactggtgtgagaggaccaccctgagcaatggcggctgccagtatctgtgcctccctgccccgcagatcaacccccactcgcccaagtttacctgcgcctgcccggacggcatgctgctggccagggacatgaggagctgcctcacagaggctgaggctgcagtggccacccaggagacatccaccgtcaggctaaaggtcagctccacagccgtaaggacacagcacacaaccacccgacctgttcccgacacctcccggctgcctggggccacccctgggctcaccacggtggagatagtgacaatgtctcaccaagctctgggcgacgttgctggcagaggaaatgagaagaagcccagtagcgtgagggctctgtccattgtcctccccatcgtgctcctcgtcttcctttgcctgggggtcttccttctatggaagaactggcggcttaagaacatcaacagcatcaactttgacaaccccgtctatcagaagaccacagaggatgaggtccacatttgccacaaccaggacggctacagctacccctcgagacagatggtcagtctggaggatgacgtggcgtgaacatctgcctggagtcccgtccctgcccagaacccttcctgagacctcgccggccttgttttattcaaagacagagaagaccaaagcattgcctgccagagctttgttttatatatttattcatctgggaggcagaacaggcttcggacagtgcccatgcaatggcttgggttgggattttggtttcttcctttcctcgtgaaggataagagaaacaggcccggggggaccaggatgacacctccatttctctccaggaagttttgagtttctctccaccgtgacacaatcctcaaacatggaagatgaaaggggaggggatgtcaggcccagagaagcaagtggctttcaacacacaacagcagatggcaccaacgggaccccctggccctgcctcatccaccaatctctaagccaaacccctaaactcaggagtcaacgtgtttacctcttctatgcaagccttgctagacagccaggttagcctttgccctgtcacccccgaatcatgacccacccagtgtctttcgaggtgggtttgtaccttccttaagccaggaaagggattcatggcgtcggaaatgatctggctgaatccgtggtggcaccgagaccaaactcattcaccaaatgatgccacttcccagaggcagagcctgagtcactggtcacccttaatatttattaagtgcctgagacacccggttaccttggccgtgaggacacgtggcctgcacccaggtgtggctgtcaggacaccagcctggtgcccatcctcccgacccctacccacttccattcccgtggtctccttgcactttctcagttcagagttgtacactgtgtacatttggcatttgtgttattattttgcactgttttctgtcgtgtgtgttgggatgggatcccaggccagggaaagcccgtgtcaatgaatgccggggacagagaggggcaggttgaccgggacttcaaagccgtgatcgtgaatatcgagaactgccattgtcgtctttatgtccgcccacctagtgcttccacttctatgcaaatgcctccaagccattcacttccccaatcttgtcgttgatgggtatgtgtttaaaacatgcacggtgaggccgggcgcagtggctcacgcctgtaatcccagcactttgggaggccgaggcgggtggatcatgaggtcaggagatcgagaccatcctggctaacacgtgaaaccccgtctctactaaaaatacaaaaaattagccgggcgtggtggcgggcacctgtagtcccagctactcgggaggctgaggcaggagaatggtgtgaacccgggaagcggagcttgcagtgagccgagattgcgccactgcagtccgcagtctggcctgggcgacagagcgagactccgtctcaaaaaaaaaaaacaaaaaaaaaccatgcatggtgcatcagcagcccatggcctctggccaggcatggcgaggctgaggtgggaggatggtttgagctcaggcatttgaggctgtcgtgagctatgattatgccactgctttccagcctgggcaacatagtaagaccccatctcttaaaaaatgaatttggccagacacaggtgcctcacgcctgtaatcccagcactttgggaggctgagctggatcacttgagttcaggagttggagaccaggcctgagcaacaaagcgagatcccatctctacaaaaaccaaaaagttaaaaatcagctgggtacggtggcacgtgcctgtgatcccagctacttgggaggctgaggcaggaggatcgcctgagcccaggaggtggaggttgcagtgagccatgatcgagccactgcactccagcctgggcaacagatgaagaccctatttcagaaatacaactataaaaaaataaataaatcctccagtctggatcgtttgacgggacttcaggttctttctgaaatcgccgtgttactgttgcactgatgtccggagagacagtgacagcctccgtcagactcccgcgtgaagatgtcacaagggattggcaattgtccccagggacaaaacactgtgtcccccccagtgcagggaaccgtgataagcctttctggtttcggagcacgtaaatgcgtccctgtacagatagtggggattttttgttatgtttgcactttgtatattggttgaaactgttatcacttatatatatatatatacacacatatatataaaatctatttatttttgcaaaccctggttgctgtatttgttcagtgactattctcggggccctgtgtagggggttattgcctctgaaatgcctcttctttatgtacaaagattatttgcacgaactggactgtgtgcaacgctttttgggagaatgatgtccccgttgtatgtatgagtggcttctgggagatgggtgtcactttttaaaccactgtatagaaggtttttgtagcctgaatgtcttactgtgatcaattaaatttcttaaatgaaccaatttgtctaaaaaaaaaaa

SEQ ID NO: 487 - DNA, 1825 bp, Homo Sapiens
  NM_000532
agcacatgcgtactcaggtgcgccggtaggggacgcgccggcacagcaaaaatggcggcggcattacgggtggcggcggtcggggcaaggctcagcgttctggcgagcggtctccgcgccgcggtccgcagcctttgcagccaggccacctctgttaacgaacgcatcgaaaacaagcgccggaccgcgctgctgggagggggccaacgccgtattgacgcgcagcacaagcgaggaaagctaacagccagggagaggatcagtctcttgctggaccctggcagctttgttgagagcgacatgtttgtggaacacagatgtgcagattttggaatggctgctgataagaataagtttcctggagacagcgtggtcactggacgaggccgaatcaatggaagattggtttatgtcttcagtcaggattttacagtttttggaggcagtctgtcaggagcacatgcccaaaagatctgcaaaatcatggaccaggccataacggtgggggctccagtgattgggctgaatgactctgggggagcacggatccaagaaggagtggagtctttggctggctatgcagacatctttctgaggaatgttacggcatccggagtcatccctcagatttctctgatcatgggcccatgtgctggtggggccgtctactccccagccctaacagacttcacgttcatggtaaaggacacctcctacctgttcatcactggccctgatgttgtgaagtctgtcaccaatgaggatgttacccaggaggagctcggtggtgccaagacccacaccaccatgtcaggtgtggcccacagagcttttgaaaatgatgttgatgccttgtgtaatctccgggatttcttcaactacctgcccctgagcagtcaggacccggctcccgtccgtgagtgccacgatcccagtgaccgtctggttcctgagcttgacacaattgtccctttggaatcaaccaaagcctacaacatggtggacatcatacactctgttgttgatgagcgtgaattttttgagatcatgcccaattatgccaagaacatcattgttggttttgcaagaatgaatgggaggactgttggaattgttggcaaccaacctaaggtggcctcaggatgcttggatattaattcatctgtgaaaggggctcgttttgtcagattctgtgatgcattcaatattccactcatcacttttgttgatgtccctggctttctacctggcacagcacaggaatacgggggcatcatccggcatggtgccaagcttctctacgcatttgctgaggcaactgtacccaaagtcacagtcatcaccaggaaggcctatggaggtgcctatgatgtcatgagctctaagcacctttgtggtgataccaactatgcctggcccaccgcagagattgcagtcatgggagcaaagggcgctgtggagatcatcttcaaagggcatgagaatgtggaagctgctcaggcagagtacatcgagaagtttgccaaccctttccctgcagcagtgcgagggtttgtggatgacatcatccaaccttcttccacacgtgcccgaatctgctgtgacctggatgtcttggccagcaagaaggtacaacgtccttggagaaaacatgcaaatattccattgtaaacaaatcaaaggaaaagaaaccaagaactgaattactgtctgcccattcacatcccattcctgccttttgcaatcatgaaacctgggaatccaaatagttggataacttagaataactaagtttattaaattctagaaagatctcaaaaaaaaa

SEQ ID NO: 488 - DNA, 2825 bp, Homo Sapiens
  NM_000538
cgcgcaggctgcggtcgcgcaggcgcagtcggggcgccttcccggtataggcgccttttaccccagcgtgtcctgagtctttggttcgcgaagtgccgttaggccaagcaggtgctaaaagcccggggtcgtggaccccggccaggtcttagcagcatggaggcgcagggtgtagcggagggcgcggggccgggcgccgccagcggcgtgccccaccccgcggccctagccccggctgcggctcccaccttggcgccagcctcggtggcggccgcggcctctcaattcaccctgctagtgatgcaaccctgtgctgggcaggacgaggctgcggcccccgggggcagcgttggggcgggcaagcccgttaggtacctgtgcgaaggggccggggatggcgaagaggaggctggggaggacgaggcggacctgttagacacttcggaccctccggggggaggcgagagcgcggctagtttggaggatctagaggacgaggagactcactcggggggcgagggcagcagcgggggcgcccggaggcggggcagcggtgggggcagcatgagcaagacctgcacctacgaaggctgcagcgagaccacgagccaggtggccaagcagcgcaaaccgtggatgtgcaagaaacaccgcaacaagatgtacaaggacaagtataaaaagaagaagagcgaccaggccctgaactgcggtgggactgcctcgactggcagcgcgggaaacgtcaaactcgaggaaagtgcagataacatactctccattgttaaacaaagaacaggatcttttggggatcgtcctgcaagacctactcttttagaacaagtgttaaatcaaaaaagactgtcgttactaagaagtccagaagtagtgcaatttttacagaaacagcaacagctattaaatcagcaagttttggagcaaagacaacagcagtttccaggaacatcaatgtgagggaacttaccaagaacatctacatggttttttatcttattgtaatagatgagcatatttttttaccagacataaatggggtaataatctatgcctgtagaacataaacattttcctgtaaatgtatgtgtgcatttggggataagtaagtattgcactttgtgcatctaatctttcagattactgtgagtttgaagaagtcagcttatctttccaaataacatttaattataatgttttttaaaaaatatattcctcttcagtcattgttactgaaggtaatgaagcagttactttctgtggaagtcataaagttaatagatattaatcttgactcatctagctcagtggttctcatcaagggtcaatttgattgtcatagtgaccttgaaaaccactggcttttagtgagtggccaggaatgctaaatgttctgcagtgtcaggggtagtcccacatactaaagattgtctcacccgcagtgccaataacactcctaagaaatgttgatggctattttgtggtgctaacatgtagttggggcacctataattgggttctcttaataacctttctttgcagttaagactgaagctgtcaaagaggtaagcacattttatatagacgtaaggaaagtgattattgtttaatatctgtgaatttaggatgtgcatctcttttcagaggtgtgttagtaaaacctgacggattaactaagcacactgggatgtgtctcctacagttggcttctctctttgatgttacctgttagtgctgatctcttaaagcagacatttcttgtttgttgaatttgtgaacagtatagatctcagcccaccaatgccaagacaaaattatttttcttatacttattttttattaaacaaaatgaaaaagatccttttcaaaaaggtgatcctgaaaataaaactaacactccagtattttgtcattgtttttcgcaattgagctatctgaaaactgttattcctaagtaatgttcaaaaatgataagtaatctggatacctttttcttatactttctcctaggaaaactttaaaactttaaaaaggcaaacctaccaataggaataacaaattaaatgtcaagagagtatatccaatattaggatataaatgtatgtgtctcaagtttaactctacaaaaatttgttacttgttttttaaactctatatataaagttcgacttaatcatggctgttctaagaagtacttatggagagcaagaacgtttttgttcatttcttaatgtgtgtgtttttacttgcatatctgttcaaaacacttttaacaaaattaattcattaaagtccagttgttgacctttgagttagctgatttctttattctgttctttagtttattcttactagatgcagaggaattcatctactgtctgttattaactgttagtttattctcatacttacgatgttgagagtttttttgaagcttaagttaccctttatggtggaaaacattagcttatgcttctttagatggaataatgggaaaggagggaaatgggaaatggatggaaatgggaaaggagggaaaataatagcccagtgagagctgaatgaaaagggactgaatttaaatatttgtaagaactttgtgatgatgagtaattgtcagacgtgggatagataactgagaggctcagaatctttaccaaggatattttttaggataaggtagctgcctgttcatgaatttggataagaatagtaggacaatattcaacacaatttaatttttgtctgccacattagacatttttttaccttataaaatgatcaataaagcaataaggtttattttgggt

SEQ ID NO: 489 - DNA, 5679 bp, Homo Sapiens
  NM_000544
gcccgccctggccgagcgtagctggcggaccagagccggtagcgaggttgggagagacggagcggacctcagcgctgaagcagaagtccccggagctgcggtctccccgccgcggctgagccatgcggctccctgacctgagaccctggacctccctgctgctggtggacgcggctttactgtggctgcttcagggccctctggggactttgcttcctcaagggctgccaggactatggctggaggggaccctgcggctgggagggctgtgggggctgctaaagctaagagggctgctgggatttgtggggacactgctgctcccgctctgtctggccacccccctgactgtctccctgagagccctggtcgcgggggcctcacgtgctcccccagccagagtcgcttcagccccttggagctggctgctggtggggtacggggctgcggggctcagctggtcactgtgggctgttctgagccctcctggagcccaggagaaggagcaggaccaggtgaacaacaaagtcttgatgtggaggctgctgaagctctccaggccggacctgcctctcctcgttgccgccttcttcttccttgtccttgctgttttgggtgagacattaatccctcactattctggtcgtgtgattgacatcctgggaggtgattttgacccccatgcctttgccagtgccatcttcttcatgtgcctcttctcctttggcagctcactgtctgcaggctgccgaggaggctgcttcacctacaccatgtctcgaatcaacttgcggatccgggagcagcttttctcctccctgctgcgccaggacctcggtttcttccaggagactaagacaggggagctgaactcacggctgagctcggataccaccctgatgagtaactggcttcctttaaatgccaatgtgctcttgcgaagcctggtgaaagtggtggggctgtatggcttcatgctcagcatatcgcctcgactcaccctcctttctctgctgcacatgcccttcacaatagcagcggagaaggtgtacaacacccgccatcaggaagtgcttcgggagatccaggatgcagtggccagggcggggcaggtggtgcgggaagccgttggagggctgcagaccgttcgcagttttggggccgaggagcatgaagtctgtcgctataaagaggcccttgaacaatgtcggcagctgtattggcggagagacctggaacgcgccttgtacctgctcgtaaggagggtgctgcacttgggggtgcagatgctgatgctgagctgtgggctgcagcagatgcaggatggggagctcacccagggcagcctgctttcctttatgatctaccaggagagcgtggggagctatgtgcagaccctggtatacatatatggggatatgctcagcaacgtgggagctgcagagaaggttttctcctacatggaccgacagccaaatctgccttcacctggcacgcttgcccccaccactctgcagggggttgtgaaattccaagacgtctcctttgcatatcccaatcgccctgacaggcctgtgctcaaggggctgacgtttaccctacgtcctggtgaggtgacggcgctggtgggacccaatgggtctgggaagagcacagtggctgccctgctgcagaatctgtaccagcccacagggggacaggtgctgctggatgaaaagcccatctcacagtatgaacactgctacctgcacagccaggtggtttcagttgggcaggagcctgtgctgttctccggttctgtgaggaacaacattgcttatgggctgcagagctgcgaagatgataaggtgatggcggctgcccaggctgcccacgcagatgacttcatccaggaaatggagcatggaatatacacagatgtaggggagaagggaagccagctggctgcgggacagaaacaacgtctggccattgcccgggcccttgtacgagacccgcgggtcctcatcctggatgaggctactagtgccctagatgtgcagtgcgagcaggccctgcaggactggaattcccgtggggatcgcacagtgctggtgattgctcacaggctgcaggcagttcagcgcgcccaccagatcctggtgctccaggagggcaagctgcagaagcttgcccagctccaggagggacaggacctctattcccgcctggttcagcagcggctgatggactgaggccccagggatactgggccctcttctcaggggcgtctccaggacccagagctgttcctgctttgagtttccctagagctgtgcggccagatagctgttcctgagttgcaggcacgatggagatttggacactgtgtgcttttggtggggtagagaggtggggtggggtggggtgggggctgtctgtgtccaggaaacttaattccctggtgactagagctttgcctggtgatgaggagtattttgtggcataatacatatattttaaaatattttccttcttacatgaactgtatacattcatatagaaaatttagacaatataaaaaagtacaaagaagaaaagtaaaagtacccattgtttcacttcctggagataaccatagttgctattttgctgcctgtcccatcagtcgtttatctgttgtttgagatagaaattaaccaaaaatgacataaatattcatgagattgccttcctatatccttccttgttcctaccagtgtctgctattttgaagaagctagggtctggagggacagagaacagttccctgattaacagtattaatagcgacattggtaacagctaccatttatagagttttaatgggagtaggagctatgctaagtgtttttcatgtattatcgtttttaatcattatccccaaccctatgaggttggttattatccccattttacagatgaggaaactgaagctcaaagaggctcaatgactttcccaaggtggtcgtagtggtggagttggagtttgaacacaggcctgaccctagagtccacaccctgacccaatcaattatattgcatcttgggtccataaaccctaatccataatcccatcaagaaaagctctgctgctcttagctctaaataattcagaatctattctcttctctccagtcccgttgttatagtcttcactcatagacttaagatgatcccatcaccagagaggtttctctaccattagcttccctcttccggccattcttcacaaagtcatttttctaaattctgtgtcacatacgatgatggcatttctggaaattccttcaggtgctctcaagccctgctgcagagatccttttcagagcacacactgttccagcccatctgtctcaccctctcctgttgtatccagctccacgacaaacttctgccttccccaacacctttgtgcctttgcatatggtgttttcttgcccattttctgctcgactcgcccctgattttcaagttcaagacttaactcagggttcaggtcttccaggaggccttacttatgtcgtcagtctggggaactctccatgtgcttctatcactgtgcggttacctctttcacagcccttttaaagttctatcttccctttcccaccttttttgaccttccactagaccatgagcacctgggcggaaagccatatatcttattaagctttatatctgctacctggccgagggcctaattcatagtggagaataaatagtcaattgaataaatgaataaatatctccaccatcgtactaatcttaatcctccctgcccactcccaccactgaaaatgcaacattgtacacatcactggttgttgggagggacttaccttggaaagttgctattctaggaaagagaaaccttcatattcctggaaacagcaggtagtttccagtgctggcaatgaattccccagaactgctgttttggattttttcttgcctggcagctgttgggagcagggtgcagtgaggatggggtgagagtgggcagtttcttgtgcagatttgcctttctttcatcctggggctgacttgcagctccacacccatccatctctcaaatttcacagagggtaaaataggcatttggagagaaagaactctggcctgattcctttctctcccacaaatgtcctttattcataaaacaggaataataattcctgtatctcccaactacatggaagctgcagccctcacagaagaagatgatctgagaaattctttgatttcctcagtacagttatacccatgcatcataatactttaagcctggaaggcatcttaaaaataatgcaacagtcaaacctaattttacagagaaactgacatgaaatcacgcagctaatcatgataaagctgggtggaaaacttatcttgatgggcagtacaggaagatgcagtagaccttaagatgtcctgaaagtttcttatctcaggggaaactcccaggtaggctttatgtcagggacacagaaaaatgctccctgaaagtcaaaatattcgggctagacagacaaattcctgtaagtgtggtttgtctgggaaccacagatgtcactaatcctggtttgctccagagttctttttgttcactcctaccccccatcaccatttgattgatctccttaccctgtaatttccccttcttgtcgcttacctgcagtatctttcccacccaggcatgccttattctttctaaaggaaagtatgaatggagaggggaaagcttgggaaactgatagatttccttggatgccaaaacacctccatagcctgtctgcccggccctatgtggaaacagcattgagtttcaagtcctttatgcctccacccagggatagccacttgtaatccacatggcaattgtgaaacaagcaggaaatgcgtaattgtcagaattttgtggggaaaggactagggaataaggaaaacaaagatcttccttgtgttttagagctgtcagctagaggagcacctgcttgagtctgatgccatctaatggtcccagaagaaactgggttttgaacctagagttccatggactcttaggaattagactactactactactaagcattcactggtgcttactatgtgctattgctgtgccaagtatctgaaacctgtcttcttaccttatttttcaagataattctatgtggcaggtattactatctcaattctaagagtgagaaaatggagttttagaaacatttactaacttgcctgggtcacatagctaaggaagaggtggacttgcccagctttgcataaaactcctcaaaagagttgcctatactccctgactccacttatcttcctactatcctctttttaaaatatattatttatttatttaaataagcaatatatgaatgtggtttgaaattcaaaagacacaaagaagtatacagaggaaagcctcactctcaatccttctcaaggtttgctaattcctcttgcataggcaatccgttcttccagctttgtgtttatctttccagagaagtttactgtgtattaagcaaatatgtatatctttattcttgctcagtattttcgcaaacagcagctgtctaagttcactgttctgaactttattttttaaattaaaaatatatggctatgtagtattctatttta

SEQ ID NO: 490 - DNA, 2586 bp, Homo Sapiens
  NM_000546
gattggggttttcccctcccatgtgctcaagactggcgctaaaagttttgagcttctcaaaagtctagagccaccgtccagggagcaggtagctgctgggctccggggacactttgcgttcgggctgggagcgtgctttccacgacggtgacacgcttccctggattggcagccagactgccttccgggtcactgccatggaggagccgcagtcagatcctagcgtcgagccccctctgagtcaggaaacattttcagacctatggaaactacttcctgaaaacaacgttctgtcccccttgccgtcccaagcaatggatgatttgatgctgtccccggacgatattgaacaatggttcactgaagacccaggtccagatgaagctcccagaatgccagaggctgctccccccgtggcccctgcaccagcagctcctacaccggcggcccctgcaccagccccctcctggcccctgtcatcttctgtcccttcccagaaaacctaccagggcagctacggtttccgtctgggcttcttgcattctgggacagccaagtctgtgacttgcacgtactcccctgccctcaacaagatgttttgccaactggccaagacctgccctgtgcagctgtgggttgattccacacccccgcccggcacccgcgtccgcgccatggccatctacaagcagtcacagcacatgacggaggttgtgaggcgctgcccccaccatgagcgctgctcagatagcgatggtctggcccctcctcagcatcttatccgagtggaaggaaatttgcgtgtggagtatttggatgacagaaacacttttcgacatagtgtggtggtgccctatgagccgcctgaggttggctctgactgtaccaccatccactacaactacatgtgtaacagttcctgcatgggcggcatgaaccggaggcccatcctcaccatcatcacactggaagactccagtggtaatctactgggacggaacagctttgaggtgcgtgtttgtgcctgtcctgggagagaccggcgcacagaggaagagaatctccgcaagaaaggggagcctcaccacgagctgcccccagggagcactaagcgagcactgcccaacaacaccagctcctctccccagccaaagaagaaaccactggatggagaatatttcacccttcagatccgtgggcgtgagcgcttcgagatgttccgagagctgaatgaggccttggaactcaaggatgcccaggctgggaaggagccaggggggagcagggctcactccagccacctgaagtccaaaaagggtcagtctacctcccgccataaaaaactcatgttcaagacagaagggcctgactcagactgacattctccacttcttgttccccactgacagcctcccacccccatctctccctcccctgccattttgggttttgggtctttgaacccttgcttgcaataggtgtgcgtcagaagcacccaggacttccatttgctttgtcccggggctccactgaacaagttggcctgcactggtgttttgttgtggggaggaggatggggagtaggacataccagcttagattttaaggtttttactgtgagggatgtttgggagatgtaagaaatgttcttgcagttaagggttagtttacaatcagccacattctaggtaggggcccacttcaccgtactaaccagggaagctgtccctcactgttgaattttctctaacttcaaggcccatatctgtgaaatgctggcatttgcacctacctcacagagtgcattgtgagggttaatgaaataatgtacatctggccttgaaaccaccttttattacatggggtctagaacttgacccccttgagggtgcttgttccctctccctgttggtcggtgggttggtagtttctacagttgggcagctggttaggtagagggagttgtcaagtctctgctggcccagccaaaccctgtctgacaacctcttggtgaaccttagtacctaaaaggaaatctcaccccatcccacaccctggaggatttcatctcttgtatatgatgatctggatccaccaagacttgttttatgctcagggtcaatttcttttttcttttttttttttttttttctttttctttgagactgggtctcgctttgttgcccaggctggagtggagtggcgtgatcttggcttactgcagcctttgcctccccggctcgagcagtcctgcctcagcctccggagtagctgggaccacaggttcatgccaccatggccagccaacttttgcatgttttgtagagatggggtctcacagtgttgcccaggctggtctcaaactcctgggctcaggcgatccacctgtctcagcctcccagagtgctgggattacaattgtgagccaccacgtccagctggaagggtcaacatcttttacattctgcaagcacatctgcattttcaccccacccttcccctccttctccctttttatatcccatttttatatcgatctcttattttacaataaaactttgctgccacctgtgtgtctgaggggtg

SEQ ID NO: 491 - DNA, 5765 bp, Homo Sapiens
  NM_000553
cagccgcccctcctgcggccgctgcgggggccgccgcctgacttcggacaccggccccgcacccgccaggaggggagggaaggggaggcggggagagcgacggcggggggcgggcggtggaccccgcctcccccggcacagcctgctgaggggaagagggggtctccgctcttcctcagtgcactctctgactgaagcccggcgcgtggggtgcagcgggagtgcgaggggactggacaggtgggaagatgggaatgaggaccgggcggcgggaatgttctcacttctccggattccaccgggatgcaggactctagctgcccagccgcacctgcgaagagactacacttcccgaggtgctcagcggcagcgagggcctccacgcatgcgcaccgcggcgcgctgggcggggctggatgggctgtggtgggagggttgcagcgccgcgagaaaggcgagccgggccgggggcggggaaaggggtggggcaggaacgggggcggggacggcgctggaggggcgggtcgggtaggtctcccggagctgatgtgtactgtgtgcgccggggaggcgccggcttgtactcggcagcgcgggaataaagtttgctgatttggtgtctagcctggatgcctgggttgcaggccctgcttgtggtggcgctccacagtcatccggctgaagaagacctgttggactggatcttctcgggttttctttcagatattgttttgtatttacccatgaagacattgttttttggactctgcaaataggacatttcaaagatgagtgaaaaaaaattggaaacaactgcacagcagcggaaatgtcctgaatggatgaatgtgcagaataaaagatgtgctgtagaagaaagaaaggcatgtgttcggaagagtgtttttgaagatgacctccccttcttagaattcactggatccattgtgtatagttacgatgctagtgattgctctttcctgtcagaagatattagcatgagtctatcagatggggatgtggtgggatttgacatggagtggccaccattatacaatagagggaaacttggcaaagttgcactaattcagttgtgtgtttctgagagcaaatgttacttgttccacgtttcttccatgtcagtttttccccagggattaaaaatgttgcttgaaaataaagcagttaaaaaggcaggtgtaggaattgaaggagatcagtggaaacttctacgtgactttgatatcaaattgaagaattttgtggagttgacagatgttgccaataaaaagctgaaatgcacagagacctggagccttaacagtctggttaaacacctcttaggtaaacagctcctgaaagacaagtctatccgctgtagcaattggagtaaatttcctctcactgaggaccagaaactgtatgcagccactgatgcttatgctggttttattatttaccgaaatttagagattttggatgatactgtgcaaaggtttgctataaataaagaggaagaaatcctacttagcgacatgaacaaacagttgacttcaatctctgaggaagtgatggatctggctaagcatcttcctcatgctttcagtaaattggaaaacccacggagggtttctatcttactaaaggatatttcagaaaatctatattcactgaggaggatgataattgggtctactaacattgagactgaactgaggcccagcaataatttaaacttattatcctttgaagattcaactactgggggagtacaacagaaacaaattagagaacatgaagttttaattcacgttgaagatgaaacatgggacccaacacttgatcatttagctaaacatgatggagaagatgtacttggaaataaagtggaacgaaaagaagatggatttgaagatggagtagaagacaacaaattgaaagagaatatggaaagagcttgtttgatgtcgttagatattacagaacatgaactccaaattttggaacagcagtctcaggaagaatatcttagtgatattgcttataaatctactgagcatttatctcccaatgataatgaaaacgatacgtcctatgtaattgagagtgatgaagatttagaaatggagatgcttaagcatttatctcccaatgataatgaaaacgatacgtcctatgtaattgagagtgatgaagatttagaaatggagatgcttaagtctttagaaaacctcaatagtggcacggtagaaccaactcattctaaatgcttaaaaatggaaagaaatctgggtcttcctactaaagaagaagaagaagatgatgaaaatgaagctaatgaaggggaagaagatgatgataaggactttttgtggccagcacccaatgaagagcaagttacttgcctcaagatgtactttggccattccagttttaaaccagttcagtggaaagtgattcattcagtattagaagaaagaagagataatgttgctgtcatggcaactggatatggaaagagtttgtgcttccagtatccacctgtttatgtaggcaagattggccttgttatctctccccttatttctctgatggaagaccaagtgctacagcttaaaatgtccaacatcccagcttgcttccttggatcagcacagtcagaaaatgttctaacagatattaaattaggtaaataccggattgtatacgtaactccagaatactgttcaggtaacatgggcctgctccagcaacttgaggctgatattggtatcacgctcattgctgtggatgaggctcactgtatttctgagtgggggcatgattttagggattcattcaggaagttgggctccctaaagacagcactgccaatggttccaatcgttgcacttactgctactgcaagttcttcaatccgggaagacattgtacgttgcttaaatctgagaaatcctcagatcacctgtactggttttgatcgaccaaacctgtatttagaagttaggcgaaaaacagggaatatccttcaggatctgcagccatttcttgtcaaaacaagttcccactgggaatttgaaggtccaacaatcatctactgtccttctagaaaaatgacacaacaagttacaggtgaacttaggaaactgaatctatcctgtggaacataccatgcgggcatgagttttagcacaaggaaagacattcatcataggtttgtaagagatgaaattcagtgtgtcatagctaccatagcttttggaatgggcattaataaagctgacattcgccaagtcattcattacggtgctcctaaggacatggaatcatattatcaggagattggtagagctggtcgtgatggacttcaaagttcttgtcacgtcctctgggctcctgcagacattaacttaaataggcaccttcttactgagatacgtaatgagaagtttcgattatacaaattaaagatgatggcaaagatggaaaaatatcttcattctagcagatgtaggagacaaatcatcttgtctcattttgaggacaaacaagtacaaaaagcctccttgggaattatgggaactgaaaaatgctgtgataattgcaggtccagattggatcattgctattccatggatgactcagaggatacatcctgggactttggtccacaagcatttaagcttttgtctgctgtggacatcttaggcgaaaaatttggaattgggcttccaattttatttctccgaggatctaattctcagcgtcttgccgatcaatatcgcaggcacagtttatttggcactggcaaggatcaaacagagagttggtggaaggctttttcccgtcagctgatcactgagggattcttggtagaagtttctcggtataacaaatttatgaagatttgcgcccttacgaaaaagggtagaaattggcttcataaagctaatacagaatctcagagcctcatccttcaagctaatgaagaattgtgtccaaagaagttgcttctgcctagttcgaaaactgtatcttcgggcaccaaagagcattgttataatcaagtaccagttgaattaagtacagagaagaagtctaacttggagaagttatattcttataaaccatgtgataagatttcttctgggagtaacatttctaaaaaaagtatcatggtacagtcaccagaaaaagcttacagttcctcacagcctgttatttcggcacaagagcaggagactcagattgtgttatatggcaaattggtagaagctaggcagaaacatgccaataaaatggatgttcccccagctattctggcaacaaacaagatactggtggatatggccaaaatgagaccaactacggttgaaaacgtaaaaaggattgatggtgtttctgaaggcaaagctgccatgttggcccctctgttggaagtcatcaaacatttctgccaaacaaatagtgttcagacagacctcttttcaagtacaaaacctcaagaagaacagaagacgagtctggtagcaaaaaataaaatatgcacactttcacagtctatggccatcacatactctttattccaagaaaagaagatgcctttgaagagcatagctgagagcaggattctgcctctcatgacaattggcatgcacttatcccaagcggtgaaagctggctgcccccttgatttggagcgagcaggcctgactccagaggttcagaagattattgctgatgttatccgaaaccctcccgtcaactcagatatgagtaaaattagcctaatcagaatgttagttcctgaaaacattgacacgtaccttatccacatggcaattgagatccttaaacatggtcctgacagcggacttcaaccttcatgtgatgtcaacaaaaggagatgttttcccggttctgaagagatctgttcaagttctaagagaagcaaggaagaagtaggcatcaatactgagacttcatctgcagagagaaagagacgattacctgtgtggtttgccaaaggaagtgataccagcaagaaattaatggacaaaacgaaaaggggaggtctttttagttaagctggcaattaccagaacaattatgtttcttgctgtattataagaggatagctatattttatttctgaagagtaaggagtagtattttggcttaaaaatcattctaattacaaagttcactgtttattgaagaactggcatcttaaatcagccttccgcaattcatgtagtttctgggtcttctgggagcctacgtgagtacatcacctaacagaatattaaattagacttcctgtaagattgctttaagaaactgttactgtcctgttttctaatctctttattaaaacagtgtatttggaaaatgttatgtgctctgatttgatatagataacagattagtagttacatggtaattatgtgatataaaatattcatatattatcaaaattctgttttgtaaatgtaagaaagcatagttattttacaaattgtttttactgtcttttgaagaagttcttaaatacgttgttaaatggtattagttgaccagggcagtgaaaatgaaaccgcattttgggtgccattaaatagggaaaaaacatgtaaaaaatgtaaaatggagaccaattgcactaggcaagtgtatattttgtattttatatacaatttctattatttttcaagtaataaaacaatgtttttcatactgaatattaaaaaaaaaaaaaaaaaaaa

SEQ ID NO: 492 - DNA, 1567 bp, Homo Sapiens
  NM_000560
gtcgtcacagcatgatcatattttttcacccttcacttctccttttacacaaatagccccggatatctgtgttaccagccttgtctcggccacctcaaggataatcactaaattctgccgaaaggactgaggaacggtgcctggaaaagggcaagaatatcacggcatgggcatgagtagcttgaaactgctgaagtatgtcctgtttttcttcaacttgctcttttggatctgtggctgctgcattttgggctttgggatctacctgctgatccacaacaacttcggagtgctcttccataacctcccctccctcacgctgggcaatgtgtttgtcatcgtgggctctattatcatggtagttgccttcctgggctgcatgggctctatcaaggaaaacaagtgtctgcttatgtcgttcttcatcctgctgctgattatcctccttgctgaggtgaccttggccatcctgctctttgtatatgaacagaagctgaatgagtatgtggctaagggtctgaccgacagcatccaccgttaccactcagacaatagcaccaaggcagcgtgggactccatccagtcatttctgcagtgttgtggtataaatggcacgagtgattggaccagtggcccaccagcatcttgcccctcagatcgaaaagtggagggttgctatgcgaaagcaagactgtggtttcattccaatttcctgtatatcggaatcatcaccatctgtgtatgtgtgattgaggtgttggggatgtcctttgcactgaccctgaactgccagattgacaaaaccagccagaccatagggctatgatctgcagtagtcctgtggtgaagagacttgtttcatctccggaaatgcaaaaccatttatagcatgaagccctacatgatcactgcaggatgatcctcctcccatcctttccctttttaggtccctgtcttatacaaccagagaagtgggtgttggccaggcacatcccatctcaggcagcaagacaatctttcactcactgacggcagcagccatgtctctcaaagtggtgaaactaatatctgagcatcttttagacaagagaggcaaagacaaactggatttaatggcccaacatcaaagggtgaacccaggatatgaatttttgcatcttcccattgtcgaattagtctccagcctctaaataatgcccagtcttctccccaaagtcaagcaagagactagttgaagggagttctggggccaggctcactggaccattgtcacaaccctctgtttctctttgactaagtgccctggctacaggaattacacagttctctttctccaaagggcaagatctcatttcaatttctttattagagggccttattgatgtgttctaagtctttccagaaaaaaactatccagtgatttatatcctgatttcaaccagtcacttagctgataatcacagtaagaagacttctggtattatctctctatcagataagattttgttaatgtactattttactcttcaataaataaaagtttattatctcaatcacaacattgcta

SEQ ID NO: 493 - DNA, 2268 bp, Homo Sapiens
  NM_000566
aatatcttgcatgttacagatttcactgctcccaccagcttggagacaacatgtggttcttgacaactctgctcctttgggttccagttgatgggcaagtggacaccacaaaggcagtgatcactttgcagcctccatgggtcagcgtgttccaagaggaaaccgtaaccttgcactgtgaggtgctccatctgcctgggagcagctctacacagtggtttctcaatggcacagccactcagacctcgacccccagctacagaatcacctctgccagtgtcaatgacagtggtgaatacaggtgccagagaggtctctcagggcgaagtgaccccatacagctggaaatccacagaggctggctactactgcaggtctccagcagagtcttcacggaaggagaacctctggccttgaggtgtcatgcgtggaaggataagctggtgtacaatgtgctttactatcgaaatggcaaagcctttaagtttttccactggaattctaacctcaccattctgaaaaccaacataagtcacaatggcacctaccattgctcaggcatgggaaagcatcgctacacatcagcaggaatatctgtcactgtgaaagagctatttccagctccagtgctgaatgcatctgtgacatccccactcctggaggggaatctggtcaccctgagctgtgaaacaaagttgctcttgcagaggcctggtttgcagctttacttctccttctacatgggcagcaagaccctgcgaggcaggaacacatcctctgaataccaaatactaactgctagaagagaagactctgggttatactggtgcgaggctgccacagaggatggaaatgtccttaagcgcagccctgagttggagcttcaagtgcttggcctccagttaccaactcctgtctggtttcatgtccttttctatctggcagtgggaataatgtttttagtgaacactgttctctgggtgacaatacgtaaagaactgaaaagaaagaaaaagtgggatttagaaatctctttggattctggtcatgagaagaaggtaatttccagccttcaagaagacagacatttagaagaagagctgaaatgtcaggaacaaaaagaagaacagctgcaggaaggggtgcaccggaaggagccccagggggccacgtagcagcggctcagtgggtggccatcgatctggaccgtcccctgcccacttgctccccgtgagcactgcgtacaaacatccaaaagttcaacaacaccagaactgtgtgtctcatggtatgtaactcttaaagcaaataaatgaactgacttcaactgggatacatttggaaatgtggtcatcaaagatgacttgaaatgaggcctactctaaagaattcttgaaaaacttacaagtcaagcctagcctgataatcctattacatagtttgaaaaatagtattttatttctcagaacaaggtaaaaaggtgagtgggtgcatatgtacagaagattaagacagagaaacagacagaaagagacacacacacagccaggagtgggtagatttcagggagacaagagggaatagtatagacaataaggaaggaaatagtacttacaaatgactcctaagggactgtgagactgagagggctcacgcctctgtgttcaggatacttagttcatggcttttctctttgactttactaaaagagaatgtctccatacgcgttctaggcatacaagggggtaactcatgatgagaaatggatgtgttattcttgccctctcttttgaggctctctcataacccctctatttctagagacaacaaaaatgctgccagtcctaggcccctgccctgtaggaaggcagaatgtaactgttctgtttgtttaacgattaagtccaaatctccaagtgcggcactgcaaagagacgcttcaagtggggagaagcggcgataccatagagtccagatcttgcctccagagatttgctttaccttcctgattttctggttactaattagcttcaggatacgctgctctcatacttgggctgtagtttggagacaaaatattttcctgccactgtgtaacatagctgaggtaaaaactgaactatgtaaatgactctactaaaagtttagggaaaaaaaacaggaggagtatgacacaaaaaaaaaaaaaaaaaaaaaaaaaaaaaaaaaaaaaaaaaaaaaaaaaaaaaaaaaaaaaaaaaaaaaaaaaaaaaaaaaaaaaaaaaaaaa

SEQ ID NO: 494 - DNA, 8629 bp, Homo Sapiens
  NM_000573
ttttgtcccggaaccccgcagccctccccacactctgggcgcggagcacaatgattggtcactcctattttcgctgagcttttcctcttatttcagttttcttcgagatcaaatctggtttgtagatgtgcttggggagaatgggggcctcttctccaagaagcccggagcctgtcgggccgccggcgcccggtctccccttctgctgcggaggatccctgctggcggttgtggtgctgcttgcgctgccggtggcctggggtcaatgcaatgccccagaatggcttccatttgccaggcctaccaacctaactgatgaatttgagtttcccattgggacatatctgaactatgaatgccgccctggttattccggaagaccgttttctatcatctgcctaaaaaactcagtctggactggtgctaaggacaggtgcagacgtaaatcatgtcgtaatcctccagatcctgtgaatggcatggtgcatgtgatcaaaggcatccagttcggatcccaaattaaatattcttgtactaaaggataccgactcattggttcctcgtctgccacatgcatcatctcaggtgatactgtcatttgggataatgaaacacctatttgtgacagaattccttgtgggctaccccccaccatcaccaatggagatttcattagcaccaacagagagaattttcactatggatcagtggtgacctaccgctgcaatcctggaagcggagggagaaaggtgtttgagcttgtgggtgagccctccatatactgcaccagcaatgacgatcaagtgggcatctggagcggccccgcccctcagtgcattatacctaacaaatgcacgcctccaaatgtggaaaatggaatattggtatctgacaacagaagcttattttccttaaatgaagttgtggagtttaggtgtcagcctggctttgtcatgaaaggaccccgccgtgtgaagtgccaggccctgaacaaatgggagccggagctaccaagctgctccagggtatgtcagccacctccagatgtcctgcatgctgagcgtacccaaagggacaaggacaacttttcacctgggcaggaagtgttctacagctgtgagcccggctacgacctcagaggggctgcgtctatgcgctgcacaccccagggagactggagccctgcagcccccacatgtgaagtgaaatcctgtgatgacttcatgggccaacttcttaatggccgtgtgctatttccagtaaatctccagcttggagcaaaagtggattttgtttgtgatgaaggatttcaattaaaaggcagctctgctagttactgtgtcttggctggaatggaaagcctttggaatagcagtgttccagtgtgtgaacaaatcttttgtccaagtcctccagttattcctaatgggagacacacaggaaaacctctggaagtctttccctttgggaaaacagtaaattacacatgcgacccccacccagacagagggacgagcttcgacctcattggagagagcaccatccgctgcacaagtgaccctcaagggaatggggtttggagcagccctgcccctcgctgtggaattctgggtcactgtcaagccccagatcattttctgtttgccaagttgaaaacccaaaccaatgcatctgactttcccattgggacatctttaaagtacgaatgccgtcctgagtactacgggaggccattctctatcacatgtctagataacctggtctggtcaagtcccaaagatgtctgtaaacgtaaatcatgtaaaactcctccagatccagtgaatggcatggtgcatgtgatcacagacatccaggttggatccagaatcaactattcttgtactacagggcaccgactcattggtcactcatctgctgaatgtatcctctcgggcaatgctgcccattggagcacgaagccgccaatttgtcaacgaattccttgtgggctaccccccaccatcgccaatggagatttcattagcaccaacagagagaattttcactatggatcagtggtgacctaccgctgcaatcctggaagcggagggagaaaggtgtttgagcttgtgggtgagccctccatatactgcaccagcaatgacgatcaagtgggcatctggagcggcccggcccctcagtgcattatacctaacaaatgcacgcctccaaatgtggaaaatggaatattggtatctgacaacagaagcttattttccttaaatgaagttgtggagtttaggtgtcagcctggctttgtcatgaaaggaccccgccgtgtgaagtgccaggccctgaacaaatgggagccggagctaccaagctgctccagggtatgtcagccacctccagatgtcctgcatgctgagcgtacccaaagggacaaggacaacttttcacccgggcaggaagtgttctacagctgtgagcccggctatgacctcagaggggctgcgtctatgcgctgcacaccccagggagactggagccctgcagcccccacatgtgaagtgaaatcctgtgatgacttcatgggccaacttcttaatggccgtgtgctatttccagtaaatctccagcttggagcaaaagtggattttgtttgtgatgaaggatttcaattaaaaggcagctctgctagttattgtgtcttggctggaatggaaagcctttggaatagcagtgttccagtgtgtgaacaaatcttttgtccaagtcctccagttattcctaatgggagacacacaggaaaacctctggaagtctttccctttggaaaagcagtaaattacacatgcgacccccacccagacagagggacgagcttcgacctcattggagagagcaccatccgctgcacaagtgaccctcaagggaatggggtttggagcagccctgcccctcgctgtggaattctgggtcactgtcaagccccagatcattttctgtttgccaagttgaaaacccaaaccaatgcatctgactttcccattgggacatctttaaagtacgaatgccgtcctgagtactacgggaggccattctctatcacatgtctagataacctggtctggtcaagtcccaaagatgtctgtaaacgtaaatcatgtaaaactcctccagatccagtgaatggcatggtgcatgtgatcacagacatccaggttggatccagaatcaactattcttgtactacagggcaccgactcattggtcactcatctgctgaatgtatcctctcaggcaatactgcccattggagcacgaagccgccaatttgtcaacgaattccttgtgggctacccccaaccatcgccaatggagatttcattagcaccaacagagagaattttcactatggatcagtggtgacctaccgctgcaatcttggaagcagagggagaaaggtgtttgagcttgtgggtgagccctccatatactgcaccagcaatgacgatcaagtgggcatctggagcggccccgcccctcagtgcattatacctaacaaatgcacgcctccaaatgtggaaaatggaatattggtatctgacaacagaagcttattttccttaaatgaagttgtggagtttaggtgtcagcctggctttgtcatgaaaggaccccgccgtgtgaagtgccaggccctgaacaaatgggagccagagttaccaagctgctccagggtgtgtcagccgcctccagaaatcctgcatggtgagcataccccaagccatcaggacaacttttcacctgggcaggaagtgttctacagctgtgagcctggctatgacctcagaggggctgcgtctctgcactgcacaccccagggagactggagccctgaagccccgagatgtgcagtgaaatcctgtgatgacttcttgggtcaactccctcatggccgtgtgctatttccacttaatctccagcttggggcaaaggtgtcctttgtctgtgatgaagggtttcgcttaaagggcagttccgttagtcattgtgtcttggttggaatgagaagcctttggaataacagtgttcctgtgtgtgaacatatcttttgtccaaatcctccagctatccttaatgggagacacacaggaactccctctggagatattccctatggaaaagaaatatcttacacatgtgacccccacccagacagagggatgaccttcaacctcattggggagagcaccatccgctgcacaagtgaccctcatgggaatggggtttggagcagccctgcccctcgctgtgaactttctgttcgtgctggtcactgtaaaaccccagagcagtttccatttgccagtcctacgatcccaattaatgactttgagtttccagtcgggacatctttgaattatgaatgccgtcctgggtattttgggaaaatgttctctatctcctgcctagaaaacttggtctggtcaagtgttgaagacaactgtagacgaaaatcatgtggacctccaccagaacccttcaatggaatggtgcatataaacacagatacacagtttggatcaacagttaattattcttgtaatgaagggtttcgactcattggttccccatctactacttgtctcgtctcaggcaataatgtcacatgggataagaaggcacctatttgtgagatcatatcttgtgagccacctccaaccatatccaatggagacttctacagcaacaatagaacatcttttcacaatggaacggtggtaacttaccagtgccacactggaccagatggagaacagctgtttgagcttgtgggagaacggtcaatatattgcaccagcaaagatgatcaagttggtgtttggagcagccctccccctcggtgtatttctactaataaatgcacagctccagaagttgaaaatgcaattagagtaccaggaaacaggagtttctttaccctcactgagatcatcagatttagatgtcagcccgggtttgtcatggtagggtcccacactgtgcagtgccagaccaatggcagatgggggcccaagctgccacactgctccagggtgtgtcagccgcctccagaaatcctgcatggtgagcataccctaagccatcaggacaacttttcacctgggcaggaagtgttctacagctgtgagcccagctatgacctcagaggggctgcgtctctgcactgcacgccccagggagactggagccctgaagcccctagatgtacagtgaaatcctgtgatgacttcctgggccaactccctcatggccgtgtgctacttccacttaatctccagcttggggcaaaggtgtcctttgtttgcgatgaagggttccgattaaaaggcaggtctgctagtcattgtgtcttggctggaatgaaagccctttggaatagcagtgttccagtgtgtgaacaaatcttttgtccaaatcctccagctatccttaatgggagacacacaggaactccctttggagatattccctatggaaaagaaatatcttacgcatgcgacacccacccagacagagggatgaccttcaacctcattggggagagctccatccgctgcacaagtgaccctcaagggaatggggtttggagcagccctgcccctcgctgtgaactttctgttcctgctgcctgcccacatccacccaagatccaaaacgggcattacattggaggacacgtatctctatatcttcctgggatgacaatcagctacatttgtgaccccggctacctgttagtgggaaagggcttcattttctgtacagaccagggaatctggagccaattggatcattattgcaaagaagtaaattgtagcttcccactgtttatgaatggaatctcgaaggagttagaaatgaaaaaagtatatcactatggagattatgtgactttgaagtgtgaagatgggtatactctggaaggcagtccctggagccagtgccaggcggatgacagatgggaccctcctctggccaaatgtacctctcgtacacatgatgctctcatagttggcactttatctggtacgatcttctttattttactcatcattttcctctcttggataattctaaagcacagaaaaggcaataatgcacatgaaaaccctaaagaagtggctatccatttacattctcaaggaggcagcagcgttcatccccgaactctgcaaacaaatgaagaaaatagcagggtccttccttgacaaagtactatacagctgaagaacatctcgaatacaattttggtgggaaaggagccaattgatttcaacagaatcagatctgagcttcataaagtctttgaagtgacttcacagagacgcagacatgtgcacttgaagatgctgccccttccctggtacctagcaaagctcctgcctctttgtgtgcgtcactgtgaaacccccacccttctgcctcgtgctaaacgcacacagtatctagtcaggggaaaagactgcatttaggagatagaaaatagtttggattacttaaaggaataaggtgttgcctggaatttctggtttgtaaggtggtcactgttcttttttaaaatatttgtaatatggaatgggctcagtaagaagagcttggaaaatgcagaaagttatgaaaaataagtcacttataattatgctacctactgataaccactcctaatattttgattcattttctgcctatcttctttcacatatgtgtttttttacatacgtacttttcccccttagtttgtttccttttattttatagagcagaaccctagtcttttaaacagtttagagtgaaatatatgctatatcagtttttactttctctagggagaaaaattaatttactagaaaggcatgaaatgatcatgggaagagtggttaagactactgaagagaaatatttggaaaataagatttcgatatcttctttttttttgagatggagtctggctctgtctcccaggctggagtgcagtggcgtaatctcggctcactgcaagctccgcctcccgggttgacaccattttcctgcctcagcctcctgagtagttgggattaccagtagatgggactacaggcacctgccaacacgcccggctaatttttttgtatttttagtagagacggggtttcaccatgttagccaggatggtctggatctcctgacctcgtgatccacctgcctcggcctcccaaagtgctgcgattacaggcatgagccaccgcgcctggccgctttcgatattttctaaactttaattcaaaagcactttgtgctgtgttctatataaaaaacataataaaaattgaaatgaaagaataattgttattataaaagtactagcttacttttgtatggattcagaatatactaaattaactttttaaaacacaacttttaaaaaatgtatcaaaataataaacgtgttctgatatttttaaaataagtgaccttgtgttctttaaccagtccacatctttagagaacaaaaatgtgttatgatattatgggccatgctaatgacctctagaaaacatcagaatatttctggatatttaataatagctttatatatgactaatgctcatttctatgtaattctgtttaatagttgctttaaaggtgaattttgccacatttactttgacagcagtataaggagtgagatagacatgaacctgaatttcaatttaaaatcatggaagagagggaaaaaaaaccagcttaagaaaaatcaactgataaactgcaagaaaaaaatgcaacttacatcacaaaagctaattgctttattatttagagagtacttaaaaattaaagaccaaacttctctccacccaacaaaaatgggcaaaggacatacagctaggtcaccaagaaagaagggcaaataggtggtgagtatatgtaaagatacttgataggacttttgcttagttgaatctttagcaaatctcttttatttcttgggattttgaagaagtaatttttaaaggaggactagaaactaagtgattgggaattggcctttttagaattaaaatttcccattacaagaaaaaaaaatcctgtgttcttttttttttccagaatggagtaggtcagtgagcaatgtgattaataaatatttcaatgtctgtgacttttgatttattttggagacagggtcttgctctgttacccaggctggagtgcagtggtgctatctaggcttactgcaacctcacctgtcactttttaattgcaagaaagctgaaaggtttttttctattatatcagttataatgataaatactgtatatactaactatgagtaaaatactatattgcctaacttgtattattaagcaattctgctaacctgtgaccttacattttcatctgaaaagcaggggctggacaccaattgccctatgaagctattgctagtcctaacattctttgttttgtttgcttttttggcacacttaagtgtgtactatgaagtttatgatgctttaatgaaattttctgtctctaccattgtaatgagaaaggaataaaatactttattttgcaaatctaaaaaaaaaaaaaa

SEQ ID NO: 495 - DNA, 2812 bp, Homo Sapiens
  NM_000574
agcgagctcctcctccttcccctccccactctccccgagtctagggcccccggggcgtatgacgccggagccctctgaccgcacctctgaccacaacaaacccctactccacccgtcttgtttgtcccacccttggtgacgcagagccccagcccagaccccgcccaaagcactcatttaactggtattgcggagccacgaggcttctgcttactgcaactcgctccggccgctgggcgtagctgcgactcggcggagtcccggcggcgcgtccttgttctaacccggcgcgccatgaccgtcgcgcggccgagcgtgcccgcggcgctgcccctcctcggggagctgccccggctgctgctgctggtgctgttgtgcctgccggccgtgtggggtgactgtggccttcccccagatgtacctaatgcccagccagctttggaaggccgtacaagttttcccgaggatactgtaataacgtacaaatgtgaagaaagctttgtgaaaattcctggcgagaaggactcagtgatctgccttaagggcagtcaatggtcagatattgaagagttctgcaatcgtagctgcgaggtgccaacaaggctaaattctgcatccctcaaacagccttatatcactcagaattattttccagtcggtactgttgtggaatatgagtgccgtccaggttacagaagagaaccttctctatcaccaaaactaacttgccttcagaatttaaaatggtccacagcagtcgaattttgtaaaaagaaatcatgccctaatccgggagaaatacgaaatggtcagattgatgtaccaggtggcatattatttggtgcaaccatctccttctcatgtaacacagggtacaaattatttggctcgacttctagtttttgtcttatttcaggcagctctgtccagtggagtgacccgttgccagagtgcagagaaatttattgtccagcaccaccacaaattgacaatggaataattcaaggggaacgtgaccattatggatatagacagtctgtaacgtatgcatgtaataaaggattcaccatgattggagagcactctatttattgtactgtgaataatgatgaaggagagtggagtggcccaccacctgaatgcagaggaaaatctctaacttccaaggtcccaccaacagttcagaaacctaccacagtaaatgttccaactacagaagtctcaccaacttctcagaaaaccaccacaaaaaccaccacaccaaatgctcaagcaacacggagtacacctgtttccaggacaaccaagcattttcatgaaacaaccccaaataaaggaagtggaaccacttcaggtactacccgtcttctatctgggcacacgtgtttcacgttgacaggtttgcttgggacgctagtaaccatgggcttgctgacttagccaaagaagagttaagaagaaaatacacacaagtatacagactgttcctagtttcttagacttatctgcatattggataaaataaatgcaattgtgctcttcatttaggatgctttcattgtctttaagatgtgttaggaatgtcaacagagcaaggagaaaaaaggcagtcctggaatcacattcttagcacacctacacctcttgaaaatagaacaacttgcagaattgagagtgattcctttcctaaaagtgtaagaaagcatagagatttgttcgtatttagaatgggatcacgaggaaaagagaaggaaagtgatttttttccacaagatctgtaatgttatttccacttataaaggaaataaaaaatgaaaaacattatttggatatcaaaagcaaataaaaacccaattcagtctcttctaagcaaaattgctaaagagagatgaaccacattataaagtaatctttggctgtaaggcattttcatctttccttcgggttggcaaaatattttaaaggtaaaacatgctggtgaaccaggggtgttgatggtgataagggaggaatatagaatgaaagactgaatcttcctttgttgcacaaatagagtttggaaaaagcctgtgaaaggtgtcttctttgacttaatgtctttaaaagtatccagagatactacaatattaacataagaaaagattatatattatttctgaatcgagatgtccatagtcaaatttgtaaatcttattcttttgtaatatttatttatatttatttatgacagtgaacattctgattttacatgtaaaacaagaaaagttgaagaagatatgtgaagaaaaatgtatttttcctaaatagaaataaatgatcccattttttggtatcatgtagtatgtgaaatttattcttaaacgtgactactttatttctaaataagaaattccctacctgcttcctacaagcagttcagaatgccatgccttggttgtcctagtgtgaataattttcagctactttaaaattatattgtactttctcaagcatgtcatatcctttcctattagagtatctatattacttgttactgatttacctgaaggcaatctgattaatttctaggtttttaccatattcttgtcatcttgccaattacattttaagtgttagactagactaagatgtactagttgtatagaatataactagatttattatggcaatgtttattttgtcattttgcttcatctgttttgttgttgaagtactttaaatttcatacgttcatggcatttcactgtaaagactttaatgtgtatttcttaaaataaaactttttttcctccttaaaaaaaaaaaaaaaaaa

SEQ ID NO: 496 - DNA, 3865 bp, Homo Sapiens
  NM_000578
acagaacacggggtgcctggaaggggaacagatgtgttgtggggcacagggcaggctgggaggggaacaaaggtccactccatgggtaaccagacccttccgccagggctggccacttctgcctttggaaaatgtttcacaacgccccatgttgtgtgtgtgtgtgaatcggccgatgtgaaccgaatgttgatgtaagaggcagggcactcggctgcggatgggtaacagggcgtgggctggcacacttacttgcaccagtgcccagagagggggtgcaggctgaggagctgcccagagcaccgctcacactcccagagtacctgaagtcggcatttcaatgacaggtgacaagggtccccaaaggctaagcgggtccagctatggttccatctccagcccgaccagcccgaccagcccagggccacagcaagcacctcccagagagacctacctgagtgagaagatccccatcccagacacaaaaccgggcaccttcagcctgcggaagctatgggccttcacggggcctggcttcctcatgagcattgctttcctggacccaggaaacatcgagtcagatcttcaggctggcgccgtggcgggattcaaacttctctgggtgctgctctgggccaccgtgttgggcttgctctgccagcgactggctgcacgtctgggcgtggtgacaggcaaggacttgggcgaggtctgccatctctactaccctaaggtgccccgcaccgtcctctggctgaccatcgagctagccattgtgggctccgacatgcaggaagtcatcggcacggccattgcattcaatctgctctcagctggacgaatcccactctggggtggcgtcctcatcaccatcgtggacaccttcttcttcctcttcctcgataactacgggctgcggaagctggaagctttttttggactccttataaccattatggccttgacctttggctatgagtatgtggtggcgcgtcctgagcagggagcgcttcttcggggcctgttcctgccctcgtgcccgggctgcggccaccccgagctgctgcaggcggtgggcattgttggcgccatcatcatgccccacaacatctacctgcactcggccctggtcaagtctcgagagatagaccgggcccgccgagcagacatcagagaagccaacatgtacttcctgattgaggccaccatcgccctgtccgtctcctttatcatcaacctctttgtcatggctgtctttgggcaggccttctaccagaaaaccaaccaggctgcgttcaacatctgtgccaacagcagcctccacgactacgccaagatcttccccatgaacaacgccaccgtggccgtggacatttaccaggggggcgtgatcctgggctgcctgttcggccccgcggccctctacatctgggccataggtctcctggcggctgggcagagctccaccatgacgggcacctacgcgggacagttcgtgatggagggcttcctgaggctgcggtggtcacgcttcgcccgtgtcctcctcacccgctcctgcgccatcctgcccaccgtgctcgtggctgtcttccgggacctgagggacttgtcgggcctcaatgatctgctcaacgtgctgcagagcctgctgctcccgttcgccgtgctgcccatcctcacgttcaccagcatgcccaccctcatgcaggagtttgccaatggcctgctgaacaaggtcgtcacctcttccatcatggtgctagtctgcgccatcaacctctacttcgtggtcagctatctgcccagcctgccccaccctgcctacttcggccttgcagccttgctggccgcagcctacctgggcctcagcacctacctggtctggacctgttgccttgcccacggagccacctttctggcccacagctcccaccaccacttcctgtatgggctccttgaagaggaccagaaaggggagacctctggctaggcccacaccagggcctggctgggagtggcatgtatgacgtgactggcctgctggatgtggagggggcgcgtgcaggcagcaggatagagtgggacagttcctgagaccagccaacctgggggctttagggacctgctgtttcctagcgcagccatgtgattaccctctgggtctcagtgtcctcatctgtaaaatggagacaccaccacccttgccatggaggttaagcactttaacacagtgtctggcacttgggacaaaaacaaacaaacgaaaaacatttcaaaaggtatttattgagcacctgcaggcgtgacctgacagcccaagggtgggtggggtgagggcttgaggacttgggcgggacacaggctccaaactggagcttgaaatagtgtctgatgaatgttaaattatctatctatctatttatttatttatttgagacagggaaagggtctccctctgttgccaaggctggagtgcagtggcgcaatcttaactcattgcaacctccaccttctgggttcaagcgattctctttattcagccccgggagtggcgcgcgccaccacgcccagctaatttgtgtattttcagcagagacggggtttgccatgctggccaggctggtctcgaactgctggattcaagtgatccgcccatctccgtctcccaaagtgctgggaattacaggcgtgagccaccaaacccggcctgattaaagttaaataaatactagttcccttctcgtccaaaggagcagggaatgggaaccgggaaggcacgaagtctctaaagcatccagaagacccctacaccagggtctggtccgctcctattcgccgcagcctttctgttccgcctgcaacccattttccagacagtaaaacggcggcgcacttctttctccgtcaggcaccaggtcataaggaacccaagagtctgtgcctctgaggcccaaattatttgctgtttcctcaggggagccggcggccgcgactcccacgccgcgccgttaccgctccctctctgctgactgctccccctaggggcagagacggtcccgacgcccgccatcccgccccggcctcacccctccccgccaggcggaacgacgcggggaggcgggcgctcggggctcgcgccaggggccccagaatccttcggggagagtgggtgggaggaagctgtgtgggcggggagccccctctgccttagggagcggctgggcacccattcgccccattcaggggctgcactttatagacgttccctaggctgtttctaggctcccccaagtccctcctccagcctcgtcgggtccctcagaccccagcccaggacctgcggagggccgcagcgaggagaggccaacaggcctttccctagagttgaacctgggccgggtgttgcacctggaagaacccccgatttcctggggacccagcagggcaggcggcctggctccgcgctcaggtccggacgcttgtttatgagaagaatttcctctttcttaaaagggcaacgatgcgagtgggtccctcaaggagagaagagatgggaccggtctggtgcgacctgggcaagcgctgcagagggtacctgggcaagagggccgcccgcctcctctgggtttggcactggagaagatgggtccatgccagctgaaggaggagatggatgggggacgtttagcgaagaaaggcatctcccagatcctttagcctcctggaagtgcccccgttgtaccccctacacacccctcttggcattgagtgccagtcctctgccaggctctgtgttacaagttggggagggcggcaaagtcccgaattaaagatgtcagttctcaaggaaaaaaaaaaaaaa

SEQ ID NO: 497 - DNA, 2012 bp, Homo Sapiens
  NM_000585
gttgggactccgggtggcaggcgcccgggggaatcccagctgactcgctcactgccttcgaagtccggcgccccccgggagggaactgggtggccgcaccctcccggctgcggtggctgtcgccccccaccctgcagccaggactcgatggagaatccattccaatatatggccatgtggctctttggagcaatgttccatcatgttccatgctgctgacgtcacatggagcacagaaatcaatgttagcagatagccagcccatacaagatcgtattgtattgtaggaggcattgtggatggatggctgctggaaaccccttgccatagccagctcttcttcaatacttaaggatttaccgtggctttgagtaatgagaatttcgaaaccacatttgagaagtatttccatccagtgctacttgtgtttacttctaaacagtcattttctaactgaagctggcattcatgtcttcattttgggctgtttcagtgcagggcttcctaaaacagaagccaactgggtgaatgtaataagtgatttgaaaaaaattgaagatcttattcaatctatgcatattgatgctactttatatacggaaagtgatgttcaccccagttgcaaagtaacagcaatgaagtgctttctcttggagttacaagttatttcacttgagtccggagatgcaagtattcatgatacagtagaaaatctgatcatcctagcaaacaacagtttgtcttctaatgggaatgtaacagaatctggatgcaaagaatgtgaggaactggaggaaaaaaatattaaagaatttttgcagagttttgtacatattgtccaaatgttcatcaacacttcttgattgcaattgattctttttaaagtgtttctgttattaacaaacatcactctgctgcttagacataacaaaacactcggcatttcaaatgtgctgtcaaaacaagtttttctgtcaagaagatgatcagaccttggatcagatgaactcttagaaatgaaggcagaaaaatgtcattgagtaatatagtgactatgaacttctctcagacttactttactcatttttttaatttattattgaaattgtacatatttgtggaataatgtaaaatgttgaataaaaatatgtacaagtgttgttttttaagttgcactgatattttacctcttattgcaaaatagcatttgtttaagggtgatagtcaaattatgtattggtggggctgggtaccaatgctgcaggtcaacagctatgctggtaggctcctgccagtgtggaaccactgactactggctctcattgacttccttactaagcatagcaaacagaggaagaatttgttatcagtaagaaaaagaagaactatatgtgaatcctcttctttatactgtaatttagttattgatgtataaagcaactgttatgaaataaagaaattgcaataactggcatataatgtccatcagtaaatcttggtggtggtggcaataataaacttctactgataggtagaatggtgtgcaagcttgtccaatcacggattgcaggccacatgcggcccaggacaactttgaatgtggcccaacacaaattcataaactttcatacatctcgtttttagctcatcagctatcattagcggtagtgtatttaaagtgtggcccaagacaattcttcttattccaatgtggcccagggaaatcaaaagattggatgcccctggtatagaaaactaatagtgacagtgttcatatttcatgctttcccaaatacaggtattttattttcacattctttttgccatgtttatataataataaagaaaaaccctgttgatttgttggagccattgttatctgacagaaaataattgtttatattttttgcactacactgtctaaaattagcaagctctcttctaatggaactgtaagaaagatgaaatatttttgttttattataaatttatttcaccttaaaaaaaaaaaa

SEQ ID NO: 498 - DNA, 1648 bp, Homo Sapiens
  NM_000591
cagagaaggcttaggctcccgagtcaacagggcattcaccgcctggggcgcctgagtcatcaggacactgccaggagacacagaaccctagatgccctgcagaatccttcctgttacggtccccctccctgaaacatccttcattgcaatatttccaggaaaggaagggggctggctcggaggaagagaggtggggaggtgatcagggttcacagaggagggaactgaatgacatcccaggattacataaactgtcagaggcagccgaagagttcacaagtgtgaagcctggaagccggcgggtgccgctgtgtaggaaagaagctaaagcacttccagagcctgtccggagctcagaggttcggaagacttatcgaccatggagcgcgcgtcctgcttgttgctgctgctgctgccgctggtgcacgtctctgcgaccacgccagaaccttgtgagctggacgatgaagatttccgctgcgtctgcaacttctccgaacctcagcccgactggtccgaagccttccagtgtgtgtctgcagtagaggtggagatccatgccggcggtctcaacctagagccgtttctaaagcgcgtcgatgcggacgccgacccgcggcagtatgctgacacggtcaaggctctccgcgtgcggcggctcacagtgggagccgcacaggttcctgctcagctactggtaggcgccctgcgtgtgctagcgtactcccgcctcaaggaactgacgctcgaggacctaaagataaccggcaccatgcctccgctgcctctggaagccacaggacttgcactttccagcttgcgcctacgcaacgtgtcgtgggcgacagggcgttcttggctcgccgagctgcagcagtggctcaagccaggcctcaaggtactgagcattgcccaagcacactcgcctgccttttcctgcgaacaggttcgcgccttcccggcccttaccagcctagacctgtctgacaatcctggactgggcgaacgcggactgatggcggctctctgtccccacaagttcccggccatccagaatctagcgctgcgcaacacaggaatggagacgcccacaggcgtgtgcgccgcactggcggcggcaggtgtgcagccccacagcctagacctcagccacaactcgctgcgcgccaccgtaaaccctagcgctccgagatgcatgtggtccagcgccctgaactccctcaatctgtcgttcgctgggctggaacaggtgcctaaaggactgccagccaagctcagagtgctcgatctcagctgcaacagactgaacagggcgccgcagcctgacgagctgcccgaggtggataacctgacactggacgggaatcccttcctggtccctggaactgccctcccccacgagggctcaatgaactccggcgtggtcccagcctgtgcacgttcgaccctgtcggtgggggtgtcgggaaccctggtgctgctccaaggggcccggggctttgcctaagatccaagacagaataatgaatggactcaaactgccttggcttcaggggagtcccgtcaggacgttgaggacttttcgaccaattcaaccctttgccccacctttattaaaatcttaaacaacgggtcaaaaaaaaaaaaa

SEQ ID NO: 499 - DNA, 1386 bp, Homo Sapiens
  NM_000595
gccccatctccttgggctgcccgtgcttcgtgctttggactaccgcccagcagtgtcctgccctctgcctgggcctcggtccctcctgcacctgctgcctggatccccggcctgcctgggcctgggccttggttctccccatgacaccacctgaacgtctcttcctcccaagggtgtgtggcaccaccctacacctcctccttctggggctgctgctggttctgctgcctggggcccaggggctccctggtgttggcctcacaccttcagctgcccagactgcccgtcagcaccccaagatgcatcttgcccacagcaccctcaaacctgctgctcacctcattggagaccccagcaagcagaactcactgctctggagagcaaacacggaccgtgccttcctccaggatggtttctccttgagcaacaattctctcctggtccccaccagtggcatctacttcgtctactcccaggtggtcttctctgggaaagcctactctcccaaggccacctcctccccactctacctggcccatgaggtccagctcttctcctcccagtaccccttccatgtgcctctcctcagctcccagaagatggtgtatccagggctgcaggaaccctggctgcactcgatgtaccacggggctgcgttccagctcacccagggagaccagctatccacccacacagatggcatcccccacctagtcctcagccctagtactgtcttctttggagccttcgctctgtagaacttggaaaaatccagaaagaaaaaataattgatttcaagaccttctccccattctgcctccattctgaccatttcaggggtcgtcaccacctctcctttggccattccaacagctcaagtcttccctgatcaagtcaccggagctttcaaagaaggaattctaggcatcccaggggaccacacctccctgaaccatccctgatgtctgtctggctgaggatttcaagcctgcctaggaattcccagcccaaagctgttggtctgtcccaccagctaggtggggcctagatccacacacagaggaagagcaggcacatggaggagcttgggggatgactagaggcagggaggggactatttatgaaggcaaaaaaattaaattatttatttatggaggatggagagaggggaataatagaagaacatccaaggagaaacagagacaggcccaagagatgaagagtgagagggcatgcgcacaaggctgaccaagagagaaagaagtaggcatgagggatcacagggccccagaaggcagggaaaggctctgaaagccagctgccgaccagagccccacacggaggcatctgcaccctcgatgaagcccaataaacctcttttctctg

SEQ ID NO: 500 - DNA, 1439 bp, Homo Sapiens
  NM_000597
tgcggcggcgagggaggaggaagaagcggaggaggcggctcccgcgctcgcagggccgtgccacctgcccgcccgcccgctcgctcgctcgcccgccgcgccgcgctgccgaccgccagcatgctgccgagagtgggctgccccgcgctgccgctgccgccgccgccgctgctgccgctgctgccgctgctgctgctgctactgggcgcgagtggcggcggcggcggggcgcgcgcggaggtgctgttccgctgcccgccctgcacacccgagcgcctggccgcctgcgggcccccgccggttgcgccgcccgccgcggtggccgcagtggccggaggcgcccgcatgccatgcgcggagctcgtccgggagccgggctgcggctgctgctcggtgtgcgcccggctggagggcgaggcgtgcggcgtctacaccccgcgctgcggccaggggctgcgctgctatccccacccgggctccgagctgcccctgcaggcgctggtcatgggcgagggcacttgtgagaagcgccgggacgccgagtatggcgccagcccggagcaggttgcagacaatggcgatgaccactcagaaggaggcctggtggagaaccacgtggacagcaccatgaacatgttgggcgggggaggcagtgctggccggaagcccctcaagtcgggtatgaaggagctggccgtgttccgggagaaggtcactgagcagcaccggcagatgggcaagggtggcaagcatcaccttggcctggaggagcccaagaagctgcgaccaccccctgccaggactccctgccaacaggaactggaccaggtcctggagcggatctccaccatgcgccttccggatgagcggggccctctggagcacctctactccctgcacatccccaactgtgacaagcatggcctgtacaacctcaaacagtgcaagatgtctctgaacgggcagcgtggggagtgctggtgtgtgaaccccaacaccgggaagctgatccagggagcccccaccatccggggggaccccgagtgtcatctcttctacaatgagcagcaggaggctcgcggggtgcacacccagcggatgcagtagaccgcagccagccggtgcctggcgcccctgccccccgcccctctccaaacaccggcagaaaacggagagtgcttgggtggtgggtgctggaggattttccagttctgacacacgtatttatatttggaaagagaccagcaccgagctcggcacctccccggcctctctcttcccagctgcagatgccacacctgctccttcttgctttccccgggggaggaagggggttgtggtcggggagctggggtacaggtttggggagggggaagagaaatttttatttttgaacccctgtgtcccttttgcataagattaaaggaaggaaaagtaaa

SEQ ID NO: 501 - DNA, 2620 bp, Homo Sapiens
  NM_000598
agatgcgagcactgcggctgggcgctgaggatcagccgcttcctgcctggattccacagcttcgcgccgtgtactgtcgccccatccctgcgcgcccagcctgccaagcagcgtgccccggttgcaggcgtcatgcagcgggcgcgacccacgctctgggccgctgcgctgactctgctggtgctgctccgcgggccgccggtggcgcgggctggcgcgagctcggcgggcttgggtcccgtggtgcgctgcgagccgtgcgacgcgcgtgcactggcccagtgcgcgcctccgcccgccgtgtgcgcggagctggtgcgcgagccgggctgcggctgctgcctgacgtgcgcactgagcgagggccagccgtgcggcatctacaccgagcgctgtggctccggccttcgctgccagccgtcgcccgacgaggcgcgaccgctgcaggcgctgctggacggccgcgggctctgcgtcaacgctagtgccgtcagccgcctgcgcgcctacctgctgccagcgccgccagctccaggaaatgctagtgagtcggaggaagaccgcagcgccggcagtgtggagagcccgtccgtctccagcacgcaccgggtgtctgatcccaagttccaccccctccattcaaagataatcatcatcaagaaagggcatgctaaagacagccagcgctacaaagttgactacgagtctcagagcacagatacccagaacttctcctccgagtccaagcgggagacagaatatggtccctgccgtagagaaatggaagacacactgaatcacctgaagttcctcaatgtgctgagtcccaggggtgtacacattcccaactgtgacaagaagggattttataagaaaaagcagtgtcgcccttccaaaggcaggaagcggggcttctgctggtgtgtggataagtatgggcagcctctcccaggctacaccaccaaggggaaggaggacgtgcactgctacagcatgcagagcaagtagacgcctgccgcaaggttaatgtggagctcaaatatgccttattttgcacaaaagactgccaaggacatgaccagcagctggctacagcctcgatttatatttctgtttgtggtgaactgattttttttaaaccaaagtttagaaagaggtttttgaaatgcctatggtttctttgaatggtaaacttgagcatcttttcactttccagtagtcagcaaagagcagtttgaattttcttgtcgcttcctatcaaaatattcagagactcgagcacagcacccagacttcatgcgcccgtggaatgctcaccacatgttggtcgaagcggccgaccactgactttgtgacttaggcggctgtgttgcctatgtagagaacacgcttcacccccactccccgtacagtgcgcacaggctttatcgagaataggaaaacctttaaaccccggtcatccggacatcccaacgcatgctcctggagctcacagccttctgtggtgtcatttctgaaacaagggcgtggatccctcaaccaagaagaatgtttatgtcttcaagtgacctgtactgcttggggactattggagaaaataaggtggagtcctacttgtttaaaaaatatgtatctaagaatgttctagggcactctgggaacctataaaggcaggtatttcgggccctcctcttcaggaatcttcctgaagacatggcccagtcgaaggcccaggatggcttttgctgcggccccgtggggtaggagggacagagagacagggagagtcagcctccacattcagaggcatcacaagtaatggcacaattcttcggatgactgcagaaaatagtgttttgtagttcaacaactcaagacgaagcttatttctgaggataagctctttaaaggcaaagctttattttcatctctcatcttttgtcctccttagcacaatgtaaaaaagaatagtaatatcagaacaggaaggaggaatggcttgctggggagcccatccaggacactgggagcacatagagattcacccatgtttgttgaacttagagtcattctcatgcttttctttataattcacacatatatgcagagaagatatgttcttgttaacattgtatacaacatagccccaaatatagtaagatctatactagataatcctagatgaaatgttagagatgctatatgatacaactgtggccatgactgaggaaaggagctcacgcccagagactgggctgctctcccggaggccaaacccaagaaggtctggcaaagtcaggctcagggagactctgccctgctgcagacctcggtgtggacacacgctgcatagagctctccttgaaaacagaggggtctcaagacattctgcctacctattagcttttctttatttttttaactttttggggggaaaagtatttttgagaagtttgtcttgcaatgtatttataaatagtaaataaagtttttaccattaaaaaaatatctttccctttgttattgaccatctctgggctttgtatcactaattattttattttattatataataattattttattataataaaatcctgaaaggggaaaataaaaaaaa

SEQ ID NO: 502 - DNA, 2820 bp, Homo Sapiens
  NM_000601
gggagttcagacctagatctttccagttaatcacacaacaaacttagctcatcgcaataaaaagcagctcagagccgactggctcttttaggcactgactccgaacaggattctttcacccaggcatctcctccagagggatccgccagcccgtccagcagcaccatgtgggtgaccaaactcctgccagccctgctgctgcagcatgtcctcctgcatctcctcctgctccccatcgccatcccctatgcagagggacaaaggaaaagaagaaatacaattcatgaattcaaaaaatcagcaaagactaccctaatcaaaatagatccagcactgaagataaaaaccaaaaaagtgaatactgcagaccaatgtgctaatagatgtactaggaataaaggacttccattcacttgcaaggcttttgtttttgataaagcaagaaaacaatgcctctggttccccttcaatagcatgtcaagtggagtgaaaaaagaatttggccatgaatttgacctctatgaaaacaaagactacattagaaactgcatcattggtaaaggacgcagctacaagggaacagtatctatcactaagagtggcatcaaatgtcagccctggagttccatgataccacacgaacacagctttttgccttcgagctatcggggtaaagacctacaggaaaactactgtcgaaatcctcgaggggaagaagggggaccctggtgtttcacaagcaatccagaggtacgctacgaagtctgtgacattcctcagtgttcagaagttgaatgcatgacctgcaatggggagagttatcgaggtctcatggatcatacagaatcaggcaagatttgtcagcgctgggatcatcagacaccacaccggcacaaattcttgcctgaaagatatcccgacaagggctttgatgataattattgccgcaatcccgatggccagccgaggccatggtgctatactcttgaccctcacacccgctgggagtactgtgcaattaaaacatgcgctgacaatactatgaatgacactgatgttcctttggaaacaactgaatgcatccaaggtcaaggagaaggctacaggggcactgtcaataccatttggaatggaattccatgtcagcgttgggattctcagtatcctcacgagcatgacatgactcctgaaaatttcaagtgcaaggacctacgagaaaattactgccgaaatccagatgggtctgaatcaccctggtgttttaccactgatccaaacatccgagttggctactgctcccaaattccaaactgtgatatgtcacatggacaagattgttatcgtgggaatggcaaaaattatatgggcaacttatcccaaacaagatctggactaacatgttcaatgtgggacaagaacatggaagacttacatcgtcatatcttctgggaaccagatgcaagtaagctgaatgagaattactgccgaaatccagatgatgatgctcatggaccctggtgctacacgggaaatccactcattccttgggattattgccctatttctcgttgtgaaggtgataccacacctacaatagtcaatttagaccatcccgtaatatcttgtgccaaaacgaaacaattgcgagttgtaaatgggattccaacacgaacaaacataggatggatggttagtttgagatacagaaataaacatatctgcggaggatcattgataaaggagagttgggttcttactgcacgacagtgtttcccttctcgagacttgaaagattatgaagcttggcttggaattcatgatgtccacggaagaggagatgagaaatgcaaacaggttctcaatgtttcccagctggtatatggccctgaaggatcagatctggttttaatgaagcttgccaggcctgctgtcctggatgattttgttagtacgattgatttacctaattatggatgcacaattcctgaaaagaccagttgcagtgtttatggctggggctacactggattgatcaactatgatggcctattacgagtggcacatctctatataatgggaaatgagaaatgcagccagcatcatcgagggaaggtgactctgaatgagtctgaaatatgtgctggggctgaaaagattggatcaggaccatgtgagggggattatggtggcccacttgtttgtgagcaacataaaatgagaatggttcttggtgtcattgttcctggtcgtggatgtgccattccaaatcgtcctggtatttttgtccgagtagcatattatgcaaaatggatacacaaaattattttaacatataaggtaccacagtcatagctgaagtaagtgtgtctgaagcacccaccaatacaactgtcttttacatgaagatttcagagaatgtggaatttaaaatgtcacttacaacaatcctaagacaactactggagagtcatgtttgttgaaattctcattaatgtttatgggtgttttctgttgttttgtttgtcagtgttattttgtcaatgttgaagtgaattaaggtacatgcaagtgtaataacatatctcctgaagatacttgaatggattaaaaaaacacacaggtatatttgctggatgataaagatttcatgggaaaaaaaatcaattaatctgtctaagctgctttctgatgttggtttcttaataatgagtaaaccacaaattaaatgttattttaacctcaccaaaacaatttataccttgtgtccctaaattgtagccctatattaaattatattacatttcaaaaaaaaaaaaaaaa

SEQ ID NO: 503 - DNA, 4345 bp, Homo Sapiens
  NM_000603
actgaaactaggggcaaggagacgaagagaacatgaaagttaaactttaagatgaagaacaaagctgaacatactgatgcattggatctttggagaggatctcagaactcattgtacttaatttacaggctaaaaccttagaagaggaatttattatatcctacacaagactccagggaagcacatggccttggactgaaggctggcatctggaagctgtcagccaccagcaccttctgcagcaggaaaaggccagggctctgctggagcaggcagcagagtggacgcacagtaacatgggcaacttgaagagcgtggcccaggagcctgggccaccctgcggcctggggctggggctgggccttgggctgtgcggcaagcagggcccagccaccccggcccctgagcccagccgggccccagcatccctactcccaccagcgccagaacacagccccccgagctccccgctaacccagcccccagaggggcccaagttccctcgtgtgaagaactgggaggtggggagcatcacctatgacaccctcagcgcccaggcgcagcaggatgggccctgcaccccaagacgctgcctgggctccctggtatttccacggaaactacagggccggccctcccccggccccccggcccctgagcagctgctgagtcaggcccgggacttcatcaaccagtactacagctccattaagaggagcggctcccaggcccacgaacagcggcttcaagaggtggaagccgaggtggcagccacaggcacctaccagcttagggagagcgagctggtgttcggggctaagcaggcctggcgcaacgctccccgctgcgtgggccggatccagtgggggaagctgcaggtgttcgatgcccgggactgcaggtctgcacaggaaatgttcacctacatctgcaaccacatcaagtatgccaccaaccggggcaaccttcgctcggccatcacagtgttcccgcagcgctgccctggccgaggagacttccgaatctggaacagccagctggtgcgctacgcgggctaccggcagcaggatggctctgtgcggggggacccagccaacgtggagatcaccgagctctgcattcagcacggctggaccccaggaaacggtcgcttcgacgtgctgcccctgctgctgcaggccccagatgatcccccagaactcttccttctgccccccgagctggtccttgaggtgcccctggagcaccccacgctggagtggtttgcagccctgggcctgcgctggtacgccctcccggcagtgtccaacatgctgctggaaattgggggcctggagttccccgcagcccccttcagtggctggtacatgagcactgagatcggcacgaggaacctgtgtgaccctcaccgctacaacatcctggaggatgtggctgtctgcatggacctggatacccggaccacctcgtccctgtggaaagacaaggcagcagtggaaatcaacgtggccgtgctgcacagttaccagctagccaaagtcaccatcgtggaccaccacgccgccacggcctctttcatgaagcacctggagaatgagcagaaggccagggggggctgccctgcagactgggcctggatcgtgccccccatctcgggcagcctcactcctgttttccatcaggagatggtcaactatttcctgtccccggccttccgctaccagccagacccctggaaggggagtgccgccaagggcaccggcatcaccaggaagaagacctttaaagaagtggccaacgccgtgaagatctccgcctcgctcatgggcacggtgatggcgaagcgagtgaaggcgacaatcctgtatggctccgagaccggccgggcccagagctacgcacagcagctggggagactcttccggaaggcttttgatccccgggtcctgtgtatggatgagtatgacgtggtgtccctcgaacacgagacgctggtgctggtggtaaccagcacatttgggaatggggatcccccggagaatggagagagctttgcagctgccctgatggagatgtccggcccctacaacagctcccctcggccggaacagcacaagagttataagatccgcttcaacagcatctcctgctcagacccactggtgtcctcttggcggcggaagaggaaggagtccagtaacacagacagtgcaggggccctgggcaccctcaggttctgtgtgttcgggctcggctcccgggcatacccccacttctgcgcctttgctcgtgccgtggacacacggctggaggaactgggcggggagcggctgctgcagctgggccagggcgacgagctgtgcggccaggaggaggccttccgaggctgggcccaggctgccttccaggccgcctgtgagaccttctgtgtgggagaggatgccaaggccgccgcccgagacatcttcagccccaaacggagctggaagcgccagaggtaccggctgagcgcccaggccgagggcctgcagttgctgccaggtctgatccacgtgcacaggcggaagatgttccaggctacaatccgctcagtggaaaacctgcaaagcagcaagtccacgagggccaccatcctggtgcgcctggacaccggaggccaggaggggctgcagtaccagccgggggaccacataggtgtctgcccgcccaaccggcccggccttgtggaggcgctgctgagccgcgtggaggacccgccggcgcccactgagcccgtggcagtagagcagctggagaagggcagccctggtggccctccccccggctgggtgcgggacccccggctgcccccgtgcacgctgcgccaggctctcaccttcttcctggacatcacctccccacccagccctcagctcttgcggctgctcagcaccttggcagaagagcccagggaacagcaggagctggaggccctcagccaggatccccgacgctacgaggagtggaagtggttccgctgccccacgctgctggaggtgctggagcagttcccgtcggtggcgctgcctgccccactgctcctcacccagctgcctctgctccagccccggtactactcagtcagctcggcacccagcacccacccaggagagatccacctcactgtagctgtgctggcatacaggactcaggatgggctgggccccctgcactatggagtctgctccacgtggctaagccagctcaagcccggagaccctgtgccctgcttcatccggggggctccctccttccggctgccacccgatcccagcttgccctgcatcctggtgggtccaggcactggcattgcccccttccggggattctggcaggagcggctgcatgacattgagagcaaagggctgcagcccactcccatgactttggtgttcggctgccgatgctcccaacttgaccatctctaccgcgacgaggtgcagaacgcccagcagcgcggggtgtttggccgagtcctcaccgccttctcccgggaacctgacaaccccaagacctacgtgcaggacatcctgaggacggagctggctgcggaggtgcaccgcgtgctgtgcctcgagcggggccacatgtttgtctgcggcgatgttaccatggcaaccaacgtcctgcagaccgtgcagcgcatcctggcgacggagggcgacatggagctggacgaggccggcgacgtcatcggcgtgctgcgggatcagcaacgctaccacgaagacattttcgggctcacgctgcgcacccaggaggtgacaagccgcatacgcacccagagcttttccttgcaggagcgtcagttgcggggcgcagtgccctgggcgttcgaccctcccggctcagacaccaacagcccctgagagccgcctggctttcccttccagttccgggagagcggctgcccgactcaggtccgcccgaccaggatcagccccgctcctcccctcttgaggtggtgccttctcacatctgtccagaggctgcaaggattcagcattattcctccaggaaggagcaaaacgcctcttttccctctctaggcctgttgcctcgggcctgggtccgccttaatctggaaggcccctcccagcagcggtaccccagggcctactgccacccgcttcctgtttcttagtcgaatgttagattcctcttgcctctctcaggagtatcttacctgtaaagtctaatctctaaatcaagtatttattattgaagatttaccataagggactgtgccagatgttaggagaactactaaagtgcctaccccagctcatgtggattacaaaaaaaa

SEQ ID NO: 504 - DNA, 847 bp, Homo Sapiens
  NM_000607
acagagtaaacttttgctgggctccaagtgaccgcccatagtttattataaaggtgactgcaccctgcagccaccagcactgcctggctccacgtgcctcctggtctcagtatggcgctgtcctgggttcttacagtcctgagcctcctacctctgctggaagcccagatcccattgtgtgccaacctagtaccggtgcccatcaccaacgccaccctggaccggatcactggcaagtggttttatatcgcatcggcctttcgaaacgaggagtacaataagtcggttcaggagatccaagcaaccttcttttacttcacccccaacaagacagaggacacgatctttctcagagagtaccagacccgacaggaccagtgcatctataacaccacctacctgaatgtccagcgggaaaatgggaccatctccagatacgtgggaggccaagagcatttcgctcacttgctgatcctcagggacaccaagacctacatgcttgcttttgacgtgaacgatgagaagaactgggggctgtctgtctatgctgacaagccagagacgaccaaggagcaactgggagagttctacgaagctctcgactgcttgcgcattcccaagtcagatgtcgtgtacaccgattggaaaaaggataagtgtgagccactggagaagcagcacgagaaggagaggaaacaggaggagggggaatcctagcaggacacagccttggatcaggacagagacttgggggccatcctgcccctccaacccgacatgtgtacctcagctttttccctcacttgcatcaataaagcttctgtgtttggaacagctaaaaaaaaaa

SEQ ID NO: 505 - DNA, 844 bp, Homo Sapiens
  NM_000608
cagacacagagtaaacttttgctgggctccaagtgaccgcccatagtttattataaaggtgactgcaccctgcagccaccagcactgcctggctccacgtgcctcctggtctcagtatggcgctgtcctgggttcttacagtcctgagcctcctacctctgctggaagcccagatcccattgtgtgccaacctagtaccggtgcccatcaccaacgccaccctggaccggatcactggcaagtggttttatatcgcatcggcctttcgaaacgaggagtacaataagtcggttcaggagatccaagcaaccttcttttactttacccccaacaagacagaggacacgatctttctcagagagtaccagacccgccagaaccagtgcttctataactccagttacctgaatgtccagcgggagaatgggaccgtctccagatacgagggaggccgagaacatgttgctcacctgctgttccttagggacaccaagaccttgatgtttggttcctacctggacgatgagaagaactgggggctgtctttctatgctgacaagccagagacgaccaaggagcaactgggagagttctacgaagctctcgactgcttgtgcattcccaggtcagatgtcatgtacaccgactggaaaaaggataagtgtgagccactggagaagcagcacgagaaggagaggaaacaggaggagggggaatcctagcaggacacagccttggatcaggacagagacttgggggccatcctgcccctccaacccgacatgtgtacctcagctttttccctcacttgcatcaataaagcttctgtgtttggaacagctaa

SEQ ID NO: 506 - DNA, 5748 bp, Homo Sapiens
  NM_000610
gagaagaaagccagtgcgtctctgggcgcaggggccagtggggctcggaggcacaggcaccccgcgacactccaggttccccgacccacgtccctggcagccccgattatttacagcctcagcagagcacggggcgggggcagaggggcccgcccgggagggctgctacttcttaaaacctctgcgggctgcttagtcacagccccccttgcttgggtgtgtccttcgctcgctccctccctccgtcttaggtcactgttttcaacctcgaataaaaactgcagccaacttccgaggcagcctcattgcccagcggaccccagcctctgccaggttcggtccgccatcctcgtcccgtcctccgccggcccctgccccgcgcccagggatcctccagctcctttcgcccgcgccctccgttcgctccggacaccatggacaagttttggtggcacgcagcctggggactctgcctcgtgccgctgagcctggcgcagatcgatttgaatataacctgccgctttgcaggtgtattccacgtggagaaaaatggtcgctacagcatctctcggacggaggccgctgacctctgcaaggctttcaatagcaccttgcccacaatggcccagatggagaaagctctgagcatcggatttgagacctgcaggtatgggttcatagaagggcacgtggtgattccccggatccaccccaactccatctgtgcagcaaacaacacaggggtgtacatcctcacatccaacacctcccagtatgacacatattgcttcaatgcttcagctccacctgaagaagattgtacatcagtcacagacctgcccaatgcctttgatggaccaattaccataactattgttaaccgtgatggcacccgctatgtccagaaaggagaatacagaacgaatcctgaagacatctaccccagcaaccctactgatgatgacgtgagcagcggctcctccagtgaaaggagcagcacttcaggaggttacatcttttacaccttttctactgtacaccccatcccagacgaagacagtccctggatcaccgacagcacagacagaatccctgctaccactttgatgagcactagtgctacagcaactgagacagcaaccaagaggcaagaaacctgggattggttttcatggttgtttctaccatcagagtcaaagaatcatcttcacacaacaacacaaatggctggtacgtcttcaaataccatctcagcaggctgggagccaaatgaagaaaatgaagatgaaagagacagacacctcagtttttctggatcaggcattgatgatgatgaagattttatctccagcaccatttcaaccacaccacgggcttttgaccacacaaaacagaaccaggactggacccagtggaacccaagccattcaaatccggaagtgctacttcagacaaccacaaggatgactgatgtagacagaaatggcaccactgcttatgaaggaaactggaacccagaagcacaccctcccctcattcaccatgagcatcatgaggaagaagagaccccacattctacaagcacaatccaggcaactcctagtagtacaacggaagaaacagctacccagaaggaacagtggtttggcaacagatggcatgagggatatcgccaaacacccaaagaagactcccattcgacaacagggacagctgcagcctcagctcataccagccatccaatgcaaggaaggacaacaccaagcccagaggacagttcctggactgatttcttcaacccaatctcacaccccatgggacgaggtcatcaagcaggaagaaggatggatatggactccagtcatagtataacgcttcagcctactgcaaatccaaacacaggtttggtggaagatttggacaggacaggacctctttcaatgacaacgcagcagagtaattctcagagcttctctacatcacatgaaggcttggaagaagataaagaccatccaacaacttctactctgacatcaagcaataggaatgatgtcacaggtggaagaagagacccaaatcattctgaaggctcaactactttactggaaggttatacctctcattacccacacacgaaggaaagcaggaccttcatcccagtgacctcagctaagactgggtcctttggagttactgcagttactgttggagattccaactctaatgtcaatcgttccttatcaggagaccaagacacattccaccccagtggggggtcccataccactcatggatctgaatcagatggacactcacatgggagtcaagaaggtggagcaaacacaacctctggtcctataaggacaccccaaattccagaatggctgatcatcttggcatccctcttggccttggctttgattcttgcagtttgcattgcagtcaacagtcgaagaaggtgtgggcagaagaaaaagctagtgatcaacagtggcaatggagctgtggaggacagaaagccaagtggactcaacggagaggccagcaagtctcaggaaatggtgcatttggtgaacaaggagtcgtcagaaactccagaccagtttatgacagctgatgagacaaggaacctgcagaatgtggacatgaagattggggtgtaacacctacaccattatcttggaaagaaacaaccgttggaaacataaccattacagggagctgggacacttaacagatgcaatgtgctactgattgtttcattgcgaatcttttttagcataaaattttctactctttttgttttttgtgttttgttctttaaagtcaggtccaatttgtaaaaacagcattgctttctgaaattagggcccaattaataatcagcaagaatttgatcgttccagttcccacttggaggcctttcatccctcgggtgtgctatggatggcttctaacaaaaactacacatatgtattcctgatcgccaacctttcccccaccagctaaggacatttcccagggttaatagggcctggtccctgggaggaaatttgaatgggtccattttgcccttccatagcctaatccctgggcattgctttccactgaggttgggggttggggtgtactagttacacatcttcaacagaccccctctagaaatttttcagatgcttctgggagacacccaaagggtgaagctatttatctgtagtaaactatttatctgtgtttttgaaatattaaaccctggatcagtcctttgatcagtataattttttaaagttactttgtcagaggcacaaaagggtttaaactgattcataataaatatctgtacttcttcgatcttcaccttttgtgctgtgattcttcagtttctaaaccagcactgtctgggtccctacaatgtatcaggaagagctgagaatggtaaggagactcttctaagtcttcatctcagagaccctgagttcccactcagacccactcagccaaatctcatggaagaccaaggagggcagcactgtttttgttttttgttttttgttttttttttttgacactgtccaaaggttttccatcctgtcctggaatcagagttggaagctgaggagcttcagcctcttttatggtttaatggccacctgttctctcctgtgaaaggctttgcaaagtcacattaagtttgcatgacctgttatccctggggccctatttcatagaggctggccctattagtgatttccaaaaacaatatggaagtgccttttgatgtcttacaataagagaagaagccaatggaaatgaaagagattggcaaaggggaaggatgatgccatgtagatcctgtttgacatttttatggctgtatttgtaaacttaaacacaccagtgtctgttcttgatgcagttgctatttaggatgagttaagtgcctggggagtccctcaaaaggttaaagggattcccatcattggaatcttatcaccagataggcaagtttatgaccaaacaagagagtactggctttatcctctaacctcatattttctcccacttggcaagtcctttgtggcatttattcatcagtcagggtgtccgattggtcctagaacttccaaaggctgcttgtcatagaagccattgcatctataaagcaacggctcctgttaaatggtatctcctttctgaggctcctactaaaagtcatttgttacctaaacttatgtgcttaacaggcaatgcttctcagaccacaaagcagaaagaagaagaaaagctcctgactaaatcagggctgggcttagacagagttgatctgtagaatatctttaaaggagagatgtcaactttctgcactattcccagcctctgctcctccctgtctaccctctcccctccctctctccctccacttcaccccacaatcttgaaaaacttcctttctcttctgtgaacatcattggccagatccattttcagtggtctggatttctttttattttcttttcaacttgaaagaaactggacattaggccactatgtgttgttactgccactagtgttcaagtgcctcttgttttcccagagatttcctgggtctgccagaggcccagacaggctcactcaagctctttaactgaaaagcaacaagccactccaggacaaggttcaaaatggttacaacagcctctacctgtcgccccagggagaaaggggtagtgatacaagtctcatagccagagatggttttccactccttctagatattcccaaaaagaggctgagacaggaggttattttcaattttattttggaattaaatacttttttccctttattactgttgtagtccctcacttggatatacctctgttttcacgatagaaataagggaggtctagagcttctattccttggccattgtcaacggagagctggccaagtcttcacaaacccttgcaacattgcctgaagtttatggaataagatgtattctcactcccttgatctcaagggcgtaactctggaagcacagcttgactacacgtcatttttaccaatgattttcaggtgacctgggctaagtcatttaaactgggtctttataaaagtaaaaggccaacatttaattattttgcaaagcaacctaagagctaaagatgtaatttttcttgcaattgtaaatcttttgtgtctcctgaagacttcccttaaaattagctctgagtgaaaaatcaaaagagacaaaagacatcttcgaatccatatttcaagcctggtagaattggcttttctagcagaacctttccaaaagttttatattgagattcataacaacaccaagaattgattttgtagccaacattcattcaatactgttatatcagaggagtaggagagaggaaacatttgacttatctggaaaagcaaaatgtacttaagaataagaataacatggtccattcacctttatgttatagatatgtctttgtgtaaatcatttgttttgagttttcaaagaatagcccattgttcattcttgtgctgtacaatgaccactgttattgttactttgacttttcagagcacacccttcctctggtttttgtatatttattgatggatcaataataatgaggaaagcatgatatgtatattgctgagttgaaagcacttattggaaaatattaaaaggctaacattaaaagactaaaggaaacagaaaaaaaaaaaaaaaaa

SEQ ID NO: 507 - DNA, 7635 bp, Homo Sapiens
  NM_000611
ggggccggggggcggagccttgcgggctggagcgaaagaatgcgggggctgagcgcagaagcggctcgaggctggaagaggatcttgggcgccgccaggttctgtggacaatcacaatgggaatccaaggagggtctgtcctgttcgggctgctgctcgtcctggctgtcttctgccattcaggtcatagcctgcagtgctacaactgtcctaacccaactgctgactgcaaaacagccgtcaattgttcatctgattttgatgcgtgtctcattaccaaagctgggttacaagtgtataacaagtgttggaagtttgagcattgcaatttcaacgacgtcacaacccgcttgagggaaaatgagctaacgtactactgctgcaagaaggacctgtgtaactttaacgaacagcttgaaaatggtgggacatccttatcagagaaaacagttcttctgctggtgactccatttctggcagcagcctggagccttcatccctaagtcaacaccaggagagcttctcccaaactccccgttcctgcgtagtccgctttctcttgctgccacattctaaaggcttgatattttccaaatggatcctgttgggaaagaataaaattagcttgagcaacctggctaagatagaggggctctgggagactttgaagaccagtcctgtttgcagggaagccccacttgaaggaagaagtctaagagtgaagtaggtgtgacttgaactagattgcatgcttcctcctttgctcttgggaagaccagctttgcagtgacagcttgagtgggttctctgcagccctcagattatttttcctctggctccttggatgtagtcagttagcatcattagtacatctttggagggtggggcaggagtatatgagcatcctctctcacatggaacgctttcataaacttcagggatcccgtgttgccatggaggcatgccaaatgttccatatgtgggtgtcagtcagggacaacaagatccttaatgcagagctagaggacttctggcagggaagtggggaagtgttccagatagcagggcatgaaaacttagagaggtacaagtggctgaaaatcgagtttttcctctgtctttaaattttatatgggctttgttatcttccactggaaaagtgtaatagcatacatcaatggtgtgttaaagctatttccttgccttttttttattggaatggtaggatatcttggctttgccacacacagttacagagtgaacactctactacatgtgactggcagtattaagtgtgcttattttaaatgttactggtagaaaggcagttcaggtatgtgtgtatatagtatgaatgcagtggggacaccctttgtggttacagtttgagacttccaaaggtcatccttaataacaacagatctgcaggggtatgttttaccatctgcatccagcctcctgctaactcctagctgactcagcatagattgtataaaatacctttgtaacggctcttagcacactcacagatgtttgaggctttcagaagctcttctaaaaaatgatacacacctttcacaagggcaaactttttccttttccctgtgtattctagtgaatgaatctcaagattcagtagacctaatgacatttgtattttatgatcttggctgtatttaatggcataggctgacttttgcagatggaggaatttcttgattaatgttgaaaaaaaacccttgattatactctgttggacaaaccgagtgcaatgaatgatgcttttctgaaaatgaaatataacaagtgggtgaatgtggttatggccgaaaaggatatgcagtatgcttaatggtagcaactgaaagaagacatcctgagcagtgccagctttcttctgttgatgccgttccctgaacataggaaaatagaaacttgcttatcaaaacttagcattaccttggtgctctgtgttctctgttagctcagtgtctttccttacatcaataggtttttttttttttttttggcctgaggaagtactgaccatgcccacagccaccggctgagcaaagaagctcatttcatgtgagttctaaggaatgagaaacaattttgatgaatttaagcagaaaatgaatttctgggaacttttttgggggcgggggggtggggaattcagccacactccagaaagccaggagtcgacagttttggaagcctctctcaggattgagattctaggatgagattggcttactgctatcttgtgtcatgtacccactttttggccagactacactgggaagaaggtagtcctctaaagcaaaatctgagtgccactaaatggggagatggggctgttaagctgtccaaatcaacaagggtcatataaatggccttaaactttggggttgctttctgcaaaaagttgctgtgactcatgccatagacaaggttgagtgcctggacccaaaggcaatactgtaatgtaaagacatttatagtactaggcaaacagcaccccaggtactccaggccctcctggctggagagggctgtggcaatagaaaattagtgccaactgcagtgagtcagcctaggttaaatagagagtgtaagagtgctggacaggaacctccaccctcatgtcacatttcttcaatgtgacccttctggcccctctcctcctgacagcggaacaatgactgccccgataggtgaggctggaggaagaatcagtcctgtccttggcaagctcttcactatgacagtaaaggctctctgcctgctgccaaggcctgtgactttctaacctggcctcacgctgggtaagcttaaggtagaggtgcaggattagcaagcccacctggctaccaggccgacagctacatcctccaactgaccctgatcaacgaagagggattcatgtgtctgtctcagttggttccaaatgaaaccagggagcaggggagttaggaatcgaacaccagtcatgcctactggctctctgctcgagagccaataccctgtgccctccactcatctggatttacaggaactgtcatagtgttcagtattgggtggtgataagcccattggattgtccccttggggggatgagctaggggtgcaaggaacacctgatgagtagataagtggagctcatggtatttcctgaaagatgctaatctatttgccaaacttggtcttgaatgtactgggggcttcaaggtatgggtatatttttcttgtgtccttgcagttagcccccatgtcttatgtgtgtcctgaaaaaataagagcctgcccaagactttgggcctcttgacagaattaaccacttttatacatctgagttctcttggtaagttctttagcagtgttcaaagtctactagctcgcattagtttctgttgctgccaacagatctgaactaatgctaacagatccccctgagggattcttgatgggctgagcagctggctggagctagtactgactgacattcattgtgatgagggcagctttctggtacaggattctaagctctatgttttatatacattttcatctgtacttgcacctcactttacacaagaggaaactatgcaaagttagctggatcgctcaaggtcacttaggtaagttggcaagtccatgcttcccactcagctcctcaggtcagcaagtctacttctctgcctattttgtatactctctttaatatgtgcctagctttggaaagtctagaatgggtccctggtgcctttttactttgaagaaatcagtttctgcctctttttggaaaagaaaacaaagtgcaattgttttttactggaaagttacccaatagcatgaggtgaacaggacgtagttaggccttcctgtaaacagaaaatcatatcaaaacactatcttcccatctgtttctcaatgcctgctacttcttgtagatatttcatttcaggagagcagcagttaaacccgtggattttgtagttaggaacctgggttcaaaccctcttccactaattggctatgtctctggacaagtttttttttttttttttttttaaaccctttctgaactttcactttctatgtctacctcaaagaattgttgtgaggcttgagataatgcatttgtaaagggtctgccagataggaagatgctagttatggatttacaaggttgttaaggctgtaagagtctaaaacctacagtgaatcacaatgcatttacccccactgacttggacataagtgaaaactagccagaagtctctttttcaaattacttacaggttattcaatataaaatttttgtaatggataatcttatttatctaaactaaagcttcctgtttatacacactcctgttattctgggataagataaatgaccacagtaccttaatttctaggtgggtgcctgtgatggttcattgtaggtaaggacattttctctttttcagcagctgtgtaggtccagagcctctgggagaggaggggggtagcatgcacccagcaggggactgaactgggaaactcaaggttctttttactgtggggtagtgagctgcctttctgtgatcggtttccctagggatgttgctgttcccctccttgctattcgcagctacatacaacgtggccaaccccagtaggctgatcctatatatgatcagtgctggtgctgactctcaatagccccacccaagctggctataggtttacagatacattaattaggcaacctaaaatattgatgctggtgttggtgtgacataatgctatggccagaactgaaacttagagttataattcatgtattagggttctccagagggacagaattagtaggatatatgtatatatgaaagggaggttattagggagaactggctcccacagttagaaggcgaagtcgcacaataggccgtctgcaagctgggttagagagaagccagtagtggctcagcctgagttcaaaaacctcaaaactggggaagctgacagtgcagccagccttcagtctgtggccaaaggcccaagagcccctggcaaccaacccactggtgcaagtcctagattccaaaggctgaagaacctggagtctgatgtccaagagcaggaagagtggaagaaagccagaagactcagcaaacaaggtagacagtgtctaccaccatagtggccataccaaagaggctaccgattccttcctgctacctggatccctgaagttgccctggtctctgcaccttctaaacctagttcttaagagctttccattacatgagctgtctcaaagccctccaataaattctcagtgtaagcttctgttgcttgtggacagaaaattctgacagacctaccctataagtgttactgtcaggataacatgagaacgcacaacagtaagtggtcactaagtgttagctacggttattttgcccaaggtagcatggctagttgatgccggttgatggggcttaaacccagctccctcatcttccaggcctctgtactccctattccactaaactacctctcaggtttatttttttaaattcttactctgcaagtacataggaccacatttacctgggaaaacaagaataaaggctgctctgcattttttagaaacttttttgaaagggagatgggaatgcctgcacccccaagtccagaccaacacaatggttaattgagatgaataataaaggaaagactgttctgggcttcccagaatagcttggtccttaaattgtggcacaaacaacctcctgtcagagccagcctcctgccaggaagaggggtaggagactagaggccgtgtgtgcagccttgccctgaaggctagggtgacaatttggaggctgtccaaacaccctggcctctagagctggcctgtctatttgaaatgccggctctgatgctaatcggcgaccctcaggcaagttacttaaccttacatgcctcagttttctcatctggaaaatgagaaccctaggtttagggttgttagaaaagttaaatgagttaagacaagtgcctgggacacagtagcctcttgtgtgtgtttatcattatgtcctcagcaggtcgtagaagcagcttctcaggtgtgaggctggcgcgattatctggagtgggttgggttttctaggatggaccccctgctgcattttcctcattcatccaccagggcttaatggggaatcaaggaatccatgtgtaactgtataataactgtagccacactccaatgaccacctactagttgtccctggcactgcttatacatatgtccatcaaatcaatcctatgaagtagatactgtcttcattttatagatcagagacaattggggttcagagagctgatgtgattttcccagggtcacagagagtcccagattcaggcacaactcttgtattccaagacacaaccactacatgtccaaaggctgcccagagccaccgggcacggcaaattgtgacatatccctaaagaggctgagcacctggtcaggatctgatggctgacagtgtgtccagatgcagagctggagtgggggaggggaaggggggctccttgggacagagaaggctttctgtgctttctctgaagggagcagtctgaggaccaagggaacccggcaaacagcacctcaggtactccaggccctcctggctggagagggctgtggcaatggaaaattagtgccaactgcaatgagtcagcctcggttaaatagagagtgaagaatgctggacaggaacctccaccctcatgtcacatttcttcagtgtgacccttctggcccctctcctcctgacagcggaacaatgactgccccgataggtgaggctggaggaagaatcagtcctgtccttggcaagctcttcactatgacagtaaaggctctctgcctgctgccaaggcctgtgactttctaacctggcctcacgctgggtaagcttaaggtagaggtgcaggattagcaagcccacctggctaccaggccgacagctacatctttcaactgaccctgatcaacgaagagggacttgtgtctctcagttggttccaaatgaaaccagggagcaggggcgttaggaagctccaacaggatggtacttaatggggcatttgagtggagaggtaggtgacatagtgctttggagcccagggagggaaaggttctgctgaagttgaattcaagactgttctttcatcacaaacttgagtttcctggacatttgtttgcagaaacaaccgtagggttttgccttaacctcgtgggtttattattacctcatagggactttgcctcctgacagcagtttatgggtgttcattgtggcacttgagttttcttgcatacttgttagagaaaccaagtttgtcatcaacttcttatttaaccccctggctataacttcatggattatgttataattaagccatccagagtaaaatctgtttagattatcttggagtaagggggaaaaaatctgtaattttttctcctcaactagatatatacataaaaaatgattgtattgcttcatttaaaaaatataacgcaaaatctcttttccttctaaaaaaaaaaaaaaaaaa

SEQ ID NO: 508 - DNA, 3134 bp, Homo Sapiens
  NM_000616
gtttggggccggcccaggcctagggtgtggaggagccttgccatcgggcttcctgtctctcttcatttaagcacgactctgcagaaggaacaaagcaccctccccactgggctcctggttgcagagctccaagtcctcacacagatacgcctgtttgagaagcagcgggcaagaaagacgcaagcccagaggccctgccatttctgtgggctcaggtccctactggctcaggcccctgcctccctcggcaaggccacaatgaaccggggagtcccttttaggcacttgcttctggtgctgcaactggcgctcctcccagcagccactcagggaaagaaagtggtgctgggcaaaaaaggggatacagtggaactgacctgtacagcttcccagaagaagagcatacaattccactggaaaaactccaaccagataaagattctgggaaatcagggctccttcttaactaaaggtccatccaagctgaatgatcgcgctgactcaagaagaagcctttgggaccaaggaaactttcccctgatcatcaagaatcttaagatagaagactcagatacttacatctgtgaagtggaggaccagaaggaggaggtgcaattgctagtgttcggattgactgccaactctgacacccacctgcttcaggggcagagcctgaccctgaccttggagagcccccctggtagtagcccctcagtgcaatgtaggagtccaaggggtaaaaacatacagggggggaagaccctctccgtgtctcagctggagctccaggatagtggcacctggacatgcactgtcttgcagaaccagaagaaggtggagttcaaaatagacatcgtggtgctagctttccagaaggcctccagcatagtctataagaaagagggggaacaggtggagttctccttcccactcgcctttacagttgaaaagctgacgggcagtggcgagctgtggtggcaggcggagagggcttcctcctccaagtcttggatcacctttgacctgaagaacaaggaagtgtctgtaaaacgggttacccaggaccctaagctccagatgggcaagaagctcccgctccacctcaccctgccccaggccttgcctcagtatgctggctctggaaacctcaccctggcccttgaagcgaaaacaggaaagttgcatcaggaagtgaacctggtggtgatgagagccactcagctccagaaaaatttgacctgtgaggtgtggggacccacctcccctaagctgatgctgagtttgaaactggagaacaaggaggcaaaggtctcgaagcgggagaaggcggtgtgggtgctgaaccctgaggcggggatgtggcagtgtctgctgagtgactcgggacaggtcctgctggaatccaacatcaaggttctgcccacatggtccaccccggtgcagccaatggccctgattgtgctggggggcgtcgccggcctcctgcttttcattgggctaggcatcttcttctgtgtcaggtgccggcaccgaaggcgccaagcagagcggatgtctcagatcaagagactcctcagtgagaagaagacctgccagtgtcctcaccggtttcagaagacatgtagccccatttgaggcacgaggccaggcagatcccacttgcagcctccccaggtgtctgccccgcgtttcctgcctgcggaccagatgaatgtagcagatcccaggcctctggcctcctgttcgcctcctctacaatttgccattgtttctcctgggttaggccccggcttcactggttgagtgttgctctctagtttccagaggcttaatcacaccgtcctccacgccatttccttttccttcaagcctagcccttctctcattatttctctctgaccctctccccactgctcatttggatcccaggggagtgttcagggccagccctggctggcatggagggtgaggctgggtgtctggaagcatggagcatgggactgttcttttacaagacaggaccctgggaccacagagggcaggaacttgcacaaaatcacacagccaagccagtcaaggatggatgcagatccagaggtttctggcagccagtacctcctgccccatgctgcccgcttctcaccctatgtgggtgggaccacagactcacatcctgaccttgcacaaacagcccctctggacacagccccatgtacacggcctcaagggatgtctcacatcctctgtctatttgagacttagaaaaatcctacaaggctggcagtgacagaactaagatgatcatctccagtttatagaccagaaccagagctcagagaggctagatgattgattaccaagtgccggactagcaagtgctggagtcgggactaacccaggtcccttgtcccaagttccactgctgcctcttgaatgcagggacaaatgccacacggctctcaccagtggctagtggtgggtactcaatgtgtacttttgggttcacagaagcacagcacccatgggaagggtccatctcagagaatttacgagcagggatgaaggcctccctgtctaaaatccctccttcatcccccgctggtggcagaatctgttaccagaggacaaagcctttggctcttctaatcagagcgcaagctgggagcacaggcactgcaggagagaatgcccagtgaccagtcactgaccctgtgcagaacctcctggaagcgagctttgctgggagagggggtagctagcctgagagggaaccctctaagggacctcaaaggtgattgtgccaggctctgcgcctgccccacaccctcccttaccctcctccagaccattcaggacacagggaaatcagggttacaaatcttcttgatccacttctctcaggatcccctctcttcctacccttcctcaccacttccctcagtcccaactccttttccctatttccttctcctcctgtctttaaagcctgcctcttccaggaagacccccctattgctgctggggctccccatttgcttactttgcatttgtgcccactctccacccctgctcccctgagctgaaataaaaatacaataaacttactataaagatgcaaaaaaaaaaaaaaaaaa

SEQ ID NO: 509 - DNA, 4164 bp, Homo Sapiens
  NM_000617
cgaccaatcgcggggaggggagggcgttagccagcgtggcgctggctcccggaatatggagccctgggcgcgggggcggcgtgtcaggtggttgcggagctggtaagaatcatattctaagaactcagccactcaggtatccaccatggtgctgggtcctgaacagaagatgtcagatgacagtgtttctggagatcatggggagtctgccagtcttggtaacatcaaccctgcctatagtaatccctctctttcacagtcccctggggactcagaggagtacttcgccacttactttaatgagaagatctccattcctgaggaggagtactcttgttttagctttcgtaaactctgggctttcaccggaccaggttttcttatgagcattgcctacctggatccaggaaatattgaatccgatttgcagtctggagcagtggctggatttaagttgctctggatccttctgttggccacccttgtggggctgctgctccagcggcttgcagctagactgggagtggttactgggctgcatcttgctgaagtatgtcaccgtcagtatcccaaggtcccacgagtcatcctgtggctgatggtggagttggctatcatcggctcagacatgcaagaagtcattggctcagccattgctatcaatcttctgtctgtaggaagaattcctctgtggggtggcgttctcatcaccattgcagatacttttgtatttctcttcttggacaaatatggcttgcggaagctagaagcattttttggctttctcatcactattatggccctcacatttggatatgagtatgttacagtgaaacccagccagagccaggtactcaagggcatgttcgtaccatcctgttcaggctgtcgcactccacagattgaacaggctgtgggcatcgtgggagctgtcatcatgccacacaacatgtacctgcattctgccttagtcaagtctagacaggtaaaccggaacaataagcaggaagttcgagaagccaataagtactttttcattgaatcctgcattgcactctttgtttccttcatcatcaatgtctttgttgtctcagtctttgctgaagcattttttgggaaaaccaacgagcaggtggttgaagtctgtacaaataccagcagtcctcatgctggcctctttcctaaagataactcgacactggctgtggacatctacaaagggggtgttgtgctgggatgttactttgggcctgctgcactctacatttgggcagtggggatcctggctgcaggacagagctccaccatgacaggaacctattctggccagtttgtcatggagggattcctgaacctaaagtggtcacgctttgcccgagtggttctgactcgctctattgccatcatccccactctgcttgttgctgtcttccaagatgtagagcatctaacagggatgaatgactttctgaatgttctacagagcttacagcttccctttgctctcatacccatcctcacatttacgagcttgcggccagtaatgagtgactttgccaatggactaggctggcggattgcaggaggaatcttggtccttatcatctgttccatcaatatgtactttgtagtggtttatgtccgggacctagggcatgtggcattatatgtggtggctgctgtggtcagcgtggcttatctgggctttgtgttctacttgggttggcaatgtttgattgcactgggcatgtccttcctggactgtgggcatacggtaagcatctctaaaggcctgctgacagaagaagccacccgtggctacgttaaataacactggattagtctgtcttctgcaggtagccatcagagccagtgtgtttctatggtttactgtgtgaacatagccaaaagtatgtgccgttgcacagactgtgtttatgactcaaccgttggttggaaaagactttgtttcatgtgtatttgaaagatggaattattttttccttcctgacctaaccttagaactggattagggtgggatctttgaaaagctgacatttgctgctatcattccaacactaaattcttaagtagttgcccaagggccagctcagtttatccttcggagagacaaggatatgcatgattcttaaccaggctatatgttaaaaaaaaattggaaaatgcaatacattttttattatacaaactacagaatgagtatgcaagttttatttatcaaaatgtaatggatttttaaaggctgagaaattttccttatacctaccttttcagttattttaattataccaaattatcaactagaatagcttcatccatatgaaatataaaatgaagagacacctagctctatcaggcttaggattctttgaacttatttccactttaatttctcagtggaagttaagaggggtgagaaaacaaagaaggggaaaaactgacaactaacaaaaccagcaccacatcgctaggtggtgcttactaattaccttctcaggattttcctcagattgaaaagcttatgaggatttcttgggagtcttaataacctgcctgttagtacagagctttcctgatgatatttactcttgagcacatgtggttgtaaaaccttaactttctttctccaggagggtggtgatagaaacagatggtagtatttatgaactgatgttctcgtgaaatgttgagggtggggagaaaagactttaagggaggagagccatctattttgttcctaaagccacctctcagcagaatcgtcatgtttttctgatgcaccgctctgcttcatgcccaagatgacttgcgaggcaatctcaggagctgtggacttaaccgttgcaaagcacactgtctttctcagcgttctctgcaagtcagtaggtgttagtatggttgcaaagttcactgtctcagcaaagttgaactgggctacctctctacagctgtttcctcagagggaaaaatcttgagaccagatggtggagctctggagtcagaggaaatgggtgtcttcagcacaaagctgctgcttttacttcagccacttctgacatttttacataccgagcctgagattgtgtgattatctcaaatcaaatcactttgatggagataaataatcaaaactgttttatagtcattgatttggtgagaacagtaatggaaaatggtgttgaaggacttctcatttttggagctttccttccagagtcctggctgattggtgttcgctgttcatctgagcccccaaaagcattattactgatacttgcacacagtcaaaagcgcagactggatggatggtcttttataaggcatttaagggtacactactgtgtttcactgaccatacatttttcttagcccctcaagtaatatagcacagagttatgaatgacaattcccctaaccattcctcttcatatctgcctcttccccttaccatcgtaattctccaaactggtcataaaggcactctgtgaagatattggggactgacatcttaagctctcacctggctgcagtaggaaaggccaaactgacgacaaaaaaaaaattctttataaagatgatatggtaacatgtatctttgccctgggtctgggtgggtccagtcagtctcagatttacaagcatttaggagcctaggtaaaagctgctagtattcttttaaaagttatatttatgacttgcaatgatagaaaactccttccaattaaatggcattttataatattatgtgtgtacttcacagtgttaaaaataccctcatacgttattgcatttgatcttcacagaaagtgcattttaaccagtactctgggtgcaataaataatatgtagaaatttaagtcctccaattccagcatatccagtgagttttgacagtgtgtttatgtggaatgtttaaggatatacaattgtactttatataaattggttcttgttcttcttaaatgtgacatgaaataattgtgctgctacattatactggaaattaacaggggaaaagggaagagctcttggctcccttgaggttctgctagtggtgttaggagtggttacaactgagcttttagtaaccatttaaccgtatgtaaacttggtttctaattaaaaaaaaatttctttttccaa

SEQ ID NO: 510 - DNA, 1300 bp, Homo Sapiens
  NM_000626
ctgcagccggtgcagttacacgttttcctccaaggagcctcggacgttgtcacgggtttggggtcggggacagagcggtgaccatggccaggctggcgttgtctcctgtgcccagccactggatggtggcgttgctgctgctgctctcagctgagccagtaccagcagccagatcggaggaccggtaccggaatcccaaaggtagtgcttgttcgcggatctggcagagcccacgtttcatagccaggaaacggggcttcacggtgaaaatgcactgctacatgaacagcgcctccggcaatgtgagctggctctggaagcaggagatggacgagaatccccagcagctgaagctggaaaagggccgcatggaagagtcccagaacgaatctctcgccaccctcaccatccaaggcatccggtttgaggacaatggcatctacttctgtcagcagaagtgcaacaacacctcggaggtctaccagggctgcggcacagagctgcgagtcatgggattcagcaccttggcacagctgaagcagaggaacacgctgaaggatggtatcatcatgatccagacgctgctgatcatcctcttcatcatcgtgcctatcttcctgctgctggacaaggatgacagcaaggctggcatggaggaagatcacacctacgagggcctggacattgaccagacagccacctatgaggacatagtgacgctgcggacaggggaagtgaagtggtctgtaggtgagcacccaggccaggagtgagagccaggtcgccccatgacctgggtgcaggctccctggcctcagtgactgcttcggagctgcctggctcatggcccaacccctttcctggaccccccagctggcctctgaagctggcccaccagagctgccatttgtctccagcccctggtccccagctcttgccaaagggcctggagtagaaggacaacagggcagcaacttggagggagttctctggggatggacgggacccagccttctgggggtgctatgaggtgatccgtccccacacatgggatgggggaggcagagactggtccagagcccgcaaatggactcggagccgagggcctcccagcagagcttgggaagggccatggacccaactgggccccagaagagccacaggaacatcattcctctcccgcaaccactcccaccccagggaggccctggcctccagtgccttcccccgtggaataaacggtgtgtcctgagaaaccacaaaaaaaaaaaaaaaaaaaaaaaaaaaaaaaaaaaaaaaa

SEQ ID NO: 511 - DNA, 1935 bp, Homo Sapiens
  NM_000628
atctccgctggttcccggaagccgccgcggacaagctctcccgggcgcgggcgggggtcgtgtgcttggaggaagccgcggaacccccagcgtccgtccatggcgtggagccttgggagctggctgggtggctgcctgctggtgtcagcattgggaatggtaccacctcccgaaaatgtcagaatgaattctgttaatttcaagaacattctacagtgggagtcacctgcttttgccaaagggaacctgactttcacagctcagtacctaagttataggatattccaagataaatgcatgaatactaccttgacggaatgtgatttctcaagtctttccaagtatggtgaccacaccttgagagtcagggctgaatttgcagatgagcattcagactgggtaaacatcaccttctgtcctgtggatgacaccattattggaccccctggaatgcaagtagaagtacttgctgattctttacatatgcgtttcttagcccctaaaattgagaatgaatacgaaacttggactatgaagaatgtgtataactcatggacttataatgtgcaatactggaaaaacggtactgatgaaaagtttcaaattactccccagtatgactttgaggtcctcagaaacctggagccatggacaacttattgtgttcaagttcgagggtttcttcctgatcggaacaaagctggggaatggagtgagcctgtctgtgagcaaacaacccatgacgaaacggtcccctcctggatggtggccgtcatcctcatggcctcggtcttcatggtctgcctggcactcctcggctgcttcgccttgctgtggtgcgtttacaagaagacaaagtacgccttctcccctaggaattctcttccacagcacctgaaagagtttttgggccatcctcatcataacacacttctgtttttctcctttccattgtcggatgagaatgatgtttttgacaagctaagtgtcattgcagaagactctgagagcggcaagcagaatcctggtgacagctgcagcctcgggaccccgcctgggcaggggccccaaagctaggctctgagaaggaaacacactcggctgggcacagtgacgtactccatctcacatctgcctcagtgagggatcagggcagcaaacaagggccaagaccatctgagccagccccacatctagaactcccagaccctggacttagccaccagagagctacattttaaaggctgtcttggcaaaaatactccatttgggaactcactgccttataaaggctttcatgatgttttcagaagttggccactgagagtgtaattttcagccttttatatcactaaaataagatcatgttttaattgtgagaaacagggccgagcacagtggctcacgcctgtaataccagcaccttagaggtcgaggcaggcggatcacttgaggtcaggagttcaagaccagcctggccaatatggtgaaacccagtctctactaaaaatacaaaaattagctaggcatgatggcgcatgcctataatcccagctactcgagtgcctgaggcaggagaattgcatgaacccgggaggaggaggaggaggttgcagtgagccgagatagcggcactgcactccagcctgggtgacaaagtgagactccatctcaaaaaaaaaaaaaaaaaaaattgtgagaaacagaaatacttaaaatgaggaataagaatggagatgttacatctggtagatgtaacattctaccagattatggatggactgatctgaaaatcgacctcaactcaagggtggtcagctcaatgctacacagagcacggacttttggattctttgcagtactttgaatttatttttctacctatatatgttttatatgctgctggtgctccattaaagttttactctgtgttgc

SEQ ID NO: 512 - DNA, 6099 bp, Homo Sapiens
  NM_000629
aggcggcgcgtgcgtagaggggcggtgagagctaagaggggcagcgcgtgtgcagaggggcggtgtgacttaggacggggcgatggcggctgagaggagctgcgcgtgcgcgaacatgtaactggtgggatctgcggcggctcccagatgatggtcgtcctcctgggcgcgacgaccctagtgctcgtcgccgtggcgccatgggtgttgtccgcagccgcaggtggaaaaaatctaaaatctcctcaaaaagtagaggtcgacatcatagatgacaactttatcctgaggtggaacaggagcgatgagtctgtcgggaatgtgactttttcattcgattatcaaaaaactgggatggataattggataaaattgtctgggtgtcagaatattactagtaccaaatgcaacttttcttcactcaagctgaatgtttatgaagaaattaaattgcgtataagagcagaaaaagaaaacacttcttcatggtatgaggttgactcatttacaccatttcgcaaagctcagattggtcctccagaagtacatttagaagctgaagataaggcaatagtgatacacatctctcctggaacaaaagatagtgttatgtgggctttggatggtttaagctttacatatagcttagttatctggaaaaactcttcaggtgtagaagaaaggattgaaaatatttattccagacataaaatttataaactctcaccagagactacttattgtctaaaagttaaagcagcactacttacgtcatggaaaattggtgtctatagtccagtacattgtataaagaccacagttgaaaatgaactacctccaccagaaaatatagaagtcagtgtccaaaatcagaactatgttcttaaatgggattatacatatgcaaacatgacctttcaagttcagtggctccacgcctttttaaaaaggaatcctggaaaccatttgtataaatggaaacaaatacctgactgtgaaaatgtcaaaactacccagtgtgtctttcctcaaaacgttttccaaaaaggaatttaccttctccgcgtacaagcatctgatggaaataacacatctttttggtctgaagagataaagtttgatactgaaatacaagctttcctacttcctccagtctttaacattagatcccttagtgattcattccatatctatatcggtgctccaaaacagtctggaaacacgcctgtgatccaggattatccactgatttatgaaattattttttgggaaaacacttcaaatgctgagagaaaaattatcgagaaaaaaactgatgttacagttcctaatttgaaaccactgactgtatattgtgtgaaagccagagcacacaccatggatgaaaagctgaataaaagcagtgtttttagtgacgctgtatgtgagaaaacaaaaccaggaaatacctctaaaatttggcttatagttggaatttgtattgcattatttgctctcccgtttgtcatttatgctgcgaaagtcttcttgagatgcatcaattatgtcttctttccatcacttaaaccttcttccagtatagatgagtatttctctgaacagccattgaagaatcttctgctttcaacttctgaggaacaaatcgaaaaatgtttcataattgaaaatataagcacaattgctacagtagaagaaactaatcaaactgatgaagatcataaaaaatacagttcccaaactagccaagattcaggaaattattctaatgaagatgaaagcgaaagtaaaacaagtgaagaactacagcaggactttgtatgaccagaaatgaactgtgtcaagtataaggtttttcagcaggagttacactgggagcctgaggtcctcaccttcctctcagtaactacagagaggacgtttccctgtttagggaaagaaaaaacatcttcagatcataggtcctaaaaatacgggcaagctcttaactatttaaaaatgaaattacaggcccgggcacggtggctcacacctgtaatcccagcactttgggaggctgaggcaggcagatcatgaggtcaagagatcgagaccagcctggccaacgtggtgaaaccccatctctactaaaaatacaaaaattagccgggtgtggtggcgcgcgcctgttgtcttagctactcaggaggctgaggcaggagaatcgcttgaaaacaggaggtggaggttgcagtgagccgagatcacgccactgcactccagcctggtgacagcgtgagactctttaaaaaaagaaattaaaagagttgagacaaacgtttcctacattcttttccatgtgtaaaatcatgaaaaagcctgtcaccggacttgcattggatgagatgagtcagaccaaaacagtggccacccgtcttcctcctgtgagcctaagtgcagccgtgctagctgcgcaccgtggctaaggatgacgtctgtgttcctgtccatcactgatgctgctggctactgcatgtgccacacctgtctgttcgccattcctaacattctgtttcattcttcctcgggagatatttcaaacatttggtcttttcttttaacactgagggtaggcccttaggaaatttatttaggaaagtctgaacacgttatcacttggttttctggaaagtagcttaccctagaaaacagctgcaaatgccagaaagatgatccctaaaaatgttgagggacttctgttcattcatcccgagaacattggcttccacatcacagtatctacccttacatggtttaggattaaagccaggcaatcttttactatgcattaagacctctgattcaaaacttattagaacagtagcttctgctggaatttgcaatcactgaagtcatagaaaataggtaactatctaattagagaaataattgttgtattttaagatctgagagtgtgtacaagttttagtatacatgccatgccagaagatagtgtatgcaagaagtcttgggaccagaaaatggcaatgataggagactgacatagaagaagaatgcttccctaggaaaaaggtcgctggctttggtgcaagaggaagaagaatgttccactggaagcctgagcacctaatcagctctcagtgatcaacccactcttgttatgggtggtctctgtcactttgaatgccaggctggcttctcgtctagcagtattcagataccccttctgctcagcctgcttggcgttaaaatacaaatcattgaactgagggggaaaaatgtaactaggaagaaaaacccaatttaagaaattacataatgctttccaaaggcacctacaacttagttttaaattacttgctactggggattacccatggatatccttaataggcaggaagtctgggaattctggtggcctctagggcagtgttctcacagcaccgttccgacagggaccagtgaaagaaaagagacaaagttagaacgtgctggggagcggccatttctaaggccagtctggtttaagtagtcatttctgctgaaaaaacagatgatcctggtggaagaaaaggttgaaggcagctgccctcgggagggctgtgatgctcggcacatcctgcctggcacatacacgtgtctgcaggccacaccgtgcatgtccccagacctgccgcctggcttctggagtgcttcaagcagagcatggtgggtcattgaggagacccaggaatctcatctgagaacccactctctgccggagaaccccatggtgacacattttcatctttctgaccagaggctgtttttttttttttttgagacagtctcattctgttgcccaggctggagtgcagtggcttgatctcggctcactgcaacctcgcctcccgggttcaagcaattctctgccgcagcctccagagtagctgggataacaggtgcccaccaccacaccccactaatttttgtatttgtatttttagtagagatggggtttcaccatgttggtcaggctggtcttggactcctgacctcatgctccacccgcttcggcctcccaaagttctgggattacaggtgtgagccaccgtgcacggccggcctgacctttggaaaagccttgtcactttggacgtttgcgtctttgaagaggcgatgggagcatatcatgactgcctgccaccattgcttttcagactaccacaactcaatcatgctgtccaggacttctggccctgtgttcaccactgggaaaacgtacttcagactggatagcctaaaaaggagcaatgcccttgtaggatgtggagaagggaaaatacggacattaacattaaaagacaccagtgaaattgttaggtctctaggaagttggagcacaaggcttcacgctttaagaccatctgtggttttcagtgaacaagcgctgagcaccagcagcagaaaacaacaacaaaaaaacacctcgtttttaccttgtcttctagacatgaaaaggcagttgcattccactctgcattatgttctacatgttgctttatcagtatatgcttagctgtaagtgacaagtattttttctgaacagaagtttacttagaaataccatgcacttgggggtaccaattaaccgcctgaaaattagcatattgatagttcttagagagaccagatataatctaagaatttatatgaaagatttgtatcattagagccagaaataattttatattaatatataatacagattaacattatatataatatgtacctgtgtcacttctgacatgagcctgtaaacatatattcatatatgtacctgcacatgtacccacctgatgtaggtcttattcctttagtatggacttaaagtacttattcatataccttgtaactaaaaattagaacagctccctagaattgtgaacttttaagagtctgactagaaatttgcaacttataaaaaagttacttttaaaaatataagttagggctaggcacagtggctcatgcctataatctcagcacttttgggaggccaagacaggaggatcacttcaggccaggagttcaagatcaaccaacctgggtaacatggccagaccccatctctatttatatatatatatataaaacttagagtttttatcttcccctaaaagaggccgtgatatttgcagcagcctcaaattgctcttaaggggtttaggtgtgcagaagctttcctttccctacccagtaaccatgtgactactaacgtggtatattgatttattttgtttgctgtctgtctcccctgccccactgctggaacagaggctccaagaaaacagggaccttattattcattactgcatccccagtaatgaaagtacttagaaaataattattgaatgaatgaaatctaaactgtgaacctgagggtgtttgtggcagtgtttgttttactgaattgtagaaggacataaccgtgttttcagtgtttctatggaacaaacttgtacattttatttcacttgtgttttgtcttaaaccctactgctggaaacaattttatgtaataagcaatgggcccaaaagtctaggagtttttttgtacttagtgaatttgtatgcaacagagatgctgcagctgatgcctttaaaaggtattcatcatggaagagctgaggcctgtgcttggtgttccagagcccagggttgagcatcctgaaggagccactgcagccgtcactgtccccagagcctgtggagatagagcctgtttgctgctttttcttcccgctcttaagacatggctggagctcagtcttcattgaatgaagtttgctgtggtattgcatagccttgctttcttgaactaaactgtttgcccttcacaagtagttcttctttcaggattagttcgttccaaggaggctcttcagtctcacagataagtagatctctcctgctgtctggacacatttcactcggaaattgaatacaatttgtattcaggctgggaacctgaacacacacttgtgtttttaagcttcccttttttacagtggacaaggacacaaataataaataaatcatccctaatgcccaagaaaaaaa

SEQ ID NO: 513 - DNA, 1401 bp, Homo Sapiens
  NM_000631
ggaggaggagcctctgccagactggagagaagcaggcctgagcctccccaaaggcagctcctggggactcccaggaccacaggctgagacgagacgcagggtggctggaggaagtgagaggtgaactcagcctgggactggctgggcgagactctccacctgctccctgggaccatcgcccaccatggctgtggcccagcagctgcgggccgagagtgactttgaacagcttccggatgatgttgccatctcggccaacattgctgacatcgaggagaagagaggcttcaccagccactttgttttcgtcatcgaggtgaagacaaaaggaggatccaagtacctcatctaccgccgctaccgccagttccatgctttgcagagcaagctggaggagcgcttcgggccagacagcaagagcagtgccctggcctgtaccctgcccacactcccagccaaagtctacgtgggtgtgaaacaggagatcgccgagatgcggatacctgccctcaacgcctacatgaagagcctgctcagcctgccggtctgggtgctgatggatgaggacgtccggatcttcttttaccagtcgccctatgactcagagcaggtgccccaggcactccgccggctccgcccgcgcacccggaaagtcaagagcgtgtccccacagggcaacagcgttgaccgcatggcagctccgagagcagaggctctatttgacttcactggaaacagcaaactggagctgaatttcaaagctggagatgtgatcttcctcctcagtcggatcaacaaagactggctggagggcactgtccggggagccacgggcatcttccctctctccttcgtgaagatcctcaaagacttccctgaggaggacgaccccaccaactggctgcgttgctactactacgaagacaccatcagcaccatcaaggacatcgcggtggaggaagatctcagcagcactcccctattgaaagacctgctggagctcacaaggcgggagttccagagagaggacatagctctgaattaccgggacgctgagggggatctggttcggctgctgtcggatgaggacgtagcgctcatggtgcggcaggctcgtggcctcccctcccagaagcgcctcttcccctggaagctgcacatcacgcagaaggacaactacagggtctacaacacgatgccatgagctgacggtgtccctggagcagtgaggggacaccagcaaaaaccttcagctctcagaggagattgggaccaggaaaacctgggaggatgggcagacttcctgtctttgaggctaatggacccgtggggcttgtaatctgtctctttctactatttacatctgatttaaataaaccattccatctgaaaggggcaaaa

SEQ ID NO: 514 - DNA, 4742 bp, Homo Sapiens
  NM_000632
ttttctgcccttctttgctttggtggcttccttgtggttcctcagtggtgcctgcaacccctggttcacctccttccaggttctggctccttccagccatggctctcagagtccttctgttaacagccttgaccttatgtcatgggttcaacttggacactgaaaacgcaatgaccttccaagagaacgcaaggggcttcgggcagagcgtggtccagcttcagggatccagggtggtggttggagccccccaggagatagtggctgccaaccaaaggggcagcctctaccagtgcgactacagcacaggctcatgcgagcccatccgcctgcaggtccccgtggaggccgtgaacatgtccctgggcctgtccctggcagccaccaccagcccccctcagctgctggcctgtggtcccaccgtgcaccagacttgcagtgagaacacgtatgtgaaagggctctgcttcctgtttggatccaacctacggcagcagccccagaagttcccagaggccctccgagggtgtcctcaagaggatagtgacattgccttcttgattgatggctctggtagcatcatcccacatgactttcggcggatgaaggagtttgtctcaactgtgatggagcaattaaaaaagtccaaaaccttgttctctttgatgcagtactctgaagaattccggattcactttaccttcaaagagttccagaacaaccctaacccaagatcactggtgaagccaataacgcagctgcttgggcggacacacacggccacgggcatccgcaaagtggtacgagagctgtttaacatcaccaacggagcccgaaagaatgcctttaagatcctagttgtcatcacggatggagaaaagtttggcgatcccttgggatatgaggatgtcatccctgaggcagacagagagggagtcattcgctacgtcattggggtgggagatgccttccgcagtgagaaatcccgccaagagcttaataccatcgcatccaagccgcctcgtgatcacgtgttccaggtgaataactttgaggctctgaagaccattcagaaccagcttcgggagaagatctttgcgatcgagggtactcagacaggaagtagcagctcctttgagcatgagatgtctcaggaaggcttcagcgctgccatcacctctaatggccccttgctgagcactgtggggagctatgactgggctggtggagtctttctatatacatcaaaggagaaaagcaccttcatcaacatgaccagagtggattcagacatgaatgatgcttacttgggttatgctgccgccatcatcttacggaaccgggtgcaaagcctggttctgggggcacctcgatatcagcacatcggcctggtagcgatgttcaggcagaacactggcatgtgggagtccaacgctaatgtcaagggcacccagatcggcgcctacttcggggcctccctctgctccgtggacgtggacagcaacggcagcaccgacctggtcctcatcggggccccccattactacgagcagacccgagggggccaggtgtccgtgtgccccttgcccagggggagggctcggtggcagtgtgatgctgttctctacggggagcagggccaaccctggggccgctttggggcagccctaacagtgctgggggacgtaaatggggacaagctgacggacgtggccattggggccccaggagaggaggacaaccggggtgctgtttacctgtttcacggaacctcaggatctggcatcagcccctcccatagccagcggatagcaggctccaagctctctcccaggctccagtattttggtcagtcactgagtgggggccaggacctcacaatggatggactggtagacctgactgtaggagcccaggggcacgtgctgctgctcaggtcccagccagtactgagagtcaaggcaatcatggagttcaatcccagggaagtggcaaggaatgtatttgagtgtaatgatcaggtggtgaaaggcaaggaagccggagaggtcagagtctgcctccatgtccagaagagcacacgggatcggctaagagaaggacagatccagagtgttgtgacttatgacctggctctggactccggccgcccacattcccgcgccgtcttcaatgagacaaagaacagcacacgcagacagacacaggtcttggggctgacccagacttgtgagaccctgaaactacagttgccgaattgcatcgaggacccagtgagccccattgtgctgcgcctgaacttctctctggtgggaacgccattgtctgctttcgggaacctccggccagtgctggcggaggatgctcagagactcttcacagccttgtttccctttgagaagaattgtggcaatgacaacatctgccaggatgacctcagcatcaccttcagtttcatgagcctggactgcctcgtggtgggtgggccccgggagttcaacgtgacagtgactgtgagaaatgatggtgaggactcctacaggacacaggtcaccttcttcttcccgcttgacctgtcctaccggaaggtgtccacgctccagaaccagcgctcacagcgatcctggcgcctggcctgtgagtctgcctcctccaccgaagtgtctggggccttgaagagcaccagctgcagcataaaccaccccatcttcccggaaaactcagaggtcacctttaatatcacgtttgatgtagactctaaggcttcccttggaaacaaactgctcctcaaggccaatgtgaccagtgagaacaacatgcccagaaccaacaaaaccgaattccaactggagctgccggtgaaatatgctgtctacatggtggtcaccagccatggggtctccactaaatatctcaacttcacggcctcagagaataccagtcgggtcatgcagcatcaatatcaggtcagcaacctggggcagaggagcctccccatcagcctggtgttcttggtgcccgtccggctgaaccagactgtcatatgggaccgcccccaggtcaccttctccgagaacctctcgagtacgtgccacaccaaggagcgcttgccctctcactccgactttctggctgagcttcggaaggcccccgtggtgaactgctccatcgctgtctgccagagaatccagtgtgacatcccgttctttggcatccaggaagaattcaatgctaccctcaaaggcaacctctcgtttgactggtacatcaagacctcgcataaccacctcctgatcgtgagcacagctgagatcttgtttaacgattccgtgttcaccctgctgccgggacagggggcgtttgtgaggtcccagacggagaccaaagtggagccgttcgaggtccccaaccccctgccgctcatcgtgggcagctctgtcgggggactgctgctcctggccctcatcaccgccgcgctgtacaagctcggcttcttcaagcggcaatacaaggacatgatgagtgaagggggtcccccgggggccgaaccccagtagcggctccttcccgacagagctgcctctcggtggccagcaggactctgcccagaccacacgtagcccccaggctgctggacacgtcggacagcgaagtatccccgacaggacgggcttgggcttccatttgtgtgtgtgcaagtgtgtatgtgcgtgtgtgcaagtgtctgtgtgcaagtgtgtgcacatgtgtgcgtgtgcgtgcatgtgcacttgcacgcccatgtgtgagtgtgtgcaagtatgtgagtgtgtccaagtgtgtgtgcgtgtgtccatgtgtgtgcaagtgtgtgcatgtgtgcgagtgtgtgcatgtgtgtgctcaggggcgtgtggctcacgtgtgtgactcagatgtctctggcgtgtgggtaggtgacggcagcgtagcctctccggcagaagggaactgcctgggctcccttgtgcgtgggtgaagccgctgctgggttttcctccgggagaggggacggtcaatcctgtgggtgaagacagagggaaacacagcagcttctctccactgaaagaagtgggacttcccgtcgcctgcgagcctgcggcctgctggagcctgcgcagcttggatggagactccatgagaagccgtgggtggaaccaggaacctcctccacaccagcgctgatgcccaataaagatgcccactgaggaatgatgaagcttcctttctggattcatttattatttcaatgtgactttaattttttggatggataagcttgtctatggtacaaaaatcacaaggcattcaagtgtacagtgaaaagtctccctttccagatattcaagtcacctccttaaaggtagtcaagattgtgttttgaggtttccttcagacagattccaggcgatgtgcaagtgtatgcacgtgtgcacacacaccacacatacacacacacaagcttttttacacaaatggtagcatactttatattggtctgtatcttgctttttttcaccaatatttctcagacatcggttcatattaagacataaattactttttcattcttttataccgctgcatagtattccattgtgtgagtgtaccataatgtatttaaccagtcttcttttgatatactattttcattctcttgttattgcatcaatgctgagttaataaatcaaatatatgtcatttttgcatatatgtaaggataa

SEQ ID NO: 515 - DNA, 6492 bp, Homo Sapiens
  NM_000633
tttctgtgaagcagaagtctgggaatcgatctggaaatcctcctaatttttactccctctccccgcgactcctgattcattgggaagtttcaaatcagctataactggagagtgctgaagattgatgggatcgttgccttatgcatttgttttggttttacaaaaaggaaacttgacagaggatcatgctgtacttaaaaaatacaacatcacagaggaagtagactgatattaacaatacttactaataataacgtgcctcatgaaataaagatccgaaaggaattggaataaaaatttcctgcatctcatgccaagggggaaacaccagaatcaagtgttccgcgtgattgaagacaccccctcgtccaagaatgcaaagcacatccaataaaatagctggattataactcctcttctttctctgggggccgtggggtgggagctggggcgagaggtgccgttggcccccgttgcttttcctctgggaaggatggcgcacgctgggagaacagggtacgataaccgggagatagtgatgaagtacatccattataagctgtcgcagaggggctacgagtgggatgcgggagatgtgggcgccgcgcccccgggggccgcccccgcaccgggcatcttctcctcccagcccgggcacacgccccatccagccgcatcccgggacccggtcgccaggacctcgccgctgcagaccccggctgcccccggcgccgccgcggggcctgcgctcagcccggtgccacctgtggtccacctgaccctccgccaggccggcgacgacttctcccgccgctaccgccgcgacttcgccgagatgtccagccagctgcacctgacgcccttcaccgcgcggggacgctttgccacggtggtggaggagctcttcagggacggggtgaactgggggaggattgtggccttctttgagttcggtggggtcatgtgtgtggagagcgtcaaccgggagatgtcgcccctggtggacaacatcgccctgtggatgactgagtacctgaaccggcacctgcacacctggatccaggataacggaggctgggatgcctttgtggaactgtacggccccagcatgcggcctctgtttgatttctcctggctgtctctgaagactctgctcagtttggccctggtgggagcttgcatcaccctgggtgcctatctgggccacaagtgaagtcaacatgcctgccccaaacaaatatgcaaaaggttcactaaagcagtagaaataatatgcattgtcagtgatgtaccatgaaacaaagctgcaggctgtttaagaaaaaataacacacatataaacatcacacacacagacagacacacacacacacaacaattaacagtcttcaggcaaaacgtcgaatcagctatttactgccaaagggaaatatcatttattttttacattattaagaaaaaaagatttatttatttaagacagtcccatcaaaactcctgtctttggaaatccgaccactaattgccaagcaccgcttcgtgtggctccacctggatgttctgtgcctgtaaacatagattcgctttccatgttgttggccggatcaccatctgaagagcagacggatggaaaaaggacctgatcattggggaagctggctttctggctgctggaggctggggagaaggtgttcattcacttgcatttctttgccctgggggctgtgatattaacagagggagggttcctgtggggggaagtccatgcctccctggcctgaagaagagactctttgcatatgactcacatgatgcatacctggtgggaggaaaagagttgggaacttcagatggacctagtacccactgagatttccacgccgaaggacagcgatgggaaaaatgcccttaaatcataggaaagtatttttttaagctaccaattgtgccgagaaaagcattttagcaatttatacaatatcatccagtaccttaagccctgattgtgtatattcatatattttggatacgcaccccccaactcccaatactggctctgtctgagtaagaaacagaatcctctggaacttgaggaagtgaacatttcggtgacttccgcatcaggaaggctagagttacccagagcatcaggccgccacaagtgcctgcttttaggagaccgaagtccgcagaacctgcctgtgtcccagcttggaggcctggtcctggaactgagccggggccctcactggcctcctccagggatgatcaacagggcagtgtggtctccgaatgtctggaagctgatggagctcagaattccactgtcaagaaagagcagtagaggggtgtggctgggcctgtcaccctggggccctccaggtaggcccgttttcacgtggagcatgggagccacgacccttcttaagacatgtatcactgtagagggaaggaacagaggccctgggcccttcctatcagaaggacatggtgaaggctgggaacgtgaggagaggcaatggccacggcccattttggctgtagcacatggcacgttggctgtgtggccttggcccacctgtgagtttaaagcaaggctttaaatgactttggagagggtcacaaatcctaaaagaagcattgaagtgaggtgtcatggattaattgacccctgtctatggaattacatgtaaaacattatcttgtcactgtagtttggttttatttgaaaacctgacaaaaaaaaagttccaggtgtggaatatgggggttatctgtacatcctggggcattaaaaaaaaaatcaatggtggggaactataaagaagtaacaaaagaagtgacatcttcagcaaataaactaggaaatttttttttcttccagtttagaatcagccttgaaacattgatggaataactctgtggcattattgcattatataccatttatctgtattaactttggaatgtactctgttcaatgtttaatgctgtggttgatatttcgaaagctgctttaaaaaaatacatgcatctcagcgtttttttgtttttaattgtatttagttatggcctatacactatttgtgagcaaaggtgatcgttttctgtttgagatttttatctcttgattcttcaaaagcattctgagaaggtgagataagccctgagtctcagctacctaagaaaaacctggatgtcactggccactgaggagctttgtttcaaccaagtcatgtgcatttccacgtcaacagaattgtttattgtgacagttatatctgttgtccctttgaccttgtttcttgaaggtttcctcgtccctgggcaattccgcatttaattcatggtattcaggattacatgcatgtttggttaaacccatgagattcattcagttaaaaatccagatggcaaatgaccagcagattcaaatctatggtggtttgacctttagagagttgctttacgtggcctgtttcaacacagacccacccagagccctcctgccctccttccgcgggggctttctcatggctgtccttcagggtcttcctgaaatgcagtggtgcttacgctccaccaagaaagcaggaaacctgtggtatgaagccagacctccccggcgggcctcagggaacagaatgatcagacctttgaatgattctaatttttaagcaaaatattattttatgaaaggtttacattgtcaaagtgatgaatatggaatatccaatcctgtgctgctatcctgccaaaatcattttaatggagtcagtttgcagtatgctccacgtggtaagatcctccaagctgctttagaagtaacaatgaagaacgtggacgtttttaatataaagcctgttttgtcttttgttgttgttcaaacgggattcacagagtatttgaaaaatgtatatatattaagaggtcacgggggctaattgctggctggctgccttttgctgtggggttttgttacctggttttaataacagtaaatgtgcccagcctcttggccccagaactgtacagtattgtggctgcacttgctctaagagtagttgatgttgcattttccttattgttaaaaacatgttagaagcaatgaatgtatataaaagcctcaactagtcatttttttctcctcttcttttttttcattatatctaattattttgcagttgggcaacagagaaccatccctattttgtattgaagagggattcacatctgcatcttaactgctctttatgaatgaaaaaacagtcctctgtatgtactcctctttacactggccagggtcagagttaaatagagtatatgcactttccaaattggggacaagggctctaaaaaaagccccaaaaggagaagaacatctgagaacctcctcggccctcccagtccctcgctgcacaaatactccgcaagagaggccagaatgacagctgacagggtctatggccatcgggtcgtctccgaagatttggcaggggcagaaaactctggcaggcttaagatttggaataaagtcacagaattaaggaagcacctcaatttagttcaaacaagacgccaacattctctccacagctcacttacctctctgtgttcagatgtggccttccatttatatgtgatctttgttttattagtaaatgcttatcatctaaagatgtagctctggcccagtgggaaaaattaggaagtgattataaatcgagaggagttataataatcaagattaaatgtaaataatcagggcaatcccaacacatgtctagctttcacctccaggatctattgagtgaacagaattgcaaatagtctctatttgtaattgaacttatcctaaaacaaatagtttataaatgtgaacttaaactctaattaattccaactgtacttttaaggcagtggctgtttttagactttcttatcacttatagttagtaatgtacacctactctatcagagaaaaacaggaaaggctcgaaatacaagccattctaaggaaattagggagtcagttgaaattctattctgatcttattctgtggtgtcttttgcagcccagacaaatgtggttacacactttttaagaaatacaattctacattgtcaagcttatgaaggttccaatcagatctttattgttattcaatttggatctttcagggattttttttttaaattattatgggacaaaggacatttgttggaggggtgggagggaggaagaatttttaaatgtaaaacattcccaagtttggatcagggagttggaagttttcagaataaccagaactaagggtatgaaggacctgtattggggtcgatgtgatgcctctgcgaagaaccttgtgtgacaaatgagaaacattttgaagtttgtggtacgacctttagattccagagacatcagcatggctcaaagtgcagctccgtttggcagtgcaatggtataaatttcaagctggatatgtctaatgggtatttaaacaataaatgtgcagttttaactaacaggatatttaatgacaaccttctggttggtagggacatctgtttctaaatgtttattatgtacaatacagaaaaaaattttataaaattaagcaatgtgaaactgaattggagagtgataatacaagtcctttagtcttacccagtgaatcattctgttccatgtctttggacaaccatgaccttggacaatcatgaaatatgcatctcactggatgcaaagaaaatcagatggagcatgaatggtactgtaccggttcatctggactgccccagaaaaataacttcaagcaaacatcctatcaacaacaaggttgttctgcataccaagctgagcacagaagatgggaacactggtggaggatggaaaggctcgctcaatcaagaaaattctgagactattaataaataagactgtagtgtagatactgagtaaatccatgcacctaaaccttttggaaaatctgccgtgggccctccagatagctcatttcattaagtttttccctccaaggtagaatttgcaagagtgacagtggattgcatttcttttggggaagctttcttttggtggttttgtttattataccttcttaagttttcaaccaaggtttgcttttgttttgagttactggggttatttttgttttaaataaaaataagtgtacaataagtgtttttgtattgaaagcttttgttatcaagattttcatacttttaccttccatggctctttttaagattgatacttttaagaggtggctgatattctgcaacactgtacacataaaaaatacggtaaggatactttacatggttaaggtaaagtaagtctccagttggccaccattagctataatggcactttgtttgtgttgttggaaaaagtcacattgccattaaactttccttgtctgtctagttaatattgtgaagaaaaataaagtacagtgtgagatactg

SEQ ID NO: 516 - DNA, 2502 bp, Homo Sapiens
  NM_000634
tattcatcaagtgccctctagctgttaagtcactctgatctctgactgcagctcctactgttggacacacctggccggtgcttcagttagatcaaaccattgctgaaactgaagaggacatgtcaaatattacagatccacagatgtgggattttgatgatctaaatttcactggcatgccacctgcagatgaagattacagcccctgtatgctagaaactgagacactcaacaagtatgttgtgatcatcgcctatgccctagtgttcctgctgagcctgctgggaaactccctggtgatgctggtcatcttatacagcagggtcggccgctccgtcactgatgtctacctgctgaacctggccttggccgacctactctttgccctgaccttgcccatctgggccgcctccaaggtgaatggctggatttttggcacattcctgtgcaaggtggtctcactcctgaaggaagtcaacttctacagtggcatcctgctgttggcctgcatcagtgtggaccgttacctggccattgtccatgccacacgcacactgacccagaagcgtcacttggtcaagtttgtttgtcttggctgctggggactgtctatgaatctgtccctgcccttcttccttttccgccaggcttaccatccaaacaattccagtccagtttgctatgaggtcctgggaaatgacacagcaaaatggcggatggtgttgcggatcctgcctcacacctttggcttcatcgtgccgctgtttgtcatgctgttctgctatggattcaccctgcgtacactgtttaaggcccacatggggcagaagcaccgagccatgagggtcatctttgctgtcgtcctcatcttcctgctttgctggctgccctacaacctggtcctgctggcagacaccctcatgaggacccaggtgatccaggagagctgtgagcgccgcaacaacatcggccgggccctggatgccactgagattctgggatttctccatagctgcctcaaccccatcatctacgccttcatcggccaaaattttcgccatggattcctcaagatcctggctatgcatggcctggtcagcaaggagttcttggcacgtcatcgtgttacctcctacacttcttcgtctgtcaatgtctcttccaacctctgaaaaccatcgatgaaggaatatctcttctcagaaggaaagaataaccaacaccctgaggttgtgtgtggaaggtgatctggctctggacaggcactatctgggttttggggggacgctataggatgtggggaagttaggaactggtgtcttcaggggccacaccaaccttctgaggagctgttgaggtacctccaaggaccggcctttgcacctccatggaaacgaagcaccatcattcccgttgaacgtcacatctttaacccactaactggctaattagcatggccacatctgagccccgaatctgacattagatgagagaacagggctgaagctgtgtcctcatgagggctggatgctctcgttgaccctcacaggagcatctcctcaactctgagtgttaagcgttgagccaccaagctggtggctctgtgtgctctgatccgagctcaggggggtggttttcccatctcaggtgtgttgcagtgtctgctggagacattgaggcaggcactgccaaaacatcaacctgccagctggccttgtgaggagctggaaacacatgttccccttgggggtggtggatgaacaaagagaaagagggtttggaagccagatctatgccacaagaaccccctttacccccatgaccaacatcgcagacacatgtgctggccacctgctgagccccaagtggaacgagacaagcagcccttagcccttcccctctgcagcttccaggctggcgtgcagcatcagcatccctagaaagccatgtgcagccaccagtccattgggcaggcagatgttcctaataaagcttctgttccgtgcttgtccctgtggaagtatcttggttgtgacagagtcaagggtgtgtgcagcattgttggctgttcctgcagtagaatgggggcagcacctcctaagaaggcacctctctgggttgaagggcagtgttccctggggctttaactcctgctagaacagtctcttgaggcacagaaactcctgttcatgcccatacccctggccaaggaagatccctttgtccacaagtaaaaggaaatgctcctccagggagtctcagcttcaccctgaggtgagcatcatcttctgggttaggccttgcctaggcatagccctgcctcaagctatgtgagctcaccagtccctccccaaatgctttccatgagttgcagttttttcctagtctgttttccctccttggagacagggccctgtcggtttattcactgtatgtccttggtgcctggagcctactaaatgctcaataaataatgatcacaggaaaaaaaaaaaaaaaaaa

SEQ ID NO: 517 - DNA, 4114 bp, Homo Sapiens
  NM_000635
gcgagcgtgggcgggccgttaggaaggtggggcgcggagcctggtaaccgttgccggtaacaacgccccgccccgtcgggcgggcgggctgcgcgaggctggctggcggcgggagccggaggaggagcggccgccgccgccaccgccgccgccatagagactgtagccgtggagactgttacttaccaacggggaccaacacgcagcagccgctgccgccgccgcgggagccgctgcccgaactcccggcccgaactccagacctgagcatgcagaattccgagggtggagcggattcgccagcgtccgtggctctgcgtccctcggcggcagccccgcctgtgccagcctccccgcagagggtgttggtccaggcagccagctccaatcccaaaggggcccagatgcagccgatctccctccccagagttcagcaggtaccccagcaggtgcagccggtgcagcacgtgtatcctgcccaggtgcagtacgtggaagggggagacgccgtctacaccaatggagccatacgaacagcctacacctacaaccccgagcctcagatgtacgcccccagcagcacggcttcttacttcgaggccccaggcggtgcccaggtgaccgtggcagcctcgtccccgccagcggtcccctcccacagcatggtgggcatcaccatggatgtcggggggagccccatcgtctccagcgcgggagcctatctcatccacggggggatggacagcaccagacactccctggcccacacctcccgctcatcgcccgccacgcttgaaatggcgattgaaaacctccaaaaaagcgaaggaatcacatcacacaaaagcggtttactcaacagccatctccagtggctgttggataattatgaaacagcggaaggtgtgagtctccccagaagttctctttacaaccactaccttcggcactgccaggagcacaagctagacccagtgaacgccgcctccttcgggaaactgatccgttctgtgtttatggggctgagaacgcggcggctgggcaccaggggcaactcgaagtaccattactatgggattcgtctgaagccggactcaccactgaaccggctgcaggaggacacgcagtacatggccatgcggcagcagcccatgcaccagaagcccaggtaccggccagcccagaagacggacagcctcggggacagcggctcccacagcggcctgcacagcactccggaacagaccatggccgtgcagagccagcaccaccagcagtacatagatgtctcccacgtcttccccgagttcccagcgcccgacctgggcagcttcctgctgcaggacggcgtcacactgcacgacgtcaaggccctgcagctggtgtacagacggcactgcgaggcaactgtagatgtggtgatgaacctccagttccactacatcgagaagctgtggctctccttctggaactctaaggcctcctccagcgacggccccacctctcttcctgccagtgacgaagaccccgagggcgccgtcctgcccaaggacaagcttatctccctgtgtcagtgcgaccccatcctcaggtggatgaggagctgcgaccacatcctctaccaggcgctggtggagattctcatccccgacgtgctgaggccggtccccagtaccttgacacaggccatccgtaactttgccaagagcttggaaggctggttgacaaatgccatgagtgacttcccacaacaggtcatccagaccaaggtgggcgtcgtcagtgccttcgcccagacgctgcggcgctacacgtccctcaaccacctggcgcaggcggcccgggcggtgctgcagaacacgtcccagatcaaccagatgctcagcgacctcaaccgcgtggactttgccaacgtgcaggagcaggcctcgtgggtgtgccagtgcgaggagagtgtggtgcagcggctggagcaggatttcaagctgaccctgcagcagcagagctccctggaccagtgggccagctggctggacagtgtggtcacccaggtcctgaagcagcatgccggcagccccagcttccccaaggccgcccggcagttcttgctgaaatggtccttttacagctccatggtgatccgggacctgaccctgcgcagcgctgccagcttcggctccttccacctcatccgcctgctctacgacgagtacatgttctacctggtggagcaccgcgtcgcggaggccaccggagagacgccgatcgctgtgatgggagagttcaacgatctcgcctctctgtcgctgacgctgctcgacaaagatgacatgggcgatgagcagcgtggcagcgaggcgggcccagacgcccgcagcctgggtgagcccctggtaaagcgggagcgcagtgaccccaaccactccctgcagggcatctagcagccccggccggcgcctcctcgaggttccaaaagatgccgcctggtcactctgggaacctggatttcaccggctccaccaaattagtgcctcttagatgatgtgatgtttactttgactcaagcgggggctcccggggtcagtgttcaagaaggaaagcagttgttgaagctacagaagcccaggccagggctcccactggctgtagctgtgctctgggtccccaggtccctgcgcagccaccagggccccaccagaccatgggttccttattctggacaaaccctcctctgctggaaccctggactttggccccagtccctttaagagctgaaagggctgtgctgagagcactggcctctgcactcaactggaaccaattttcaccatgattttaaaaattaaaaaaacctggcagagcccgactagaaagggacggcctctcccctcctacctgccaccgctggggaggcacagagctcgccagcgtccctggagtcccctcaggaatggaaagtggagtgcccttgtctggtagcaccatgtgggagggacccagctgggcgcagcgccctgtggccttttagatccagacctccctgccggatgccccgaggcgggaggccggctgtgctgcaggaacccatctccagatgccaaaggacttgaggggcagctgacaatcgctgtgtcccggcagatccgcagctcgaaaaagaacaagccacagaaacgggctcgctcgtgccaggacacagcagtgtctttcaaaaaatcaaaaccagaagttttatcagcagcaggaaggatgtgggactctgtccaagttcaccgtcaccatcaagccactggctgtggaaggagtttgtccaacagggtcagtgtcacagccacaacttcagaaagcagccatcccgcgtgtcgtccaaacagcagtgcctgcgtcccgctccacggagtcttccagaacacctccctctgaactaatcccggagcaccccacccccagcgagtcccacctggacctcttcaaagtcaaaactcttctctcgggacaaacaaatattcgggactttcgaagccctgaacttgagacaccaagtttgtctccatggaaacacgtagccgctgcagttggacagctgcgtgctggagttctgtccccaaaccaactgcagagaagaaagacgagcctcggcccaggacgcgatttctaacgaaatgcaatagttttctctttttggaaaaatgtttataccaatagttttgtgcgctaattgttattagaacgtttcttatgaatgtgtacattgcagtatattcagtcccaaatgttttgttctcattcacacagaaggtactaatgtcagctcacgtggcctttaaaaacctacttccccgcccgcaggagctcagagcatcgctgggcctgcgccagagtgaggggtgcaggaagacaaagacgcgtgctcactttagaaacgaaaagctgggaataatcacactgtttgtctggtcgtatagcccaaaccttagttgaaatcagacagaaagaatgtctttaaaatatacatctcctctccttggagacactgaagctcacagttaacggattgtaatgcccggcttttcctcactcctggtaaccaatacaagctggtttctgccttaaa

SEQ ID NO: 518 - DNA, 3174 bp, Homo Sapiens
  NM_000637
tcctcctgggtcttgcctagcggcgggcgcatgcttagtcaccgtgaggctgcgcttgcccggggcccgcgcccccctaccccggggaccgcccccgggccgcccgccccacttggcgcgccacttccgcgtgcatggccctgctgccccgagccctgagcgccggcgcgggaccgagctggcggcgggcggcgcgcgccttccgaggcttcctgctgcttctgcccgagcccgcggccctcacgcgcgccctctcccgtgccatggcctgcaggcaggagccgcagccgcagggcccgccgcccgctgctggcgccgtggcctcctatgactacctggtgatcgggggcggctcgggcgggctggccagcgcgcgcagggcggccgagctgggtgccagggccgccgtggtggagagccacaagctgggtggcacttgcgtgaatgttggatgtgtacccaaaaaggtaatgtggaacacagctgtccactctgaattcatgcatgatcatgctgattatggctttccaagttgtgagggtaaattcaattggcgtgttattaaggaaaagcgggatgcctatgtgagccgcctgaatgccatctatcaaaacaatctcaccaagtcccatatagaaatcatccgtggccatgcagccttcacgagtgatcccaagcccacaatagaggtcagtgggaaaaagtacaccgccccacacatcctgatcgccacaggtggtatgccctccacccctcatgagagccagatccccggtgccagcttaggaataaccagcgatggattttttcagctggaagaattgcccggccgcagcgtcattgttggtgcaggttacattgctgtggagatggcagggatcctgtcagccctgggttctaagacatcactgatgatacggcatgataaggtacttagaagttttgattcaatgatcagcaccaactgcacggaggagctggagaacgctggcgtggaggtgctgaagttctcccaggtcaaggaggttaaaaagactttgtcgggcttggaagtcagcatggttactgcagttcccggtaggctaccagtcatgaccatgattccagatgttgactgcctgctctgggccattgggcgggtcccgaataccaaggacctgagtttaaacaaactggggattcaaaccgatgacaagggtcatatcatcgtagacgaattccagaataccaacgtcaaaggcatctatgcagttggggatgtatgtggaaaagctcttcttactccagttgcaatagctgctggccgaaaacttgcccatcgactttttgaatataaggaagattccaaattagattataacaacatcccaactgtggtcttcagccacccccctattgggacagtgggactcacggaagatgaagccattcataaatatggaatagaaaatgtgaagacctattcaacgagctttaccccgatgtatcacgcagttaccaaaaggaaaacaaaatgtgtgatgaaaatggtctgtgctaacaaggaagaaaaggtggttgggatccatatgcagggacttgggtgtgatgaaatgctgcagggttttgctgttgcagtgaagatgggagcaacgaaggcagactttgacaacacagtcgccattcaccctacctcttcagaagagctggtcacacttcgttgagaaccaggagacacgtgtggcgggcagtgggacccatagatcttctgaaatgaaacaaataatcacattgacttactgtttgagttttatgtatttctttattttaatcaggatcttctgatagtggaaatttttagtacataatagaacttatttatggagttagaaatttgtagtgttatccaggattgattttcatttgatcacatctcacagtaattaatattttcaagttttttttttattaacagctctgtgctagttttttttttctgttttagcctcatcccaaatataaagctttgtgaagtacaattaacttaatgtacttgaatgaatagaacttgctactttttttttttttttttttgagacagagttttgctctcattgcccaggctggagtgcggtggtgctatttcagctcaccacaacctctgcctcctgggttcaagtgattctcctgccttagcctcccgaatagctggaattacaggcacgcaccaccatgcctgactaattttgtatttttagtagacatggggtttctccatgttggtcaggctggtctcaaactcccaccttcaggtgatccgcccacctcggcctcctgaggtgctgagattacaggcgtgagccactgtgccagcttgctaattttcacagaagttgatggcaattcttcacatgtaaacagtgccagtgcacagaacctttatatattttttgaagccagtactgtgctctgcatataacaaagctgcttcaaggatgagacctttttctaaaagcatgtaatgtgagaagccggcctgccttattttcttttttcttttttaatgattaaaaatagtttgtggcaaggcacggtggctcaggcctgtaattctagcactttgggaggccgaggcaggaggattacttgagcctacaagtttgaggccagcatgcacagcatagcaagactgcatctctacagagagtaaaaaaaattacccgagtgtggtgatgtgcatctgtaatctcagctacttgggaggctgaggtgagaggatcacttgagcttgggtgaggtgaggctgcagtgagtcctgatcatgctgctgcactcaatcttggacaacagagcaagaccctgtctcaaaaaaaaaaaaaaaaaatatatatatatatatatattatttttatgaggtgaagtgcatcaaacttgggaaagatttgaggaggctgggaacctcctggaaaaccactccttgaagaaagatatgagagacatttagaagtgattcctgctttcagaaggaggtggattcaaatacatcaaaagtcccttcctctgctaagtgtttatagttcaatgaataatttcaatatttgtatgtgttcttgtcattttatttttttctgaaaaacttccaaaaatttgaaaataaaattacagccttttcttcttataaaaaaaaaaaaaaaa

SEQ ID NO: 519 - DNA, 1909 bp, Homo Sapiens
  NM_000639
gaggtgtttcccttagctatggaaactctataagagagatccagcttgcctcctcttgagcagtcagcaacagggtcccgtccttgacacctcagcctctacaggactgagaagaagtaaaaccgtttgctggggctggcctgactcaccagctgccatgcagcagcccttcaattacccatatccccagatctactgggtggacagcagtgccagctctccctgggcccctccaggcacagttcttccctgtccaacctctgtgcccagaaggcctggtcaaaggaggccaccaccaccaccgccaccgccaccactaccacctccgccgccgccgccaccactgcctccactaccgctgccacccctgaagaagagagggaaccacagcacaggcctgtgtctccttgtgatgtttttcatggttctggttgccttggtaggattgggcctggggatgtttcagctcttccacctacagaaggagctggcagaactccgagagtctaccagccagatgcacacagcatcatctttggagaagcaaataggccaccccagtccaccccctgaaaaaaaggagctgaggaaagtggcccatttaacaggcaagtccaactcaaggtccatgcctctggaatgggaagacacctatggaattgtcctgctttctggagtgaagtataagaagggtggccttgtgatcaatgaaactgggctgtactttgtatattccaaagtatacttccggggtcaatcttgcaacaacctgcccctgagccacaaggtctacatgaggaactctaagtatccccaggatctggtgatgatggaggggaagatgatgagctactgcactactgggcagatgtgggcccgcagcagctacctgggggcagtgttcaatcttaccagtgctgatcatttatatgtcaacgtatctgagctctctctggtcaattttgaggaatctcagacgtttttcggcttatataagctctaagagaagcactttgggattctttccattatgattctttgttacaggcaccgagaatgttgtattcagtgagggtcttcttacatgcatttgaggtcaagtaagaagacatgaaccaagtggaccttgagaccacagggttcaaaatgtctgtagctcctcaactcacctaatgtttatgagccagacaaatggaggaatatgacggaagaacatagaactctgggctgccatgtgaagagggagaagcatgaaaaagcagctaccaggtgttctacactcatcttagtgcctgagagtatttaggcagattgaaaaggacaccttttaactcacctctcaaggtgggccttgctacctcaagggggactgtctttcagatacatggttgtgacctgaggatttaagggatggaaaaggaagactagaggcttgcataataagctaaagaggctgaaagaggccaatgccccactggcagcatcttcacttctaaatgcatatcctgagccatcggtgaaactaacagataagcaagagagatgttttggggactcatttcattcctaacacagcatgtgtatttccagtgcaattgtaggggtgtgtgtgtgtgtgtgtgtgtgtgtgtgtgtatgactaaagagagaatgtagatattgtgaagtacatattaggaaaatatgggttgcatttggtcaagattttgaatgcttcctgacaatcaactctaatagtgcttaaaaatcattgattgtcagctactaatgatgttttcctataatataataaatatttatgtagatgtgcatttttgtgaaatgaaaacatgtaataaaaagtatatgttaggatacaaaaaaaaaaaaaaaaaaaaaaaaaaaaaaaaaaaaaaaaaaaaaaaaaaaa

SEQ ID NO: 520 - DNA, 7371 bp, Homo Sapiens
  NM_000642
cccggaagtgggccagaggtacggtccgctcccacctggggcgagtgcgcgcacggccaggttgggtaccgggtgcgcccaggaacccgcgcgaggcgaagtcgctgagactctgcctgcttctcacccagctgcctcggcgctgccccggtcgctcgccgcccctccctttgcccttcacggcgcccggccctccttgggctgcggcttctgtgcgaggctgggcagccagcccttccccttctgtttctccccgtcccctccccccgaccgtagcaccagagtcgcgggtcctgcagtgccccagaagccgcacgtataactccctcggcgggtaactcattcgactgtggagttcttttaattcttatgaaagatttcaaatcctctagaagccaaaatgggacacagtaaacagattcgaattttacttctgaacgaaatggagaaactggaaaagaccctcttcagacttgaacaagggtatgagctacagttccgattaggcccaactttacagggaaaagcagttaccgtgtatacaaattacccatttcctggagaaacatttaatagagaaaaattccgttctctggattgggaaaatccaacagaaagagaagatgattctgataaatactgtaaacttaatctgcaacaatctggttcatttcagtattatttccttcaaggaaatgagaaaagtggtggaggttacatagttgtggaccccattttacgtgttggtgctgataatcatgtgctacccttggactgtgttactcttcagacatttttagctaagtgtttgggaccttttgatgaatgggaaagcagacttagggttgcaaaagaatcaggctacaacatgattcattttaccccattgcagactcttggactatctaggtcatgctactcccttgccaatcagttagaattaaatcctgacttttcaagacctaatagaaagtatacctggaatgatgttggacagctagtggaaaaattaaaaaaggaatggaatgttatttgtattactgatgttgtctacaatcatactgctgctaatagtaaatggatccaggaacatccagaatgtgcctataatcttgtgaattctccacacttaaaacctgcctgggtcttagacagagcactttggcgtttctcctgtgatgttgcagaagggaaatacaaagaaaagggaatacctgctttgattgaaaatgatcaccatatgaattccatccgaaaaataatttgggaggatatttttccaaagcttaaactctgggaatttttccaagtagatgtcaacaaagcggttgagcaatttagaagacttcttacacaagaaaataggcgagtaaccaagtctgatccaaaccaacaccttacgattattcaagatcctgaatacagacggtttggctgtactgtagatatgaacattgcactaacgactttcataccacatgacaaggggccagcagcaattgaagaatgctgtaattggtttcataaaagaatggaggaattaaattcagagaagcatcgactcattaactatcatcaggaacaggcagttaattgccttttgggaaatgtgttttatgaacgactggctggccatggtccaaaactaggacctgtcactagaaagcatcctttagttaccaggtattttactttcccatttgaagagatagacttctccatggaagaatctatgattcatctgccaaataaagcttgttttctgatggcacacaatggatgggtaatgggagatgatcctcttcgaaactttgctgaaccgggttcagaagtttacctaaggagagaacttatttgctggggagacagtgttaaattacgctatgggaataaaccagaggactgtccttatctctgggcacacatgaaaaaatacactgaaataactgcaacttatttccagggagtacgtcttgataactgccactcaacacctcttcacgtagctgagtacatgttggatgctgctaggaatttgcaacccaatttatatgtagtagctgaactgttcacaggaagtgaagatctggacaatgtctttgttactagactgggcattagttccttaataagagaggcaatgagtgcatataatagtcatgaagagggcagattagtttaccgatatggaggagaacctgttggatcctttgttcagccctgtttgaggcctttaatgccagctattgcacatgccctgtttatggatattacgcatgataatgagtgtcctattgtgcatagatcagcgtatgatgctcttccaagtactacaattgtttctatggcatgttgtgctagtggaagtacaagaggctatgatgaattagtgcctcatcagatttcagtggtttctgaagaacggttttacactaagtggaatcctgaagcattgccttcaaacacaggtgaagttaatttccaaagcggcattattgcagccaggtgtgctatcagtaaacttcatcaggagcttggagccaagggttttattcaggtgtatgtggatcaagttgatgaagacatagtggcagtaacaagacactcacctagcatccatcagtctgttgtggctgtatctagaactgctttcaggaatcccaagacttcattttacagcaaggaagtgcctcaaatgtgcatccctggcaaaattgaagaagtagttcttgaagctagaactattgagagaaacacgaaaccttataggaaggatgagaattcaatcaatggaacaccagatatcacagtagaaattagagaacatattcagcttaatgaaagtaaaattgttaaacaagctggagttgccacaaaagggcccaatgaatatattcaagaaatagaatttgaaaacttgtctccaggaagtgttattatattcagagttagtcttgatccacatgcacaagtcgctgttggaattcttcgaaatcatctgacacaattcagtcctcactttaaatctggcagcctagctgttgacaatgcagatcctatattaaaaattccttttgcttctcttgcctccagattaactttggctgagctaaatcagatcctttaccgatgtgaatcagaagaaaaggaagatggtggagggtgctatgacataccaaactggtcagcccttaaatatgcaggtcttcaaggtttaatgtctgtattggcagaaataagaccaaagaatgacttggggcatcctttttgtaataatttgagatctggagattggatgattgactatgtcagtaaccggcttatttcacgatcaggaactattgctgaagttggtaaatggttgcaggctatgttcttctacctgaagcagatcccacgttaccttatcccatgttactttgatgctatattaattggtgcatataccactcttctggatacagcatggaagcagatgtcaagctttgttcagaatggttcaacctttgtgaaacacctttcattgggttcagttcaactgtgtggagtaggaaaattcccttccctgccaattctttcacctgccctaatggatgtaccttataggttaaatgagatcacaaaagaaaaggagcaatgttgtgtttctctagctgcaggcttacctcatttttcttctggtattttccgctgctggggaagggatacttttattgcacttagaggtatactgctgattactggacgctatgtagaagccaggaatattattttagcatttgcgggtaccctgaggcatggtctcattcctaatctactgggtgaaggaatttatgccagatacaattgtcgggatgctgtgtggtggtggctgcagtgtatccaggattactgtaaaatggttccaaatggtctagacattctcaagtgcccagtttccagaatgtatcctacagatgattctgctcctttgcctgctggcacactggatcagccattgtttgaagtcatacaggaagcaatgcaaaaacacatgcagggcatacagttccgagaaaggaatgctggtccccagatagatcgaaacatgaaggacgaaggttttaatataactgcaggagttgatgaagaaacaggatttgtttatggaggaaatcgtttcaattgtggcacatggatggataaaatgggagaaagtgacagagctagaaacagaggaatcccagccacaccaagagatgggtctgctgtggaaattgtgggcctgagtaaatctgctgttcgctggttgctggaattatccaaaaaaaatattttcccttatcatgaagtcacagtaaaaagacatggaaaggctataaaggtctcatatgatgagtggaacagaaaaatacaagacaactttgaaaagctatttcatgtttccgaagacccttcagatttaaatgaaaagcatccaaatctggttcacaaacgtggcatatacaaagatagttatggagcttcaagtccttggtgtgactatcagctcaggcctaattttaccatagcaatggttgtggcccctgagctctttactacagaaaaagcatggaaagctttggagattgcagaaaaaaaattgcttggtccccttggcatgaaaactttagatccagatgatatggtttactgtggaatttatgacaatgcattagacaatgacaactacaatcttgctaaaggtttcaattatcaccaaggacctgagtggctgtggcctattgggtattttcttcgtgcaaaattatatttttccagattgatgggcccggagactactgcaaagactatagttttggttaaaaatgttctttcccgacattatgttcatcttgagagatccccttggaaaggacttccagaactgaccaatgagaatgcccagtactgtcctttcagctgtgaaacacaagcctggtcaattgctactattcttgagacactttatgatttatagtttattacagatattaagtatgcaattacttgtattataggatgcaaggtcatcatatgtaaatgccttatatgcacaggctcaagttgttttaaaaatctcatttattataatattgatgctcaattaggtaagattgtaaaagcattgattttttttaatgtacagaggtagatttcaatttgaatcagaaagaaatatcattaccaatgaaatgtgtttgagttcagtaagaattattcaaatgcctagaaatccatagtttggaaaagaaaaatcatgtcatcttctatttgtacagaaatgaaaataaaatatgaaaataatgaaagaaatgaaaagatagcttttaattgtggtatatataatcttcagtaacaatacatactgaatacgctgtggttcattaatattaacaccacgtactatagtattcttaatacagtgctcactgcatttaataaatatttaataaatgatgaatgatagaagtttccatctacaatatatgttcctaaatggagcacagatgttcaaactatgctttcattttttcactgatatattaatttttgtgtaatgaatgccaacagtatattttatatgatttacttatgtgaggaaacatgcaaagcattaggaaatttatttcctaaaaacagttttgtaaaattagtattgagttctattgagtattataagatagcttacattttcaaaatggaaattgtcggtcatatttctagaactttaaagaaaaaagaatgttatattagttttctaaaactcaactatctttagtcatgttcaaaaatctattgctagatcatagtagatactggttttctattaactcaaaacctacattgacaagtttaacattgagaagaatcttaacaaaaatatggatatgaattcagtagatatcttaaattcaataaaatcactggaagtttttcatgataacttattttaagatgccttaaaaatcttaaagtcacaaaaggaaaaaggtttttaacatttacatgagttaacattttttcatagaacttatttcctagatagaattttttactgttttttactgttttcttaagaaaacagttaaatcattatgcattcagttggaagaaagtagtggcaagaattctttcattgctatataatattcagtggctcatttatacctaataaaataatggtattttaaaataatgctactttcaaagtagcatttttttagttagtttacaggttacatacccaaaaccttaactatgactaagaaattaaagaagaaaaccagcaaactaaaacttctgggcagcaaaaatatataaatgcttcagatgtcaaatacccatgcttgaaagctcgtgtaatttactttaagattatctgcctgctcttcttcaaagctgaccttgctttagaaatagttttaactagcttagttttctggtttccaaaactaaaatagattaaatcctacaaatttaaggacagttgtgacagtaatctgaccactatctataaatacattggacattggtttccaaatctccctttcttcttcagttccttccttgttcaatatatacccttctctaaactgtgcgggtaaaaggaatgactgtccttgagagaaccattagtttatcaaaggtttatgtagttttgttgctgtaccctaactttgatattcagggaggtaggaaaggtaacagaaaaccagcatatttaatcaaagcaagaagtaatcgctgacagttaaatgtgaccaaaaaaattaaaagttcacaatttttttaatgtagccatttggggttatctctagtaaggcagatacccacgttggtaaatttttaggatattgtgttgcactagaaaactaagtggttcatatttctaatgaggaagattaatgaaagaacattgttatattctgcgtggtatattttaaagtttaagaaggcatgttaaacattatttcctctatggtagttaaaatacagaattagatttttaacaggtgtcatttgactaaacgtttcggtagaatgcttcatacttgagtgatgctggataaggtattgtatttcaacaatggactatgccttggtttttcactaatcaaaatcaaaattactctttaacatgataaatgaatttaccagtttagtatgctgtggtattttaataagttttcaaagataattgggaaaacatgagactggtcatattgatgaatattgtaacatgtgaattgtgatccatttctgatatgtcttgaactactgtgtctagtgggcaaatgtcattgttacctctgtgtgttaagaaaataaaaatattttctaaaggtctgt

SEQ ID NO: 521 - DNA, 7182 bp, Homo Sapiens
  NM_000645
tgtataagaatttgcacatcccaagttgctatgtgaataggaatgcgtttccaggggaaggagaaagagacattacagagcagacagctctatgatgtttactatacttgctaaaatgtgaaattcagctaaattggaatacaaagtagtgccaaaacagcattaggtttgcggagttattttaaacataattgaaaaatcaaggttttttaatactttaaataaaacatctgtttttcaatgtggtaatttaagtcctacgatgagtttattaacatgtgctttttatttagggtatgagctacagttccgattaggcccaactttacagggaaaagcagttaccgtgtatacaaattacccatttcctggagaaacatttaatagagaaaaattccgttctctggattgggaaaatccaacagaaagagaagatgattctgataaatactgtaaacttaatctgcaacaatctggttcatttcagtattatttccttcaaggaaatgagaaaagtggtggaggttacatagttgtggaccccattttacgtgttggtgctgataatcatgtgctacccttggactgtgttactcttcagacatttttagctaagtgtttgggaccttttgatgaatgggaaagcagacttagggttgcaaaagaatcaggctacaacatgattcattttaccccattgcagactcttggactatctaggtcatgctactcccttgccaatcagttagaattaaatcctgacttttcaagacctaatagaaagtatacctggaatgatgttggacagctagtggaaaaattaaaaaaggaatggaatgttatttgtattactgatgttgtctacaatcatactgctgctaatagtaaatggatccaggaacatccagaatgtgcctataatcttgtgaattctccacacttaaaacctgcctgggtcttagacagagcactttggcgtttctcctgtgatgttgcagaagggaaatacaaagaaaagggaatacctgctttgattgaaaatgatcaccatatgaattccatccgaaaaataatttgggaggatatttttccaaagcttaaactctgggaatttttccaagtagatgtcaacaaagcggttgagcaatttagaagacttcttacacaagaaaataggcgagtaaccaagtctgatccaaaccaacaccttacgattattcaagatcctgaatacagacggtttggctgtactgtagatatgaacattgcactaacgactttcataccacatgacaaggggccagcagcaattgaagaatgctgtaattggtttcataaaagaatggaggaattaaattcagagaagcatcgactcattaactatcatcaggaacaggcagttaattgccttttgggaaatgtgttttatgaacgactggctggccatggtccaaaactaggacctgtcactagaaagcatcctttagttaccaggtattttactttcccatttgaagagatagacttctccatggaagaatctatgattcatctgccaaataaagcttgttttctgatggcacacaatggatgggtaatgggagatgatcctcttcgaaactttgctgaaccgggttcagaagtttacctaaggagagaacttatttgctggggagacagtgttaaattacgctatgggaataaaccagaggactgtccttatctctgggcacacatgaaaaaatacactgaaataactgcaacttatttccagggagtacgtcttgataactgccactcaacacctcttcacgtagctgagtacatgttggatgctgctaggaatttgcaacccaatttatatgtagtagctgaactgttcacaggaagtgaagatctggacaatgtctttgttactagactgggcattagttccttaataagagaggcaatgagtgcatataatagtcatgaagagggcagattagtttaccgatatggaggagaacctgttggatcctttgttcagccctgtttgaggcctttaatgccagctattgcacatgccctgtttatggatattacgcatgataatgagtgtcctattgtgcatagatcagcgtatgatgctcttccaagtactacaattgtttctatggcatgttgtgctagtggaagtacaagaggctatgatgaattagtgcctcatcagatttcagtggtttctgaagaacggttttacactaagtggaatcctgaagcattgccttcaaacacaggtgaagttaatttccaaagcggcattattgcagccaggtgtgctatcagtaaacttcatcaggagcttggagccaagggttttattcaggtgtatgtggatcaagttgatgaagacatagtggcagtaacaagacactcacctagcatccatcagtctgttgtggctgtatctagaactgctttcaggaatcccaagacttcattttacagcaaggaagtgcctcaaatgtgcatccctggcaaaattgaagaagtagttcttgaagctagaactattgagagaaacacgaaaccttataggaaggatgagaattcaatcaatggaacaccagatatcacagtagaaattagagaacatattcagcttaatgaaagtaaaattgttaaacaagctggagttgccacaaaagggcccaatgaatatattcaagaaatagaatttgaaaacttgtctccaggaagtgttattatattcagagttagtcttgatccacatgcacaagtcgctgttggaattcttcgaaatcatctgacacaattcagtcctcactttaaatctggcagcctagctgttgacaatgcagatcctatattaaaaattccttttgcttctcttgcctccagattaactttggctgagctaaatcagatcctttaccgatgtgaatcagaagaaaaggaagatggtggagggtgctatgacataccaaactggtcagcccttaaatatgcaggtcttcaaggtttaatgtctgtattggcagaaataagaccaaagaatgacttggggcatcctttttgtaataatttgagatctggagattggatgattgactatgtcagtaaccggcttatttcacgatcaggaactattgctgaagttggtaaatggttgcaggctatgttcttctacctgaagcagatcccacgttaccttatcccatgttactttgatgctatattaattggtgcatataccactcttctggatacagcatggaagcagatgtcaagctttgttcagaatggttcaacctttgtgaaacacctttcattgggttcagttcaactgtgtggagtaggaaaattcccttccctgccaattctttcacctgccctaatggatgtaccttataggttaaatgagatcacaaaagaaaaggagcaatgttgtgtttctctagctgcaggcttacctcatttttcttctggtattttccgctgctggggaagggatacttttattgcacttagaggtatactgctgattactggacgctatgtagaagccaggaatattattttagcatttgcgggtaccctgaggcatggtctcattcctaatctactgggtgaaggaatttatgccagatacaattgtcgggatgctgtgtggtggtggctgcagtgtatccaggattactgtaaaatggttccaaatggtctagacattctcaagtgcccagtttccagaatgtatcctacagatgattctgctcctttgcctgctggcacactggatcagccattgtttgaagtcatacaggaagcaatgcaaaaacacatgcagggcatacagttccgagaaaggaatgctggtccccagatagatcgaaacatgaaggacgaaggttttaatataactgcaggagttgatgaagaaacaggatttgtttatggaggaaatcgtttcaattgtggcacatggatggataaaatgggagaaagtgacagagctagaaacagaggaatcccagccacaccaagagatgggtctgctgtggaaattgtgggcctgagtaaatctgctgttcgctggttgctggaattatccaaaaaaaatattttcccttatcatgaagtcacagtaaaaagacatggaaaggctataaaggtctcatatgatgagtggaacagaaaaatacaagacaactttgaaaagctatttcatgtttccgaagacccttcagatttaaatgaaaagcatccaaatctggttcacaaacgtggcatatacaaagatagttatggagcttcaagtccttggtgtgactatcagctcaggcctaattttaccatagcaatggttgtggcccctgagctctttactacagaaaaagcatggaaagctttggagattgcagaaaaaaaattgcttggtccccttggcatgaaaactttagatccagatgatatggtttactgtggaatttatgacaatgcattagacaatgacaactacaatcttgctaaaggtttcaattatcaccaaggacctgagtggctgtggcctattgggtattttcttcgtgcaaaattatatttttccagattgatgggcccggagactactgcaaagactatagttttggttaaaaatgttctttcccgacattatgttcatcttgagagatccccttggaaaggacttccagaactgaccaatgagaatgcccagtactgtcctttcagctgtgaaacacaagcctggtcaattgctactattcttgagacactttatgatttatagtttattacagatattaagtatgcaattacttgtattataggatgcaaggtcatcatatgtaaatgccttatatgcacaggctcaagttgttttaaaaatctcatttattataatattgatgctcaattaggtaagattgtaaaagcattgattttttttaatgtacagaggtagatttcaatttgaatcagaaagaaatatcattaccaatgaaatgtgtttgagttcagtaagaattattcaaatgcctagaaatccatagtttggaaaagaaaaatcatgtcatcttctatttgtacagaaatgaaaataaaatatgaaaataatgaaagaaatgaaaagatagcttttaattgtggtatatataatcttcagtaacaatacatactgaatacgctgtggttcattaatattaacaccacgtactatagtattcttaatacagtgctcactgcatttaataaatatttaataaatgatgaatgatagaagtttccatctacaatatatgttcctaaatggagcacagatgttcaaactatgctttcattttttcactgatatattaatttttgtgtaatgaatgccaacagtatattttatatgatttacttatgtgaggaaacatgcaaagcattaggaaatttatttcctaaaaacagttttgtaaaattagtattgagttctattgagtattataagatagcttacattttcaaaatggaaattgtcggtcatatttctagaactttaaagaaaaaagaatgttatattagttttctaaaactcaactatctttagtcatgttcaaaaatctattgctagatcatagtagatactggttttctattaactcaaaacctacattgacaagtttaacattgagaagaatcttaacaaaaatatggatatgaattcagtagatatcttaaattcaataaaatcactggaagtttttcatgataacttattttaagatgccttaaaaatcttaaagtcacaaaaggaaaaaggtttttaacatttacatgagttaacattttttcatagaacttatttcctagatagaattttttactgttttttactgttttcttaagaaaacagttaaatcattatgcattcagttggaagaaagtagtggcaagaattctttcattgctatataatattcagtggctcatttatacctaataaaataatggtattttaaaataatgctactttcaaagtagcatttttttagttagtttacaggttacatacccaaaaccttaactatgactaagaaattaaagaagaaaaccagcaaactaaaacttctgggcagcaaaaatatataaatgcttcagatgtcaaatacccatgcttgaaagctcgtgtaatttactttaagattatctgcctgctcttcttcaaagctgaccttgctttagaaatagttttaactagcttagttttctggtttccaaaactaaaatagattaaatcctacaaatttaaggacagttgtgacagtaatctgaccactatctataaatacattggacattggtttccaaatctccctttcttcttcagttccttccttgttcaatatatacccttctctaaactgtgcgggtaaaaggaatgactgtccttgagagaaccattagtttatcaaaggtttatgtagttttgttgctgtaccctaactttgatattcagggaggtaggaaaggtaacagaaaaccagcatatttaatcaaagcaagaagtaatcgctgacagttaaatgtgaccaaaaaaattaaaagttcacaatttttttaatgtagccatttggggttatctctagtaaggcagatacccacgttggtaaatttttaggatattgtgttgcactagaaaactaagtggttcatatttctaatgaggaagattaatgaaagaacattgttatattctgcgtggtatattttaaagtttaagaaggcatgttaaacattatttcctctatggtagttaaaatacagaattagatttttaacaggtgtcatttgactaaacgtttcggtagaatgcttcatacttgagtgatgctggataaggtattgtatttcaacaatggactatgccttggtttttcactaatcaaaatcaaaattactctttaacatgataaatgaatttaccagtttagtatgctgtggtattttaataagttttcaaagataattgggaaaacatgagactggtcatattgatgaatattgtaacatgtgaattgtgatccatttctgatatgtcttgaactactgtgtctagtgggcaaatgtcattgttacctctgtgtgttaagaaaataaaaatattttctaaaggtctgt

SEQ ID NO: 522 - DNA, 9979 bp, Homo Sapiens
  NM_000651
ttttgtcccggaaccccgcagccctccccacactctgggcgcggagcacaatgattggtcactcctattttcgctgagcttttcctcttatttcagttttcttcgagatcaaatctggtttgtagatgtgcttggggagaatgggggcctcttctccaagaagcccggagcctgtcgggccgccggcgcccggtctccccttctgctgcggaggatccctgctggcggttgtggtgctgcttgcgctgccggtggcctggggtcaatgcaatgccccagaatggcttccatttgccaggcctaccaacctaactgatgaatttgagtttcccattgggacatatctgaactatgaatgccgccctggttattccggaagaccgttttctatcatctgcctaaaaaactcagtctggactggtgctaaggacaggtgcagacgtaaatcatgtcgtaatcctccagatcctgtgaatggcatggtgcatgtgatcaaaggcatccagttcggatcccaaattaaatattcttgtactaaaggataccgactcattggttcctcgtctgccacatgcatcatctcaggtgatactgtcatttgggataatgaaacacctatttgtgacagaattccttgtgggctaccccccaccatcaccaatggagatttcattagcaccaacagagagaattttcactatggatcagtggtgacctaccgctgcaatcctggaagcggagggagaaaggtgtttgagcttgtgggtgagccctccatatactgcaccagcaatgacgatcaagtgggcatctggagcggccccgcccctcagtgcattatacctaacaaatgcacgcctccaaatgtggaaaatggaatattggtatctgacaacagaagcttattttccttaaatgaagttgtggagtttaggtgtcagcctggctttgtcatgaaaggaccccgccgtgtgaagtgccaggccctgaacaaatgggagccggagctaccaagctgctccagggtatgtcagccacctccagatgtcctgcatgctgagcgtacccaaagggacaaggacaacttttcacctgggcaggaagtgttctacagctgtgagcccggctacgacctcagaggggctgcgtctatgcgctgcacaccccagggagactggagccctgcagcccccacatgtgaagtgaaatcctgtgatgacttcatgggccaacttcttaatggccgtgtgctatttccagtaaatctccagcttggagcaaaagtggattttgtttgtgatgaaggatttcaattaaaaggcagctctgctagttactgtgtcttggctggaatggaaagcctttggaatagcagtgttccagtgtgtgaacaaatcttttgtccaagtcctccagttattcctaatgggagacacacaggaaaacctctggaagtctttccctttgggaaaacagtaaattacacatgcgacccccacccagacagagggacgagcttcgacctcattggagagagcaccatccgctgcacaagtgaccctcaagggaatggggtttggagcagccctgcccctcgctgtggaattctgggtcactgtcaagccccagatcattttctgtttgccaagttgaaaacccaaaccaatgcatctgactttcccattgggacatctttaaagtacgaatgccgtcctgagtactacgggaggccattctctatcacatgtctagataacctggtctggtcaagtcccaaagatgtctgtaaacgtaaatcatgtaaaactcctccagatccagtgaatggcatggtgcatgtgatcacagacatccaggttggatccagaatcaactattcttgtactacagggcaccgactcattggtcactcatctgctgaatgtatcctctcgggcaatgctgcccattggagcacgaagccgccaatttgtcaacgaattccttgtgggctaccccccaccatcgccaatggagatttcattagcaccaacagagagaattttcactatggatcagtggtgacctaccgctgcaatcctggaagcggagggagaaaggtgtttgagcttgtgggtgagccctccatatactgcaccagcaatgacgatcaagtgggcatctggagcggcccggcccctcagtgcattatacctaacaaatgcacgcctccaaatgtggaaaatggaatattggtatctgacaacagaagcttattttccttaaatgaagttgtggagtttaggtgtcagcctggctttgtcatgaaaggaccccgccgtgtgaagtgccaggccctgaacaaatgggagccggagctaccaagctgctccagggtatgtcagccacctccagatgtcctgcatgctgagcgtacccaaagggacaaggacaacttttcacccgggcaggaagtgttctacagctgtgagcccggctacgacctcagaggggctgcgtctatgcgctgcacaccccagggagactggagccctgcagcccccacatgtgaagtgaaatcctgtgatgacttcatgggccaacttcttaatggccgtgtgctatttccagtaaatctccagcttggagcaaaagtggattttgtttgtgatgaaggatttcaattaaaaggcagctctgctagttactgtgtcttggctggaatggaaagcctttggaatagcagtgttccagtgtgtgaacaaatcttttgtccaagtcctccagttattcctaatgggagacacacaggaaaacctctggaagtctttccctttgggaaaacagtaaattacacatgcgacccccacccagacagagggacgagcttcgacctcattggagagagcaccatccgctgcacaagtgaccctcaagggaatggggtttggagcagccctgcccctcgctgtggaattctgggtcactgtcaagccccagatcattttctgtttgccaagttgaaaacccaaaccaatgcatctgactttcccattgggacatctttaaagtacgaatgccgtcctgagtactacgggaggccattctctatcacatgtctagataacctggtctggtcaagtcccaaagatgtctgtaaacgtaaatcatgtaaaactcctccagatccagtgaatggcatggtgcatgtgatcacagacatccaggttggatccagaatcaactattcttgtactacagggcaccgactcattggtcactcatctgctgaatgtatcctctcgggcaatgctgcccattggagcacgaagccgccaatttgtcaacgaattccttgtgggctaccccccaccatcgccaatggagatttcattagcaccaacagagagaattttcactatggatcagtggtgacctaccgctgcaatcctggaagcggagggagaaaggtgtttgagcttgtgggtgagccctccatatactgcaccagcaatgacgatcaagtgggcatctggagcggcccggcccctcagtgcattatacctaacaaatgcacgcctccaaatgtggaaaatggaatattggtatctgacaacagaagcttattttccttaaatgaagttgtggagtttaggtgtcagcctggctttgtcatgaaaggaccccgccgtgtgaagtgccaggccctgaacaaatgggagccggagctaccaagctgctccagggtatgtcagccacctccagatgtcctgcatgctgagcgtacccaaagggacaaggacaacttttcacccgggcaggaagtgttctacagctgtgagcccggctatgacctcagaggggctgcgtctatgcgctgcacaccccagggagactggagccctgcagcccccacatgtgaagtgaaatcctgtgatgacttcatgggccaacttcttaatggccgtgtgctatttccagtaaatctccagcttggagcaaaagtggattttgtttgtgatgaaggatttcaattaaaaggcagctctgctagttattgtgtcttggctggaatggaaagcctttggaatagcagtgttccagtgtgtgaacaaatcttttgtccaagtcctccagttattcctaatgggagacacacaggaaaacctctggaagtctttccctttggaaaagcagtaaattacacatgcgacccccacccagacagagggacgagcttcgacctcattggagagagcaccatccgctgcacaagtgaccctcaagggaatggggtttggagcagccctgcccctcgctgtggaattctgggtcactgtcaagccccagatcattttctgtttgccaagttgaaaacccaaaccaatgcatctgactttcccattgggacatctttaaagtacgaatgccgtcctgagtactacgggaggccattctctatcacatgtctagataacctggtctggtcaagtcccaaagatgtctgtaaacgtaaatcatgtaaaactcctccagatccagtgaatggcatggtgcatgtgatcacagacatccaggttggatccagaatcaactattcttgtactacagggcaccgactcattggtcactcatctgctgaatgtatcctctcaggcaatactgcccattggagcacgaagccgccaatttgtcaacgaattccttgtgggctacccccaaccatcgccaatggagatttcattagcaccaacagagagaattttcactatggatcagtggtgacctaccgctgcaatcttggaagcagagggagaaaggtgtttgagcttgtgggtgagccctccatatactgcaccagcaatgacgatcaagtgggcatctggagcggccccgcccctcagtgcattatacctaacaaatgcacgcctccaaatgtggaaaatggaatattggtatctgacaacagaagcttattttccttaaatgaagttgtggagtttaggtgtcagcctggctttgtcatgaaaggaccccgccgtgtgaagtgccaggccctgaacaaatgggagccagagttaccaagctgctccagggtgtgtcagccgcctccagaaatcctgcatggtgagcataccccaagccatcaggacaacttttcacctgggcaggaagtgttctacagctgtgagcctggctatgacctcagaggggctgcgtctctgcactgcacaccccagggagactggagccctgaagccccgagatgtgcagtgaaatcctgtgatgacttcttgggtcaactccctcatggccgtgtgctatttccacttaatctccagcttggggcaaaggtgtcctttgtctgtgatgaagggtttcgcttaaagggcagttccgttagtcattgtgtcttggttggaatgagaagcctttggaataacagtgttcctgtgtgtgaacatatcttttgtccaaatcctccagctatccttaatgggagacacacaggaactccctctggagatattccctatggaaaagaaatatcttacacatgtgacccccacccagacagagggatgaccttcaacctcattggggagagcaccatccgctgcacaagtgaccctcatgggaatggggtttggagcagccctgcccctcgctgtgaactttctgttcgtgctggtcactgtaaaaccccagagcagtttccatttgccagtcctacgatcccaattaatgactttgagtttccagtcgggacatctttgaattatgaatgccgtcctgggtattttgggaaaatgttctctatctcctgcctagaaaacttggtctggtcaagtgttgaagacaactgtagacgaaaatcatgtggacctccaccagaacccttcaatggaatggtgcatataaacacagatacacagtttggatcaacagttaattattcttgtaatgaagggtttcgactcattggttccccatctactacttgtctcgtctcaggcaataatgtcacatgggataagaaggcacctatttgtgagatcatatcttgtgagccacctccaaccatatccaatggagacttctacagcaacaatagaacatcttttcacaatggaacggtggtaacttaccagtgccacactggaccagatggagaacagctgtttgagcttgtgggagaacggtcaatatattgcaccagcaaagatgatcaagttggtgtttggagcagccctccccctcggtgtatttctactaataaatgcacagctccagaagttgaaaatgcaattagagtaccaggaaacaggagtttctttaccctcactgagatcatcagatttagatgtcagcccgggtttgtcatggtagggtcccacactgtgcagtgccagaccaatggcagatgggggcccaagctgccacactgctccagggtgtgtcagccgcctccagaaatcctgcatggtgagcataccctaagccatcaggacaacttttcacctgggcaggaagtgttctacagctgtgagcccagctatgacctcagaggggctgcgtctctgcactgcacgccccagggagactggagccctgaagcccctagatgtacagtgaaatcctgtgatgacttcctgggccaactccctcatggccgtgtgctacttccacttaatctccagcttggggcaaaggtgtcctttgtttgcgatgaagggttccgattaaaaggcaggtctgctagtcattgtgtcttggctggaatgaaagccctttggaatagcagtgttccagtgtgtgaacaaatcttttgtccaaatcctccagctatccttaatgggagacacacaggaactccctttggagatattccctatggaaaagaaatatcttacgcatgcgacacccacccagacagagggatgaccttcaacctcattggggagagctccatccgctgcacaagtgaccctcaagggaatggggtttggagcagccctgcccctcgctgtgaactttctgttcctgctgcctgcccacatccacccaagatccaaaacgggcattacattggaggacacgtatctctatatcttcctgggatgacaatcagctacatttgtgaccccggctacctgttagtgggaaagggcttcattttctgtacagaccagggaatctggagccaattggatcattattgcaaagaagtaaattgtagcttcccactgtttatgaatggaatctcgaaggagttagaaatgaaaaaagtatatcactatggagattatgtgactttgaagtgtgaagatgggtatactctggaaggcagtccctggagccagtgccaggcggatgacagatgggaccctcctctggccaaatgtacctctcgtacacatgatgctctcatagttggcactttatctggtacgatcttctttattttactcatcattttcctctcttggataattctaaagcacagaaaaggcaataatgcacatgaaaaccctaaagaagtggctatccatttacattctcaaggaggcagcagcgttcatccccgaactctgcaaacaaatgaagaaaatagcagggtccttccttgacaaagtactatacagctgaagaacatctcgaatacaattttggtgggaaaggagccaattgatttcaacagaatcagatctgagcttcataaagtctttgaagtgacttcacagagacgcagacatgtgcacttgaagatgctgccccttccctggtacctagcaaagctcctgcctctttgtgtgcgtcactgtgaaacccccacccttctgcctcgtgctaaacgcacacagtatctagtcaggggaaaagactgcatttaggagatagaaaatagtttggattacttaaaggaataaggtgttgcctggaatttctggtttgtaaggtggtcactgttcttttttaaaatatttgtaatatggaatgggctcagtaagaagagcttggaaaatgcagaaagttatgaaaaataagtcacttataattatgctacctactgataaccactcctaatattttgattcattttctgcctatcttctttcacatatgtgtttttttacatacgtacttttcccccttagtttgtttccttttattttatagagcagaaccctagtcttttaaacagtttagagtgaaatatatgctatatcagtttttactttctctagggagaaaaattaatttactagaaaggcatgaaatgatcatgggaagagtggttaagactactgaagagaaatatttggaaaataagatttcgatatcttctttttttttgagatggagtctggctctgtctcccaggctggagtgcagtggcgtaatctcggctcactgcaagctccgcctcccgggttgacaccattttcctgcctcagcctcctgagtagttgggattaccagtagatgggactacaggcacctgccaacacgcccggctaatttttttgtatttttagtagagacggggtttcaccatgttagccaggatggtctggatctcctgacctcgtgatccacctgcctcggcctcccaaagtgctgcgattacaggcatgagccaccgcgcctggccgctttcgatattttctaaactttaattcaaaagcactttgtgctgtgttctatataaaaaacataataaaaattgaaatgaaagaataattgttattataaaagtactagcttacttttgtatggattcagaatatactaaattaactttttaaaacacaacttttaaaaaatgtatcaaaataataaacgtgttctgatatttttaaaataagtgaccttgtgttctttaaccagtccacatctttagagaacaaaaatgtgttatgatattatgggccatgctaatgacctctagaaaacatcagaatatttctggatatttaataatagctttatatatgactaatgctcatttctatgtaattctgtttaatagttgctttaaaggtgaattttgccacatttactttgacagcagtataaggagtgagatagacatgaacctgaatttcaatttaaaatcatggaagagagggaaaaaaaaccagcttaagaaaaatcaactgataaactgcaagaaaaaaatgcaacttacatcacaaaagctaattgctttattatttagagagtacttaaaaattaaagaccaaacttctctccacccaacaaaaatgggcaaaggacatacagctaggtcaccaagaaagaagggcaaataggtggtgagtatatgtaaagatacttgataggacttttgcttagttgaatctttagcaaatctcttttatttcttgggattttgaagaagtaatttttaaaggaggactagaaactaagtgattgggaattggcctttttagaattaaaatttcccattacaagaaaaaaaaatcctgtgttcttttttttttccagaatggagtaggtcagtgagcaatgtgattaataaatatttcaatgtctgtgacttttgatttattttggagacagggtcttgctctgttacccaggctggagtgcagtggtgctatctaggcttactgcaacctcacctgtcactttttaattgcaagaaagctgaaaggtttttttctattatatcagttataatgataaatactgtatatactaactatgagtaaaatactatattgcctaacttgtattattaagcaattctgctaacctgtgaccttacattttcatctgaaaagcaggggctggacaccaattgccctatgaagctattgctagtcctaacattctttgttttgtttgcttttttggcacacttaagtgtgtactatgaagtttatgatgctttaatgaaattttctgtctctaccattgtaatgagaaaggaataaaatactttattttgcaaatctaaaaaaaaaaaaaa

SEQ ID NO: 523 - DNA, 2442 bp, Homo Sapiens
  NM_000655
aggaggaaggggagggaaaaggggaggaggaggaggatgtgagactgggttagagaaatgaaagaaagcaaggctttctgttgacattcagtgcagtctacctgcagcacagcacactccctttgggcaaggacctgagacccttgtgctaagtcaagaggctcaatgggctgcagaagaactagagaaggaccaagcaaagccatgatatttccatggaaatgtcagagcacccagagggacttatggaacatcttcaagttgtgggggtggacaatgctctgttgtgatttcctggcacatcatggaaccgactgctggacttaccattattctgaaaaacccatgaactggcaaagggctagaagattctgccgagacaattacacagatttagttgccatacaaaacaaggcggaaattgagtatctggagaagactctgcctttcagtcgttcttactactggataggaatccggaagataggaggaatatggacgtgggtgggaaccaacaaatctcttactgaagaagcagagaactggggagatggtgagcccaacaacaagaagaacaaggaggactgcgtggagatctatatcaagagaaacaaagatgcaggcaaatggaacgatgacgcctgccacaaactaaaggcagccctctgttacacagcttcttgccagccctggtcatgcagtggccatggagaatgtgtagaaatcatcaataattacacctgcaactgtgatgtggggtactatgggccccagtgtcagtttgtgattcagtgtgagcctttggaggccccagagctgggtaccatggactgtactcaccctttgggaaacttcagcttcagctcacagtgtgccttcagctgctctgaaggaacaaacttaactgggattgaagaaaccacctgtggaccatttggaaactggtcatctccagaaccaacctgtcaagtgattcagtgtgagcctctatcagcaccagatttggggatcatgaactgtagccatcccctggccagcttcagctttacctctgcatgtaccttcatctgctcagaaggaactgagttaattgggaagaagaaaaccatttgtgaatcatctggaatctggtcaaatcctagtccaatatgtcaaaaattggacaaaagtttctcaatgattaaggagggtgattataaccccctcttcattccagtggcagtcatggttactgcattctctgggttggcatttatcatttggctggcaaggagattaaaaaaaggcaagaaatccaagagaagtatgaatgacccatattaaatcgcccttggtgaaagaaaattcttggaatactaaaaatcatgagatcctttaaatccttccatgaaacgttttgtgtggtggcacctcctacgtcaaacatgaagtgtgtttccttcagtgcatctgggaagatttctacctgaccaacagttccttcagcttccatttcgcccctcatttatccctcaacccccagcccacaggtgtttatacagctcagctttttgtcttttctgaggagaaacaaataagaccataaagggaaaggattcatgtggaatataaagatggctgactttgctctttcttgactcttgttttcagtttcaattcagtgctgtacttgatgacagacacttctaaatgaagtgcaaatttgatacatatgtgaatatggactcagttttcttgcagatcaaatttcacgtcgtcttctgtatactgtggaggtacactcttatagaaagttcaaaaagtctacgctctcctttctttctaactccagtgaagtaatggggtcctgctcaagttgaaagagtcctatttgcactgtagcctcgccgtctgtgaattggaccatcctatttaactggcttcagcctccccaccttcttcagccacctctctttttcagttggctgacttccacacctagcatctcatgagtgccaagcaaaaggagagaagagagaaatagcctgcgctgttttttagtttgggggttttgctgtttccttttatgagacccattcctatttcttatagtcaatgtttcttttatcacgatattattagtaagaaaacatcactgaaatgctagctgcaagtgacatctctttgatgtcatatggaagagttaaaacaggtggagaaattccttgattcacaatgaaatgctctcctttcccctgcccccagaccttttatccacttacctagattctacatattctttaaatttcatctcaggcctccctcaaccccaccacttcttttataactagtcctttactaatccaacccatgatgagctcctcttcctggcttcttactgaaaggttaccctgtaacatgcaattttgcatttgaataaagcctgctttttaagtgttaact

SEQ ID NO: 524 - DNA, 1815 bp, Homo Sapiens
  NM_000662
acttcctcatagaccttggatgtgggaggattgcattcagtctagttcctggttgccggctgaaataacctgaattcaagccaggaagaagcagcaatctgtcttctggattaaaactgaagatcaacctactttcaacttactaagaaaggggatcatggacattgaagcatatcttgaaagaattggctataagaagtctaggaacaaattggacttggaaacattaactgacattcttcaacaccagatccgagctgttccctttgagaaccttaacatccattgtggggatgccatggacttaggcttagaggccatttttgatcaagttgtgagaagaaatcggggtggatggtgtctccaggtcaatcatcttctgtactgggctctgaccactattggttttgagaccacgatgttgggagggtatgtttacagcactccagccaaaaaatacagcactggcatgattcaccttctcctgcaggtgaccattgatggcaggaactacattgtcgatgctgggtttggacgctcataccagatgtggcagcctctggagttaatttctgggaaggatcagcctcaggtgccttgtgtcttccgtttgacggaagagaatggattctggtatctagaccaaatcagaagggaacagtacattccaaatgaagaatttcttcattctgatctcctagaagacagcaaataccgaaaaatctactcctttactcttaagcctcgaacaattgaagattttgagtctatgaatacatacctgcagacatctccatcatctgtgtttactagtaaatcattttgttccttgcagaccccagatggggttcactgtttggtgggcttcaccctcacccataggagattcaattataaggacaatacagatctaatagagttcaagactctgagtgaggaagaaatagaaaaagtgctgaaaaatatatttaatatttccttgcagagaaagcttgtgcccaaacatggtgatagattttttactatttagaataaggagtaaaacaatcttgtctatttgtcatccagctcaccagttatcaactgacgacctatcatgtatcttctgtacccttaccttattttgaagaaaatcctagacatcaaatcatttcacctataaaaatgtcatcatatataattaaacagctttttaaagaaacataaccacaaaccttttcaaataataataataataataataaaaaatgtattttaaagatggcctgtggttatcttggaaattggtgatttatgctagaaagcttttaatgttggtttattgttgaattcctagaaaagttttattggtagatgagtaaataaaatattgtaaaaaaacttattgtctataaagtatattaaaacattgttggctaatataatttgaaaaaaagtggttttttggaagacttaggatattatggtgctacataatttttcctcgatgctctcttcctctcatctttcttgtctcttaaattgctttacttccttgcacactttgccatacaagaatgaacatgagcttttcttgtgtagatctgagttgaaatcctgtggacactgggcgaattactttttagatctgtagctctgactcctcaggcataaaatgggaataatgcttttacagtttagtggcggaactaaactcccaaaattatttgttatatggatcaagtaataacgtcagtaatgtttttggtacaaagtcattatttaataaaagttattgttccatcttgcttgcccccccaaaaaaaaaaaaaaaaa

SEQ ID NO: 525 - DNA, 2225 bp, Homo Sapiens
  NM_000665
ggggtgtgtgcggggggccggaggcggcggctgtcagagtcggctcagcctgcgccggggaacatcggccgcctccagctcccggcgcggcccggcccggcccggctcggccgcctcagacgccgcctgccctgcagccatgaggcccccgcagtgtctgctgcacacgccttccctggcttccccactccttctcctcctcctctggctcctgggtggaggagtgggggctgagggccgggaggatgcagagctgctggtgacggtgcgtgggggccggctgcggggcattcgcctgaagacccccgggggccctgtctctgctttcctgggcatcccctttgcggagccacccatgggaccccgtcgctttctgccaccggagcccaagcagccttggtcaggggtggtagacgctacaaccttccagagtgtctgctaccaatatgtggacaccctatacccaggttttgagggcaccgagatgtggaaccccaaccgtgagctgagcgaggactgcctgtacctcaacgtgtggacaccatacccccggcctacatcccccacccctgtcctcgtctggatctatgggggtggcttctacagtggggcctcctccttggacgtgtacgatggccgcttcttggtacaggccgagaggactgtgctggtgtccatgaactaccgggtgggagcctttggcttcctggccctgccggggagccgagaggccccgggcaatgtgggtctcctggatcagaggctggccctgcagtgggtgcaggagaacgtggcagccttcgggggtgacccgacatcagtgacgctgtttggggagagcgcgggagccgcctcggtgggcatgcacctgctgtccccgcccagccggggcctgttccacagggccgtgctgcagagcggtgcccccaatggaccctgggccacggtgggcatgggagaggcccgtcgcagggccacgcagctggcccaccttgtgggctgtcctccaggcggcactggtgggaatgacacagagctggtagcctgccttcggacacgaccagcgcaggtcctggtgaaccacgaatggcacgtgctgcctcaagaaagcgtcttccggttctccttcgtgcctgtggtagatggagacttcctcagtgacaccccagaggccctcatcaacgcgggagacttccacggcctgcaggtgctggtgggtgtggtgaaggatgagggctcgtattttctggtttacggggccccaggcttcagcaaagacaacgagtctctcatcagccgggccgagttcctggccggggtgcgggtcggggttccccaggtaagtgacctggcagccgaggctgtggtcctgcattacacagactggctgcatcccgaggacccggcacgcctgagggaggccctgagcgatgtggtgggcgaccacaatgtcgtgtgccccgtggcccagctggctgggcgactggctgcccagggtgcccgggtctacgcctacgtctttgaacaccgtgcttccacgctctcctggcccctgtggatgggggtgccccacggctacgagatcgagttcatctttgggatccccctggacccctctcgaaactacacggcagaggagaaaatcttcgcccagcgactgatgcgatactgggccaactttgcccgcacaggggatcccaatgagccccgagaccccaaggccccacaatggcccccgtacacggcgggggctcagcagtacgttagtctggacctgcggccgctggaggtgcggcgggggctgcgcgcccaggcctgcgccttctggaaccgcttcctccccaaattgctcagcgccaccgacacgctcgacgaggcggagcgccagtggaaggccgagttccaccgctggagctcctacatggtgcactggaagaaccagttcgaccactacagcaagcaggatcgctgctcagacctgtgaccccggcgggacccccatgtcctccgctccgcccggccccctagctgtatatactatttatttcagggctgggctataacacagacgagccccagactctgcccatccccaccccaccccgacgtcccccggggctcccggtcctctgcatgtctcaggctgagctccctcccccgcggtgccttcgcccctctgggctgccaataaactgttacagccaaaaaaaaaaaaaaaaaaaaaa

SEQ ID NO: 526 - DNA, 1678 bp, Homo Sapiens
  NM_000666
ggcggcgctggccgcggcggccgctgcccggggacgggatccggatctaatcctccagtaatctcgctgaggcccgaaccagaggcgggcggggacatccgcgccgacgcggccgctggcgccgggacggccctcactgacggtcttcggtctccgccccgacatccggcctcggccacgtggtgggcggaccggggcggtcctgagcctgcgacctcgcaggcgacctcgctggaccctaagtccaggccacagtcagggaagggcgctgagaggcgagcgtgagcccagcgacaggagagtgagctcaccacgcgcagcgccatgaccagcaagggtcccgaggaggagcacccatcggtgacgctcttccgccagtacctgcgtatccgcactgtccagcccaagcctgactatggagctgctgtggctttctttgaggagacagcccgccagctgggcctgggctgtcagaaagtagaggtggcacctggctatgtggtgaccgtgttgacctggccaggcaccaaccctacactctcctccatcttgctcaactcccacacggatgtggtgcctgtcttcaaggaacattggagtcacgacccctttgaggccttcaaggattctgagggctacatctatgccaggggtgcccaggacatgaagtgcgtcagcatccagtacctggaagctgtgaggaggctgaaggtggagggccaccggttccccagaaccatccacatgacctttgtgcctgatgaggaggttgggggtcaccaaggcatggagctgttcgtgcagcggcctgagttccacgccctgagggcaggctttgccctggatgagggcatagccaatcccactgatgccttcactgtcttttatagtgagcggagtccctggtgggtgcgggttaccagcactgggaggccaggccatgcctcacgcttcatggaggacacagcagcagagaagctgcacaaggttgtaaactccatcctggcattccgggagaaggaatggcagaggctgcagtcaaacccccacctgaaagaggggtccgtgacctccgtgaacctgactaagctagagggtggcgtggcctataacgtgatacctgccaccatgagcgccagctttgacttccgtgtggcaccggatgtggacttcaaggcttttgaggagcagctgcagagctggtgccaggcagctggcgagggggtcaccctagagtttgctcagaagtggatgcacccccaagtgacacctactgatgactcaaacccttggtgggcagcttttagccgggtctgcaaggatatgaacctcactctggagcctgagatcatgcctgctgccactgacaaccgctatatccgcgcggtgggggtcccagctctaggcttctcacccatgaaccgcacacctgtgctgctgcacgaccacgatgaacggctgcatgaggctgtgttcctccgtggggtggacatatatacacgcctgctgcctgcccttgccagtgtgcctgccctgcccagtgacagctgagccctggaactcctaaacctttgcccctggggcttccatcccaaccagtgccaaggacctcctcttcccccttccaaataataaagtctatggacagggctgtctctgaagtactaacacaaggaca

SEQ ID NO: 527 - DNA, 2590 bp, Homo Sapiens
  NM_000675
acagcctgtgtacatgtgagcagccgcgtgcagaggggaagctctgcctgggcctcagggactgtgacatggagcaggagccgcccccagccaagctgctttcagcacagcgtgggcccccagcaccttggtgcggggtgcggcccctcggaggagggctgtcaggtgaagcctcgtgtgagggggtgcctcaggaaccctgaagctgggctgagccatgatgctgctgccagaacccctgcagagggcctggtttcaggagactcagagtcctctgtgaaaaagcccttggagagcgccccagcagggctgcacttggctcctgtgaggaaggggctcaggggtctgggcccctccgcctgggccgggctgggagccaggcgggcggctgggctgcagcaatggaccgtgagctggcccagcccgcgtccgtgctgagcctgcctgtcgtctgtggccatgcccatcatgggctcctcggtgtacatcacggtggagctggccattgctgtgctggccatcctgggcaatgtgctggtgtgctgggccgtgtggctcaacagcaacctgcagaacgtcaccaactactttgtggtgtcactggcggcggccgacatcgcagtgggtgtgctcgccatcccctttgccatcaccatcagcaccgggttctgcgctgcctgccacggctgcctcttcattgcctgcttcgtcctggtcctcacgcagagctccatcttcagtctcctggccatcgccattgaccgctacattgccatccgcatcccgctccggtacaatggcttggtgaccggcacgagggctaagggcatcattgccatctgctgggtgctgtcgtttgccatcggcctgactcccatgctaggttggaacaactgcggtcagccaaaggagggcaagaaccactcccagggctgcggggagggccaagtggcctgtctctttgaggatgtggtccccatgaactacatggtgtacttcaacttctttgcctgtgtgctggtgcccctgctgctcatgctgggtgtctatttgcggatcttcctggcggcgcgacgacagctgaagcagatggagagccagcctctgccgggggagcgggcacggtccacactgcagaaggaggtccatgctgccaagtcactggccatcattgtggggctctttgccctctgctggctgcccctacacatcatcaactgcttcactttcttctgccccgactgcagccacgcccctctctggctcatgtacctggccatcgtcctctcccacaccaattcggttgtgaatcccttcatctacgcctaccgtatccgcgagttccgccagaccttccgcaagatcattcgcagccacgtcctgaggcagcaagaacctttcaaggcagctggcaccagtgcccgggtcttggcagctcatggcagtgacggagagcaggtcagcctccgtctcaacggccacccgccaggagtgtgggccaacggcagtgctccccaccctgagcggaggcccaatggctatgccctggggctggtgagtggagggagtgcccaagagtcccaggggaacacgggcctcccagacgtggagctccttagccatgagctcaagggagtgtgcccagagccccctggcctagatgaccccctggcccaggatggagcaggagtgtcctgatgattcatggagtttgccccttcctaagggaaggagatctttatctttctggttggcttgaccagtcacgttgggagaagagagagagtgccaggagaccctgagggcagccggttcctactttggactgagagaagggagccccaggctggagcagcatgaggcccagcaagaagggcttgggttctgaggaagcagatgtttcatgctgtgaggccttgcaccaggtgggggccacagcaccagcagcatctttgctgggcagggcccagccctccactgcagaagcatctggaagcaccaccttgtctccacagagcagcttgggcacagcagactggcctggccctgagactggggagtggctccaacagcctcctgccacccacacaccactctccctagactctcctagggttcaggagctgctgggcccagaggtgacatttgacttttttccaggaaaaatgtaagtgtgaggaaaccctttttattttattacctttcactctctggctgctgggtctgccgtcggtcctgctgctaacctggcaccagagcctctgcccggggagcctcaggcagtcctctcctgctgtcacagctgccatccacttctcagtcccagggccatctcttggagtgacaaagctgggatcaaggacagggagttgtaacagagcagtgccagagcatgggcccaggtcccaggggagaggttggggctggcaggccactggcatgtgctgagtagcgcagagctacccagtgagaggccttgtctaactgcctttccttctaaagggaatgtttttttctgagataaaataaaaacgagccacatcgtgttttaagcttgtccaaatgaaaaaaaaaaaaaaaaaaaaaaaaa

SEQ ID NO: 528 - DNA, 1885 bp, Homo Sapiens
  NM_000676
gggcaatttgttagttatccgccgccaccaagacgcggcacggcgcctggaccggaggggccccgcgcgggcgcgaactttgggctcgggcgagtgggtggtgctccgcccagcccgagacgggcgggcgcgcgggccaatgggtgccgcctcttggccgcggggggccccgacccgtgggtcccggccaccagcgccccagccccgaggctcagaagcggcaggcggaggcgcggtccgggcgctatggccatgcccggcgggtctcacgcggctgcccctcgcccggcgcgccttcggtagggggcgcccggggcccagctggcccggccatgctgctggagacacaggacgcgctgtacgtggcgctggagctggtcatcgccgcgctttcggtggcgggcaacgtgctggtgtgcgccgcggtgggcacggcgaacactctgcagacgcccaccaactacttcctggtgtccctggctgcggccgacgtggccgtggggctcttcgccatcccctttgccatcaccatcagcctgggcttctgcactgacttctacggctgcctcttcctcgcctgcttcgtgctggtgctcacgcagagctccatcttcagccttctggccgtggcagtcgacagatacctggccatctgtgtcccgctcaggtataaaagtttggtcacggggacccgagcaagaggggtcattgctgtcctctgggtccttgcctttggcatcggattgactccattcctggggtggaacagtaaagacagtgccaccaacaactgcacagaaccctgggatggaaccacgaatgaaagctgctgccttgtgaagtgtctctttgagaatgtggtccccatgagctacatggtatatttcaatttctttgggtgtgttctgcccccactgcttataatgctggtgatctacattaagatcttcctggtggcctgcaggcagcttcagcgcactgagctgatggaccactcgaggaccaccctccagcgggagatccatgcagccaagtcactggccatgattgtggggatttttgccctgtgctggttacctgtgcatgctgttaactgtgtcactcttttccagccagctcagggtaaaaataagcccaagtgggcaatgaatatggccattcttctgtcacatgccaattcagttgtcaatcccattgtctatgcttaccggaaccgagacttccgctacacttttcacaaaattatctccaggtatcttctctgccaagcagatgtcaagagtgggaatggtcaggctggggtacagcctgctctcggtgtgggcctatgatctaggctctcgcctcttccaggagaagatacaaatccacaagaaacaaagaggacacggctggttttcattgtgaaagatagctacacctcacaaggaaatggactgcctctcttgagcacttccctggagctaccacgtatctagctaatatgtatgtgtcagtagtaggctccaaggattgacaaatatatttatgatctattcagctgcttttactgtgtggattatgccaacagcttgaatggattctaacagactcttttgtttttaaaagtctgccttgtttatggtggaaaattactgaaactattttactgtgaaacagtgtgaactattataatgcaaatactttttaacttagaggcaatggaaaaataaaagttgactgtactaaaaatgtatacttgttgccaggaaggtgacctcaaaaattaaaagtataattattcggccgggcatggtggctcacacctgtaattccagcactttgggaggccaaggcaggcggatcacgaggtcaggagttcaaaaccagcctgtccaatatagtg

SEQ ID NO: 529 - DNA, 2261 bp, Homo Sapiens
  NM_000677
atctttgctgcaaaggctgggtatcggctgtgctcagcaaagcgtcaactcgtgcaagaacttagcaggaatagttctggctaaggttaggaggctgccaccaaagtctcttttttgttcctctgcttctcccgtttgcctccttatcatgagatctttttgctaagctggcagaaagattgcatagtcagtgcttccagctctgctcccacctgatcctgcactgtcctctggtccctgaatgaatgaactctgatacccaatcttgtctcgagccttctctatgccactcatggctcctcttctgctctttccatctttttgctgagagttctgagctctgtacttcctcttggcccatctcacttcctgaaacacccctgaagagggttgcttatcttgatggaactcaaaaagccaaaaagctgcaggcagaggcgttgaggacatctgtttggggaactaagagcagcagcactttcagattcagtccatatagagctgtcctacagcattctggaaacttgaggatgtgcggtgcataaaggggctggaagtgacccacctgtgatgagccctttctaaggagaagggtttccaagagatcaccccaccagaaaagggtaggaatgagcaagttgggaattttagactgtcactgcacatggacctctgggaagacgtctggcgagagctaggcccactggccctacagacggatcttgctggctcacctgtccctgtggaggttcccctgggaaggcaagatgcccaacaacagcactgctctgtcattggccaatgttacctacatcaccatggaaattttcattggactctgcgccatagtgggcaacgtgctggtcatctgcgtggtcaagctgaaccccagcctgcagaccaccaccttctatttcattgtctctctagccctggctgacattgctgttggggtgctggtcatgcctttggccattgttgtcagcctgggcatcacaatccacttctacagctgcctttttatgacttgcctactgcttatctttacccacgcctccatcatgtccttgctggccatcgctgtggaccgatacttgcgggtcaagcttaccgtcagatacaagagggtcaccactcacagaagaatatggctggccctgggcctttgctggctggtgtcattcctggtgggattgacccccatgtttggctggaacatgaaactgacctcagagtaccacagaaatgtcaccttcctttcatgccaatttgtttccgtcatgagaatggactacatggtatacttcagcttcctcacctggattttcatccccctggttgtcatgtgcgccatctatcttgacatcttttacatcattcggaacaaactcagtctgaacttatctaactccaaagagacaggtgcattttatggacgggagttcaagacggctaagtccttgtttctggttcttttcttgtttgctctgtcatggctgcctttatctatcatcaactgcatcatctactttaatggtgaggtaccacagcttgtgctgtacatgggcatcctgctgtcccatgccaactccatgatgaaccctatcgtctatgcctataaaataaagaagttcaaggaaacctaccttttgatcctcaaagcttgtgtggtctgccatccctctgattctttggacacaagcattgagaagaattctgagtagttatccatcagagatgactctgtctcattgaccttcagattccccatcaacaaacacttgagggcctgtatgcctgggccaagggatttttacatccttgattacttccactgaggtgggagcatctccagtgctccccaattatatctcccccactccactactctcttcctccacttcatttttcccttgtcctttctctctaattcagtgttttggaggcctgacttggggacaacgtattattgatattattgtctgttttccttcttcccaatagaagaataagtcatggagcctgaagggtgcctagttgacttactgacaaaaggctccagttgggctgaacatgtgtgtggtggtgactcatttccataccattgtggaattgagcagagaacctgctctcggaggatgcctaggagatgttgggaacagaaaaaataaactgagtttaagggggacttaaactgctgaattcacctgtggatgtttttgagtaaataaaagctaatagctaaaaaaaaaaaaaaaaaa

SEQ ID NO: 530 - DNA, 2211 bp, Homo Sapiens
  NM_000687
atgaatatgcaagtgcgaggaagatatttaaaggcgtcggcgccacgcgcatatccctgctcggcgctgcccgcccagttcctgttcccagactgaggcccagcccccttcgcccgtttccatcacgagtgccgccagcatgtctgacaaactgccctacaaagtcgccgacatcggcctggctgcctggggacgcaaggccctggacattgctgagaacgagatgccgggcctgatgcgtatgcgggagcggtactcggcctccaagccactgaagggcgcccgcatcgctggctgcctgcacatgaccgtggagacggccgtcctcattgagaccctcgtcaccctgggtgctgaggtgcagtggtccagctgcaacatcttctccacccaggaccatgcggcggctgccattgccaaggctggcattccggtgtatgcctggaagggcgaaacggacgaggagtacctgtggtgcattgagcagaccctgtacttcaaggacgggcccctcaacatgattctggacgacgggggcgacctcaccaacctcatccacaccaagtacccgcagcttctgccaggcatccgaggcatctctgaggagaccacgactggggtccacaacctctacaagatgatggccaatgggatcctcaaggtgcctgccatcaatgtcaatgactccgtcaccaagagcaagtttgacaacctctatggctgccgggagtccctcatagatggcatcaagcgggccacagatgtgatgattgccggcaaggtagcggtggtagcaggctatggtgatgtgggcaagggctgtgcccaggccctgcggggtttcggagcccgcgtcatcatcaccgagattgaccccatcaacgcactgcaggctgccatggagggctatgaggtgaccaccatggatgaggcctgtcaggagggcaacatctttgtcaccaccacaggctgtattgacatcatccttggccggcactttgagcagatgaaggatgatgccattgtgtgtaacattggacactttgacgtggagatcgatgtcaagtggctcaacgagaacgccgtggagaaggtgaacatcaagccgcaggtggaccggtatcggttgaagaatgggcgccgcatcatcctgctggccgagggtcggctggtcaacctgggttgtgccatgggccaccccagcttcgtgatgagtaactccttcaccaaccaggtgatggcgcagatcgagctgtggacccatccagacaagtaccccgttggggttcatttcctgcccaagaagctggatgaggcagtggctgaagcccacctgggcaagctgaatgtgaagttgaccaagctaactgagaagcaagcccagtacctgggcatgtcctgtgatggccccttcaagccggatcactaccgctactgagagccaggtctgcgtttcaccctccagctgctgtccttgcccaggccccacctctcctccctaagagctaatggcaccaactttgtgattggtttgtcagtgtcccccatcgactctctggggctgatcacttagtttttggcctctgctgcagccgtcatactgttccaaatgtggcagcgggaacagagtaccctcttcaagccccggtcatgatggaggtcccagccacagggaaccatgagctcagtggtcttggaacagctcactaagtcagtccttccttagcctggaagtcagtagtggagtcacaaagcccatgtgttttgccatctaggccttcacctggtctgtggacttatacctgtgtgcttggtttacaggtccagtggttcttcagcccatgacagatgagaaggggctatattgaagggcaaagaggaactgttgtttgaattttcctgagagcctggcttagtgctgggccttctcttaaacctcattacaatgaggttagtacttttagtccctgttttacaggggttagaatagactgttaaggggcaactgagaaagaacagagaagtgacagctaggggttgagaggggccagaaaaacatgaatgcaggcagatttcgtgaaatctgccaccactttataaccagatggttcctttcacaaccctgggtcaaaaagagaataatttggcctataatgttaaaagaaagcaggaaggtgggtaaataaaaatcttggtgcctggaagaaaaaa

SEQ ID NO: 531 - DNA, 2407 bp, Homo Sapiens
  NM_000688
ctgtatattaaggcgccggcgatcgcggcctgaggctgctcccggacaagggcaacgagcgtttcgtttggacttctcgacttgagtgcccgcctccttcgccgccgcctctgcagtcctcagcgcagttatgcccagttcttcccgctgtggggacacgaccacggaggaatccttgcttcagggactcgggaccctgctggaccccttcctcgggtttaggggatgtggggaccaggagaaagtcaggatccctaagagtcttccctgcctggatggatgagtggcttcttctccacctagattctttccacaggagccagcatacttcctgaacatggagagtgttgttcgccgctgcccattcttatcccgagtcccccaggcctttctgcagaaagcaggcaaatctctgttgttctatgcccaaaactgccccaagatgatggaagttggggccaagccagcccctcgggcattgtccactgcagcagtacactaccaacagatcaaagaaacccctccggccagtgagaaagacaaaactgctaaggccaaggtccaacagactcctgatggatcccagcagagtccagatggcacacagcttccgtctggacaccccttgcctgccacaagccagggcactgcaagcaaatgccctttcctggcagcacagatgaatcagagaggcagcagtgtcttctgcaaagccagtcttgagcttcaggaggatgtgcaggaaatgaatgccgtgaggaaagaggttgctgaaacctcagcaggccccagtgtggttagtgtgaaaaccgatggaggggatcccagtggactgctgaagaacttccaggacatcatgcaaaagcaaagaccagaaagagtgtctcatcttcttcaagataacttgccaaaatctgtttccacttttcagtatgatcgtttctttgagaaaaaaattgatgagaaaaagaatgaccacacctatcgagtttttaaaactgtgaaccggcgagcacacatcttccccatggcagatgactattcagactccctcatcaccaaaaagcaagtgtcagtctggtgcagtaatgactacctaggaatgagtcgccacccacgggtgtgtggggcagttatggacactttgaaacaacatggtgctggggcaggtggtactagaaatatttctggaactagtaaattccatgtggacttagagcgggagctggcagacctccatgggaaagatgccgcactcttgttttcctcgtgctttgtggccaatgactcaaccctcttcaccctggctaagatgatgccaggctgtgagatttactctgattctgggaaccatgcctccatgatccaagggattcgaaacagccgagtgccaaagtacatcttccgccacaatgatgtcagccacctcagagaactgctgcaaagatctgacccctcagtccccaagattgtggcatttgaaactgtccattcaatggatggggcggtgtgcccactggaagagctgtgtgatgtggcccatgagtttggagcaatcaccttcgtggatgaggtccacgcagtggggctttatggggctcgaggcggagggattggggatcgggatggagtcatgccaaaaatggacatcatttctggaacacttggcaaagcctttggttgtgttggagggtacatcgccagcacgagttctctgattgacaccgtacggtcctatgctgctggcttcatcttcaccacctctctgccacccatgctgctggctggagccctggagtctgtgcggatcctgaagagcgctgagggacgggtgcttcgccgccagcaccagcgcaacgtcaaactcatgagacagatgctaatggatgccggcctccctgttgtccactgccccagccacatcatccctgtgcgggttgcagatgctgctaaaaacacagaagtctgtgatgaactaatgagcagacataacatctacgtgcaagcaatcaattaccctacggtgccccggggagaagagctcctacggattgcccccacccctcaccacacaccccagatgatgaactacttccttgagaatctgctagtcacatggaagcaagtggggctggaactgaagcctcattcctcagctgagtgcaacttctgcaggaggccactgcattttgaagtgatgagtgaaagagagaagtcctatttctcaggcttgagcaagttggtatctgctcaggcctgagcatgacctcaattatttcacttaaccccaggccattatcatatccagatggtcttcagagttgtctttatatgtgaattaagttatattaaattttaatctatagtaaaaacatagtcctggaaataaattcttgcttaaatggtg

SEQ ID NO: 532 - DNA, 2116 bp, Homo Sapiens
  NM_000689
atcagaaccaaattgctgagccagtcacctgtgttccaggagccgaatcagaaatgtcatcctcaggcacgccagacttacctgtcctactcaccgatttgaagattcaatatactaagatcttcataaacaatgaatggcatgattcagtgagtggcaagaaatttcctgtctttaatcctgcaactgaggaggagctctgccaggtagaagaaggagataaggaggatgttgacaaggcagtgaaggccgcaagacaggcttttcagattggatccccgtggcgtactatggatgcttccgagagggggcgactattatacaagttggctgatttaatcgaaagagatcgtctgctgctggcgacaatggagtcaatgaatggtggaaaactctattccaatgcatatctgaatgatttagcaggctgcatcaaaacattgcgctactgtgcaggttgggctgacaagatccagggccgtacaataccaattgatggaaatttttttacatatacaagacatgaacctattggtgtatgtggccaaatcattccttggaatttcccgttggttatgctcatttggaagatagggcctgcactgagctgtggaaacacagtggttgtcaaaccagcagagcaaactcctctcactgctctccacgtggcatctttaataaaagaggcagggtttcctcctggagtagtgaatattgttcctggttatgggcctacagcaggggcagccatttcttctcacatggatatagacaaagtagccttcacaggatcaacagaggttggcaagttgatcaaagaagctgccgggaaaagcaatctgaagagggtgaccctggagcttggaggaaagagcccttgcattgtgttagctgatgccgacttggacaatgctgttgaatttgcacaccatggggtattctaccaccagggccagtgttgtatagccgcatccaggatttttgtggaagaatcaatttatgatgagtttgttcgaaggagtgttgagcgggctaagaagtatatccttggaaatcctctgaccccaggagtcactcaaggccctcagattgacaaggaacaatatgataaaatacttgacctcattgagagtgggaagaaagaaggggccaaactggaatgtggaggaggcccgtgggggaataaaggctactttgtccagcccacagtgttctctaatgttacagatgagatgcgcattgccaaagaggagatttttggaccagtgcagcaaatcatgaagtttaaatctttagatgacgtgatcaaaagagcaaacaatactttctatggcttatcagcaggagtgtttaccaaagacattgataaagccataacaatctcctctgctctgcaggcaggaacagtgtgggtgaattgctatggcgtggtaagtgcccagtgcccctttggtggattcaagatgtctggaaatggaagagaactgggagagtacggtttccatgaatatacagaggtcaaaacagtcacagtgaaaatctctcagaagaactcataaagaaaatacaagagtggagagaagctcttcaatagctaagcatctccttacagtcactaatatagtagattttaaagacaaaatttttcttttcttgatttttttaaacataagctaaatcatattagtattaatactacccatagaaaacttgacatgtagcttcttctgaaagaattatttgccttctgaaatgtgacccccaagtcctatcctaaataaaaaaagacaaattcggatgtatgatctctctagctttgtcatagttatgtgattttcctttgtagctacttttgcaggataataattttatagaaaaggaacagttgcatttagcttctttcccttagtgactcttgaagtacttaacatacacgttaactgcagagtaaattgctctgttcccagtagttataaagtccttggactgttttgaaaagtttcctaggatgtcatgtctgcttgtcaaaagaaataatccctgtaatatttagctgtaaactgaatataaagcttaataaaaacaaccttgcatgaaaaaaaaaaaaaaaaaaaaa

SEQ ID NO: 533 - DNA, 2857 bp, Homo Sapiens
  NM_000694
gacatttcttaacagcagggccaccaggcagagcgggacagccaggaggaagggcagcttggcagagcctcaggatggacccccttggggacacgctgcggcgactgcgggaggccttccacgcggggcgcacgcggccagctgagttccgggctgcgcagctccaaggcctgggccgcttcctgcaagaaaacaagcagcttctgcacgacgcactggcccaggacctgcacaagtcagccttcgagtcggaggtgtctgaggttgccatcagccagggcgaggtcaccctggccctcaggaacctccgggcctggatgaaggacgagcgtgtgcccaagaacctggccacgcagctggactccgccttcatccggaaggagccctttggcctggtcctcatcattgcgccctggaactatccgctgaacctgacgctggtgcccctcgtgggagccctcgctgcagggaactgtgtggtgctgaagccatcggagattagcaagaacgtcgagaagatcctggccgaggtgctgccccaatacgtggaccagagctgctttgctgtggtgctgggcgggccccaggagacggggcagctgctagagcacaggttcgactacatcttcttcacagggagccctcgtgtgggcaagattgttatgactgctgccgccaagcacctgacacctgtcaccctggagctggggggcaagaacccttgctacgtggacgacaactgcgacccccagaccgtggccaaccgcgtggcctggttccgctacttcaacgccggccagacctgcgtggcccccgactacgtcctatgcagccctgagatgcaggagaggctgctgcctgccctgcagagcaccatcacccgtttctatggcgacgacccccagagctccccaaacctgggccgcatcatcaaccagaaacagttccagcggctgcgggcattgctgggctgcggccgtgtggccattgggggccagagcgatgagagcgatcgctacatcgcccccacggtgctggtggatgtgcaggagatggagcctgtgatgcaggaggagatcttcgggcccatcctgcccatcgtgaacgtgcagagcttggacgaggccatcgagttcatcaaccggcgggagaagcccctggccctgtacgccttctccaacagcagccaggtggtcaagcgggtgctgacccagaccagcagcgggggcttctgtgggaacgacggcttcatgcacatgaccctggccagcctgccttttggaggagtgggtgccagtgggatgggccggtaccatggcaagttctccttcgacaccttctcccaccatcgcgcctgcctcctgcgcagcccggggatggagaagctcaacgccctccgctacccgccgcaatcgccgcgccgcctgaggatgctgctggtggccatggaggcccaaggctgcagctgcacactgctctgagcccttccccaggcccaggctgtagaccaccatgacagctgtcgcctgcggctggtggagacggggcctgggctcccgggcccgaggaggaaaaggattgccaaggctccagggcacccctcaaagcagcgcctgcctcctccctcctgggtcttccctctccctgcctcagcctcctccctcagccgctcccaaccatgagagccgaggtgggaggcatgggaaacagtgcagtgactcaccccctgcccccgcaccaaccacccatattcaggagaagaggacagacacggcacctctgagtcacccctctcctgtggagcgggcgtccgaggggccctggcatctgactcaggccacaccatggaatcactgcatccaaggccattcctgccctctctgagtctcagtttttccatttgttcagtggagagaattaaccattgatacctcctggctgggtgaggcggctcacacctgtaatcccagcactttgggaggccgaggcaggcggatcacctgaaatcaggagttcaagatcagcctggctaacatggcgaaaccccgtctctactaaaaatacaaaaattagcctggcgtggtggcgcatgcctgtaatcccagctactcaggaggctaaggcaggagaatcgcttgaacccgggaggtggaggttgccgtgagctgagattgcgtcactgaactccggcctgggtgacagaaggaggctctgccttaaaaaaaaaaaaaaaaaaaacctcctgggactgttgcaaggatgaaatgaaggattgagggattgagggattgctgagctggagctccaggtgtcctatctttctcagtggggtggcacggagcggggccgcctccctcttctctccaggcaggtggggctgtggttatgcgatagggtctcccttccctccagcccatgccagaggagcttgtaactctttatcctcatggtgcccactacgagtcatactcttccccatgctgctcatcctcctgggccccatccactcagccaaagcagaatgcagggtttcctgcctgacaacccttctcacctcccaagtcccacttttgaacaagctgatgattctgaaactggcccaatttcctaacaagccggatgcttgagaaacctacatttggacaatgagaggctgctcctgcggcctgcgggccacctcctcttccttggctcctgctttctttttagactatatcaacctacaactttagtcgggaagagggacaggggtggacctgagtttcgtctcctgtctctctggctgatgtcacctgaataaagccttcttccctggcaaaaaaaaaaaaaaaaaaaaaaaaaaaaaaaaaaaaaaaaa

SEQ ID NO: 534 - DNA, 2500 bp, Homo Sapiens
  NM_000696
ctgcccctaaaatctcctagaaccgatcccgcggccccgcccctcccgcggccccgcccctcccgcggcccgtcagcctctgccgcggagctgcgtccgccactcatgtttctccgagcaggcctggccgcgctctccccgcttcttcgcagtcttcggccctctcctgtcgccgccatgagcactggcaccttcgtcgtgtcgcagccgctcaattaccgcggcggggcccgcgtggagccggcggacgcctccggtaccgagaaagctttcgagccagcaaccggccgagtgatagctactttcacatgttcaggagaaaaggaagtaaatttggctgttcaaaatgcaaaggctgcttttaaaatatggagtcaaaaatctggcatggagcgttgccgaatccttttggaggctgccaggataataagggaacgggaggatgaaattgctactatggagtgcatcaacaatggcaagtccatctttgaggcccgcttggacattgacatttcctggcagtgcctggagtattatgcgggcttggctgcatccatggctggtgaacacatccagctcccaggtggatcgtttggttataccagaagagaaccacttggggtatgtgtgggaataggagcatggaactacccctttcagattgcctcttggaagtcggctccagcattagcctgtggtaatgccatggtctttaaaccttctccctttacacctgtttctgcattgctactggctgaaatctacagtgaggctggtgtacctcctgggctcttcaatgtggtgcagggaggggctgccacaggccagtttctgtgtcagcatcccgatgtggccaaagtctccttcactggaagtgtgcccactggcatgaagatcatggagatgtcagctaaaggaatcaaacctgttaccttggaacttggaggcaaatctccactcatcatcttctcagactgtgatatgaacaatgctgtaaagggggcgctgatggccaacttcctcacacaaggccaggtttgctgtaatggcacaagagtatttgtgcagaaagaaattcttgataaatttacagaggaagtggtgaaacagacccaaaggattaaaattggagatccccttctggaagatacaaggatgggtccactcatcaaccgaccacacctggagcgagtccttgggtttgtcaaagtggcaaaggagcagggtgctaaagtgttatgtggtggagatatatatgtacctgaagatcccaaattaaaggatggatattacatgagaccttgtgtattaactaattgcagagacgacatgacctgtgtgaaggaagagatctttgggcctgttatgtccattttatcatttgacactgaagctgaggttctagaaagagccaatgataccacttttggactagcagctggcgtctttaccagggacatccaacgggctcatagagtggtagctgagcttcaggctgggacgtgcttcattaacaactataacgtcagcccagtggagttgccctttggtggatataagaagtcaggatttggcagagagaacggccgtgtgacaatcgaatattattcacagctgaagactgtgtgtgtggagatgggtgatgtggaatctgctttttgaaaacctgcagtgaaacctattgacatggccacgctgtggaatgatgtgaattggccctgtttacagaggcagtacaactgaatgttattttacatccagaattttggcgttcagtataagagaatggttcatgttactctttctctctccatcagcttcctcactgaaaatgtgcattaagtgccttgtagatactaatcaagaaagctgtgattctcctcaaagcgtatttttgtgaaatcttttaagagccagtaacatacttctagagaacaggaaaagagactaggataatacatcttccacacatttggcccactgataatgttaattctctggcgtatttcaaagaacttgttcctggctgatccaagtgcagtggtatttacaactaattgatcacaaccagtttgtagatttctttgttccttctccattcccactgcttcacttgcctagtcttgaagaaaaaaaacaaaaaacaaaaaaaaaccttgttcctttataggttcctggtagaatcagtagagatgatttcagctcattgacatttttttaagctatatccccttgtcattccattgagaaagctgacaactgggatagggaggggattagataatagatggggtcaaattctgtgtgaatgtgaacttgcctagtaagcactttgtctctgttcactactgcgatagaggaaatctatctccctatcttgggtccttgaactacagcctgctgtcttacaccagtggagctaccctttaaatgtacaaattatttgtatgctaatgtaatatggtgaaattaaaataaatcacactgttaattgttttcc

SEQ ID NO: 535 - DNA, 1660 bp, Homo Sapiens
  NM_000699
aaaatgtgcttcttacaggaatataaatagtttctggaaaggacactgacaacttcaaagcaaaatgaagttctttctgttgcttttcaccattgggttctgctgggctcagtattccccaaatacacaacaaggacggacatctattgttcatctgtttgaatggcgatgggttgatattgctcttgaatgtgagcgatatttagctccgaagggatttggaggggttcaggtctctccaccaaatgaaaatgttgcaatttacaaccctttcagaccttggtgggaaagataccaaccagttagctataaattatgcacaagatctggaaatgaagatgaatttagaaacatggtgactagatgtaacaatgttggggttcgtatttatgtggatgctgtaattaatcatatgtgtggtaacgctgtgagtgcaggaacaagcagtacctgtggaagttacttcaaccctggaagtagggactttccagcagtcccatattctggatgggatttcaatgatggtaaatgtaaaactggaagtggagatatcgagaactacaatgatgctactcaggtcagagattgtcgtctgactggtcttcttgatcttgcactggagaaggattacgtgcgttctaagattgccgaatatatgaaccatctcattgacattggtgttgcagggttcagacttgatgcttccaagcacatgtggcctggagacataaaggcaattttggacaaactgcataatctaaacagtaactggttccctgcaggaagtaaacctttcatttaccaggaggtaattgatctgggtggtgagccaattaaaagcagtgactactttggtaatggccgggtgacagaattcaagtatggtgcaaaactcggcacagttattcgcaagtggaatggagagaagatgtcttacttaaagaactggggagaaggttggggtttcgtaccttctgacagagcgcttgtctttgtggataaccatgacaatcaacgaggacatggggctggaggagcctctattcttaccttctgggatgctaggctgtacaaaatggcagttggatttatgcttgctcatccttacggatttacacgagtaatgtcaagctaccgttggccaagacagtttcaaaatggaaacgatgttaatgattgggttgggccaccaaataataatggagtaattaaagaagttactattaatccagacactacttgtggcaatgactgggtctgtgaacatcgatggcgccaaataaggaacatggttattttccgcaatgtagtggatggccagccttttacaaattggtatgataatgggagcaaccaagtggcttttgggagaggaaacagaggattcattgttttcaacaatgatgactggtcattttctttaactttgcaaactggtcttcctgctggcacatactgtgatgtcatttctggagataaaattaatggcaattgcacaggcattaaaatttacgtttctgatgatggcaaagctcatttttctattagtaactctgctgaagatccatttattgcaattcatgctgaatctaaattgtaaaatttaaaattaaatgcatgtcctcaaaacaaaaaaaaaaaaaaaaaaaaaaaaaaaaaa

SEQ ID NO: 536 - DNA, 1399 bp, Homo Sapiens
  NM_000700
agtgtgaaatcttcagagaagaatttctctttagttctttgcaagaaggtagagataaagacactttttcaaaaatggcaatggtatcagaattcctcaagcaggcctggtttattgaaaatgaagagcaggaatatgttcaaactgtgaagtcatccaaaggtggtcccggatcagcggtgagcccctatcctaccttcaatccatcctcggatgtcgctgccttgcataaggccataatggttaaaggtgtggatgaagcaaccatcattgacattctaactaagcgaaacaatgcacagcgtcaacagatcaaagcagcatatctccaggaaacaggaaagcccctggatgaaacacttaagaaagcccttacaggtcaccttgaggaggttgttttagctctgctaaaaactccagcgcaatttgatgctgatgaacttcgtgctgccatgaagggccttggaactgatgaagatactctaattgagattttggcatcaagaactaacaaagaaatcagagacattaacagggtctacagagaggaactgaagagagatctggccaaagacataacctcagacacatctggagattttcggaacgctttgctttctcttgctaagggtgaccgatctgaggactttggtgtgaatgaagacttggctgattcagatgccagggccttgtatgaagcaggagaaaggagaaaggggacagacgtaaacgtgttcaataccatccttaccaccagaagctatccacaacttcgcagagtgtttcagaaatacaccaagtacagtaagcatgacatgaacaaagttctggacctggagttgaaaggtgacattgagaaatgcctcacagctatcgtgaagtgcgccacaagcaaaccagctttctttgcagagaagcttcatcaagccatgaaaggtgttggaactcgccataaggcattgatcaggattatggtttcccgttctgaaattgacatgaatgatatcaaagcattctatcagaagatgtatggtatctccctttgccaagccatcctggatgaaaccaaaggagattatgagaaaatcctggtggctctttgtggaggaaactaaacattcccttgatggtctcaagctatgatcagaagactttaattatatattttcatcctataagcttaaataggaaagtttcttcaacaggattacagtgtagctacctacatgctgaaaaatatagcctttaaatcatttttatattataactctgtataatagagataagtccattttttaaaaatgttttccccaaaccataaaaccctatacaagttgttctagtaacaatacatgagaaagatgtctatgtagctgaaaataaaatgacgtcacaagac

SEQ ID NO: 537 - DNA, 1791 bp, Homo Sapiens
  NM_000709
ctacgtgagtgccggaccgctgagtggttgttagccaagatggcggtagcgatcgctgcagcgagggtctggcggctaaaccgtggtttgagccaggctgccctcctgctgctgcggcagcctggggctcggggactggctagatctcacccccccaggcagcagcagcagttttcatctctggatgacaagccccagttcccaggggcctcggcggagtttatagataagttggaattcatccagcccaacgtcatctctggaatccccatctaccgcgtcatggaccggcaaggccagatcatcaaccccagcgaggacccccacctgccgaaggagaaggtgctgaagctctacaagagcatgacactgcttaacaccatggaccgcatcctctatgagtctcagcggcagggccggatctccttctacatgaccaactatggtgaggagggcacgcacgtggggagtgccgccgccctggacaacacggacctggtgtttggccagtaccgggaggcaggtgtgctgatgtatcgggactaccccctggaactattcatggcccagtgctatggcaacatcagtgacttgggcaaggggcgccagatgcctgtccactacggctgcaaggaacgccacttcgtcactatctcctctccactggccacgcagatccctcaggcggtgggggcggcgtacgcagccaagcgggccaatgccaacagggtcgtcatctgttacttcggcgagggggcagccagtgagggggacgcccatgccggcttcaacttcgctgccacacttgagtgccccatcatcttcttctgccggaacaatggctacgccatctccacgcccacctctgagcagtatcgcggcgatggcattgcagcacgaggccccgggtatggcatcatgtcaatccgcgtggatggtaatgatgtgtttgccgtatacaacgccacaaaggaggcccgacggcgggctgtggcagagaaccagcccttcctcatcgaggccatgacctacaggatcgggcaccacagcaccagtgacgacagttcagcgtaccgctcggtggatgaggtcaattactgggataaacaggaccaccccatctcccggctgcggcactatctgctgagccaaggctggtgggatgaggagcaggagaaggcctggaggaagcagtcccgcaggaaggtgatggaggcctttgagcaggccgagcggaagcccaaacccaaccccaacctactcttctcagacgtgtatcaggagatgcccgcccagctccgcaagcagcaggagtctctggcccgccacctgcagacctacggggagcactacccactggatcacttcgataagtgagacctgctcagcccacccccacccatcctcagctaccccgagaggtagccccactctaaggggagcagggggacctgacagcacaccactgtcttccccagtcagctccctctaaaatactcagcggccagggcggctgccactcttcacccctgctcctcccggctgttacattgtcaggggacagcatctgcagcagttgctgaggctccgtcagccccctcttcacctgttgttacagtgccttctcccaggggctgggtgagggcacattcaggactagaagcccctctgggcatggggtggacatggcaggtcagcctgtggaacttgcgcaggtgcgagtggccagcagaggtcacgaataaactgcatctctgcgcctggctctctaccaaaaaaaaaaaaaaaaaa

SEQ ID NO: 538 - DNA, 876 bp, Homo Sapiens
  NM_000714
cggggcggatgcggggacagcggcctggctaactcctgccaggcagtgcccttcccggagcgtgccctcgccgctgagctcccctgaacagcagctgcagcagccatggccccgccctgggtgcccgccatgggcttcacgctggcgcccagcctggggtgcttcgtgggctcccgctttgtccacggcgagggtctccgctggtacgccggcctgcagaagccctcgtggcacccgccccactgggtgctgggccctgtctggggcacgctctactcagccatggggtacggctcctacctggtctggaaagagctgggaggcttcacagagaaggctgtggttcccctgggcctctacactgggcagctggccctgaactgggcatggccccccatcttctttggtgcccgacaaatgggctgggccttggtggatctcctgctggtcagtggggcggcggcagccactaccgtggcctggtaccaggtgagcccgctggccgcccgcctgctctacccctacctggcctggctggccttcacgaccacactcaactactgcgtatggcgggacaaccatggctggcgtgggggacggcggctgccagagtgagtgcccggcccaccagggactgcagctgcaccagcaggtgccatcacgcttgtgatgtggtggccgtcacgctttcatgaccactgggcctgctagtctgtcagggccttggcccaggggtcagcagagcttcagaggtggccccacctgagcccccacccgggagcagtgtcctgtgctttctgcatgcttagagcatgttcttggaacatggaattttataagctgaataaagtttttgacttcctttaaaaaaaaaaa

SEQ ID NO: 539 - DNA, 1165 bp, Homo Sapiens
  NM_000717
cgctataaaacccaggccggcaggatcgctgcacccgcggcggcctcctcggtgcgcgacccccggctcagaggactctttgctgtcccgcaagatgcggatgctgctggcgctcctggccctctccgcggcgcggccatcggccagtgcagagtcacactggtgctacgaggttcaagccgagtcctccaactacccctgcttggtgccagtcaagtggggtggaaactgccagaaggaccgccagtcccccatcaacatcgtcaccaccaaggcaaaggtggacaaaaaactgggacgcttcttcttctctggctacgataagaagcaaacgtggactgtccaaaataacgggcactcagtgatgatgttgctggagaacaaggccagcatttctggaggaggactgcctgccccataccaggccaaacagttgcacctgcactggtccgacttgccatataagggctcggagcacagcctcgatggggagcactttgccatggagatgcacatagtacatgagaaagagaaggggacatcgaggaatgtgaaagaggcccaggaccctgaagacgaaattgcggtgctggcctttctggtggaggctggaacccaggtgaacgagggcttccagccactggtggaggcactgtctaatatccccaaacctgagatgagcactacgatggcagagagcagcctgttggacctgctccccaaggaggagaaactgaggcactacttccgctacctgggctcactcaccacaccgacctgcgatgagaaggtcgtctggactgtgttccgggagcccattcagcttcacagagaacagatcctggcattctctcagaagctgtactacgacaaggaacagacagtgagcatgaaggacaatgtcaggcccctgcagcagctggggcagcgcacggtgataaagtccggggccccgggtcggccgctgccctgggccctgcctgccctgctgggccccatgctggcctgcctgctggccggcttcctgcgatgatggctcacttctgcacgcagcctctctgttgcctcagctctccaagttccaggcttccggtccttagccttcccaggtgggactttaggcatgattaaaatatggacatatttttggagaaaaaaaaaaaaa

SEQ ID NO: 540 - DNA, 9790 bp, Homo Sapiens
  NM_000718
gcggcggcggctgcggcggtggggccgggcgaggtccgctgcggtcccggcggctccgtggctgctccgctctgagcgcctggcgcgccccgcgccctccctgccggggccgctgggccggggatgcacgcggggcccgggagccatggtccgcttcggggacgagctgggcggccgctatgggggccccggcggcggagagcgggcccggggcggcggggccggcggggcggggggcccgggtcccggggggctgcagcccggccagcgggtcctctacaagcaatcgatcgcgcagcgcgcgcggaccatggcgctgtacaaccccatcccggtcaagcagaactgcttcaccgtcaaccgctcgctcttcgtcttcagcgaggacaacgtcgtccgcaaatacgcgaagcgcatcaccgagtggcctccattcgagtatatgatcctggccaccatcatcgccaactgcatcgtgctggccctggagcagcacctccctgatggggacaaaacgcccatgtccgagcggctggacgacacggagccctatttcatcgggatcttttgcttcgaggcagggatcaaaatcatcgctctgggctttgtcttccacaagggctcttacctgcggaacggctggaacgtcatggacttcgtggtcgtcctcacagggatccttgccacggctggaactgacttcgacctgcgaacactgagggctgtgcgtgtgctgaggcccctgaagctggtgtctgggattccaagtttgcaggtggtgctcaagtccatcatgaaggccatggttccactcctgcagattgggctgcttctcttctttgccatcctcatgtttgccatcattggcctggagttctacatgggcaagttccacaaggcctgtttccccaacagcacagatgcggagcccgtgggtgacttcccctgtggcaaggaggccccagcccggctgtgcgagggcgacactgagtgccgggagtactggccaggacccaactttggcatcaccaactttgacaatatcctgtttgccatcttgacggtgttccagtgcatcaccatggagggctggactgacatcctctataatacaaacgatgcggccggcaacacctggaactggctctacttcatccctctcatcatcatcggctccttcttcatgctcaacctggtgctgggcgtgctctcgggggagtttgccaaggagcgagagagggtggagaaccgccgcgccttcctgaagctgcgccggcagcagcagatcgagcgagagctcaacgggtacctggagtggatcttcaaggcggaggaagtcatgctggccgaggaggacaggaatgcagaggagaagtcccctttggacgtgctgaagagagcggccaccaagaagagcagaaatgacctgatccacgcagaggagggagaggaccggtttgcagatctctgtgctgttggatcccccttcgcccgcgccagcctcaagagcgggaagacagagagctcgtcatacttccggaggaaggagaagatgttccggttttttatccggcgcatggtgaaggctcagagcttctactgggtggtgctgtgcgtggtggccctgaacacactgtgtgtggccatggtgcattacaaccagccgcggcggcttaccacgaccctgtattttgcagagtttgttttcctgggtctcttcctcacagagatgtccctgaagatgtatggcctggggcccagaagctacttccggtcctccttcaactgcttcgactttggggtcatcgtggggagcgtctttgaagtggtctgggcggccatcaagccgggaagctcctttgggatcagtgtgctgcgggccctccgcctgctgaggatcttcaaagtcacgaagtactggagctccctgcggaacctggtggtgtccctgctgaactccatgaagtccatcatcagcctgctcttcttgctcttcctgttcattgtggtcttcgccctgctggggatgcagctgtttgggggacagttcaacttccaggatgagactcccacaaccaacttcgacaccttccctgccgccatcctcactgtcttccagatcctgacgggagaggactggaatgcagtgatgtatcacgggatcgaatcgcaaggcggcgtcagcaaaggcatgttctcgtccttttacttcattgtcctgacactgttcggaaactacactctgctgaatgtctttctggccatcgctgtggacaacctggccaacgcccaagagctgaccaaggatgaagaggagatggaagaagcagccaatcagaagcttgctctgcaaaaggccaaagaagtggctgaagtcagccccatgtctgccgcgaacatctccatcgccgccaggcagcagaactcggccaaggcgcgctcggtgtgggagcagcgggccagccagctacggctgcagaacctgcgggccagctgcgaggcgctgtacagcgagatggaccccgaggagcggctgcgcttcgccactacgcgccacctgcggcccgacatgaagacgcacctggaccggccgctggtggtggagctgggccgcgacggcgcgcgggggcccgtgggaggcaaagcccgacctgaggctgcggaggcccccgagggcgtcgaccctccgcgcaggcaccaccggcaccgcgacaaggacaagacccccgcggcgggggaccaggaccgagcagaggccccgaaggcggagagcggggagcccggtgcccgggaggagcggccgcggccgcaccgcagccacagcaaggaggccgcggggcccccggaggcgcggagcgagcgcggccgaggcccaggccccgagggcggccggcggcaccaccggcgcggctccccggaggaggcggccgagcgggagccccgacgccaccgcgcgcaccggcaccaggatccgagcaaggagtgcgccggcgccaagggcgagcggcgcgcgcggcaccgcggcggcccccgagcggggccccgggaggcggagagcggggaggagccggcgcggcggcaccgggcccggcacaaggcgcagcctgctcacgaggctgtggagaaggagaccacggagaaggaggccacggagaaggaggctgagatagtggaagccgacaaggaaaaggagctccggaaccaccagccccgggagccacactgtgacctggagaccagtgggactgtgactgtgggtcccatgcacacactgcccagcacctgtctccagaaggtggaggaacagccagaggatgcagacaatcagcggaacgtcactcgcatgggcagtcagcccccagacccgaacactattgtacatatcccagtgatgctgacgggccctcttggggaagccacggtcgttcccagtggtaacgtggacctggaaagccaagcagaggggaagaaggaggtggaagcggatgacgtgatgaggagcggcccccggcctatcgtcccatacagctccatgttctgtttaagccccaccaacctgctccgccgcttctgccactacatcgtgaccatgaggtacttcgaggtggtcattctcgtggtcatcgccttgagcagcatcgccctggctgctgaggacccagtgcgcacagactcgcccaggaacaacgctctgaaatacctggattacattttcactggtgtctttacctttgagatggtgataaagatgatcgacttgggactgctgcttcaccctggagcctatttccgggacttgtggaacattctggacttcattgtggtcagtggcgccctggtggcgtttgctttctcaggatccaaagggaaagacatcaataccatcaagtctctgagagtccttcgtgtcctgcggcccctcaagaccatcaaacggctgcccaagctcaaggctgtgtttgactgtgtggtgaactccctgaagaatgtcctcaacatcttgattgtctacatgctcttcatgttcatatttgccgtcattgcggtgcagctcttcaaagggaagtttttctactgcacagatgaatccaaggagctggagagggactgcaggggtcagtatttggattatgagaaggaggaagtggaagctcagcccaggcagtggaagaaatacgactttcactacgacaatgtgctctgggctctgctgacgctgttcacagtgtccacgggagaaggctggcccatggtgctgaaacactccgtggatgccacctatgaggagcagggtccaagccctgggtaccgcatggagctgtccatcttctacgtggtctactttgtggtctttcccttcttcttcgtcaacatctttgtggctttgatcatcatcaccttccaggagcagggggacaaggtgatgtctgaatgcagcctggagaagaacgagagggcttgcattgacttcgccatcagcgccaaacccctgacacggtacatgccccaaaaccggcagtcgttccagtataagacgtggacatttgtggtctccccgccctttgaatacttcatcatggccatgatagccctcaacactgtggtgctgatgatgaagttctatgatgcaccctatgagtacgagctgatgctgaaatgcctgaacatcgtgttcacatccatgttctccatggaatgcgtgctgaagatcatcgcctttggggtgctgaactatttcagagatgcctggaatgtctttgactttgtcactgtgttgggaagtattactgatattttagtaacagagattgcggaaacgaacaatttcatcaacctcagcttcctccgcctctttcgagctgcgcggctgatcaagctgctccgccagggctacaccatccgcatcctgctgtggacctttgtccagtccttcaaggccctgccctacgtgtgtctgctcattgccatgctgttcttcatctacgccatcatcggcatgcaggtgtttgggaatattgccctggatgatgacaccagcatcaaccgccacaacaacttccggacgtttttgcaagccctgatgctgctgttcaggagcgccacgggggaggcctggcacgagatcatgctgtcctgcctgagcaaccaggcctgtgatgagcaggccaatgccaccgagtgtggaagtgactttgcctacttctacttcgtctccttcatcttcctgtgctcctttctgatgttgaacctctttgtggctgtgatcatggacaattttgagtacctcacgcgggactcttccatcctaggtcctcaccacttggatgagttcatccgggtctgggctgaatacgacccggctgcgtgtgggcgcatcagttacaatgacatgtttgagatgctgaaacacatgtccccgcctctggggctggggaagaaatgccctgctcgagttgcttacaagcgcctggttcgcatgaacatgcccatctccaacgaggacatgactgttcacttcacgtccacgctgatggccctcatccggacggcactggagatcaagctggccccagctgggacaaagcagcatcagtgtgacgcggagttgaggaaggagatttccgttgtgtgggccaatctgccccagaagactttggacttgctggtaccaccccataagcctgatgagatgacagtggggaaggtttatgcagctctgatgatattcgacttctacaagcagaacaaaaccaccagagaccagatgcagcaggctcctggaggcctctcccagatgggtcctgtgtccctgttccaccctctgaaggccaccctggagcagacacagccggctgtgctccgaggagcccgggttttccttcgacagaagagttccacctccctcagcaatggcggggccatacaaaaccaagagagtggcatcaaagagtctgtctcctggggcactcaaaggacccaggatgcaccccatgaggccaggccacccctggagcgtggccactccacagagatccctgtggggcggtcaggagcactggctgtggacgttcagatgcagagcataacccggaggggccctgatggggagccccagcctgggctggagagccagggtcgagcggcctccatgccccgccttgcggccgagactcagcccgtcacagatgccagccccatgaagcgctccatctccacgctggcccagcggccccgtgggactcatctttgcagcaccaccccggaccgcccaccccctagccaggcgtcgtcgcaccaccaccaccaccgctgccaccgccgcagggacaggaagcagaggtccctggagaaggggcccagcctgtctgccgatatggatggcgcaccaagcagtgctgtggggccggggctgcccccgggagaggggcctacaggctgccggcgggaacgagagcgccggcaggagcggggccggtcccaggagcggaggcagccctcatcctcctcctcggagaagcagcgcttctactcctgcgaccgctttgggggccgtgagcccccgaagcccaagccctccctcagcagccacccaacgtcgccaacagctggccaggagccgggaccccacccacagggcagtggttccgtgaatgggagccccttgctgtcaacatctggtgctagcacccccggccgcggtgggcggaggcagctcccccagacgcccctgactccccgccccagcatcacctacaagacggccaactcctcacccatccacttcgccggggctcagaccagcctccctgccttctccccaggccggctcagccgtgggctttccgaacacaacgccctgctgcagagagaccccctcagccagcccctggcccctggctctcgaattggctctgacccttacctggggcagcgtctggacagtgaggcctctgtccacgccctgcctgaggacactctcactttcgaggaggctgtggccaccaactcgggccgctcctccaggacttcctacgtgtcctccctgacctcccagtctcaccctctccgccgcgtgcccaacggttaccactgcaccctgggactcagctcgggtggccgagcacggcacagctaccaccaccctgaccaagaccactggtgctagctgcaccgtgaccgctcagacgcctgcatgcagcaggcgtgtgttccagtggatgagttttatcatccacacggggcagccggccctcgggggaggccttgcccaccttggtgaggctcctgtggcccctccctccccctcctcccctcttttactctagacgacgaataaagccctgttagaggatgcggctctctctgtccccttcctgtcctgccttcctgggtctcgtaccacacaccagaccctaaaccgcaggctgctgtgtgtggctgagaaggacccaggagtccaaatcccgtgtcctgggactcagcatccagcatgggtgcttggagccgttgtgaggagctctgcgtcctgtggggagcacccttcacgtggccgtgcggcacagagaagcagggcccacctgaaagtgcgccgagacctcgggacggaggggatggggagggggacacagtcgtggcttgtgcagcccgccagtgtcagcgaatgctcactcaggcaagctctgtcctccctggacaccgtcagccccacaggaaccgagctgggaagtgttcttgctgtggttgtgatttttaattgcaacacctctcattcttgtcacttctatatacgtgatgtagaaaaaatggaaaaccagaaaaatggggaaggaaatgttcacataactttaaaaaatcaaacctgtgaaagaaagatgtcagctttttgccacgtgtctttgtggcttatgcgaggagactccctgtgcagccctgtccggtccaggtggacgtagacggcccctggctctgctgctcttgaccaagtgcctgaccgccaggccctcacacccaggctcctgggcactgtggtgtgaggcgaggcctcgggatccatcaccgcaggatgctgtgaaaagtactcgcgatggcagccaggtagcaagcccttgccagtggagagcactggatgtcatggtggcaaacaaggcagccatttgctgtcctcctcccacgagtggaaggggtttccaaggaagccacagggcagctgaccacgtgcttgtgtgaggcattttcagtctgttctgcatatgattctcagggcacactctgtggtatgtgaaataggtttccttccacatacagcagaagagaggcaaaggctggtaggaaggaggaagacattggctgggggcttggatgtggggccgtcagggcaggagggaggaagccccagctggaatgaaactcagagcaagtgaccgagggaggacacggctcctgccactgaggccgggcacctgatgcccagcactgtcctggcgccagacacagggagcaggcagtcaagtgaggtctgacccccatggccacgctcaggagagaaagaccatgctcaggacactgtccaaggtgcacaagatgctgggaggtcccttgtttggtgaagaaagggagcatttagagcagttgatggtggtgtgtcctccgtgttctgaaattccagatgatctgtgttggattcttggcttctaccccatgattctcctcaaagaaattgtgtgtgatgtgtgtgtgtgtgtgtgtgtgtgtgtgtctgtgtcacaggagatgcagtgcctgtacaggtgtgttcagtgtgtggatgtcattaacccatagggctatgcaacaaaagacacatttaatagaagtaaaacacacaagaccgctgcctggtctcggggttcagcatgattgtgaccaaacctttttatagaatttccttacctgaaggcacaacactctgaaactttaaagataacagagtattttattccaatagaataaaccaggaatctcggactgtgcatgtgatcactgtgctcctgttgcaaagtagaaggatgtgtattttgacactgacgttttgtctcttgttccccagcccccagcccatgttatcttgggtgtcgaatgtgtccattccatgcagaaccacagccatttccccaggcagtgttgggtcgagaatccacttttctaaacccacacagcctagctggcttgtctagactcttctaggcattggaattgatgaaaactacagggagcggggaaaggagacattatgtcttgttttcctgactttgggttttgtttctcactgtgtcttctccggctatcatatatgtcccctgaatctcatagtgagctgccaaatttgaagtgcatcacccagttgtctgcatctggaaccagtcaagcagtggctgtagtttgaacaagttatgtgtgcatgtaacatatatacatatatacatatatacaagtatgtgcatgataatgtatatcttcgtactttttgatacaatgtattcatttgttaatttttaattatatttgatataaatcaaaggtttgttgcaaaactttatatttaagaagtgttaaaaaaaaaaaaaagtcccaaccatgcaacacaactgggacctacttaaaaagaaattctgtgattgactagtttgctgcctgagtcatatttatcagccaaactttggattctgctgttgtttctacaatgacattttgtatgaagcaaagtccttgaattaaaataaaaacttagcaaaaaatcaaaaacaaaacccca

SEQ ID NO: 541 - DNA, 9734 bp, Homo Sapiens
  NM_000721
gctgctgctgcctctccgaagagctcgcggagctccccagaggcggtggtccccgtgcttgtctggatgcggctctgagtctccgtgtgtctttctgcttgttgctgtgtgcgggtgttcggccgcgatcacctttgtgtgtcttctgtctgtttaaacctcaggatggctcgcttcggggaggcggtggtcgccaggccagggtccggcgatggagactcggaccagagcaggaaccggcaaggaacccccgtgccggcctcggggcaggcggccgcctacaagcagacgaaagcacagagggcgcggactatggctttgtacaaccccattcccgtccggcagaactgtttcaccgtcaacagatccctgttcatcttcggagaagataacattgtcaggaaatatgccaagaagctcatcgattggccgccatttgagtacatgatcctggccaccatcattgccaactgcatcgtcctggccctggagcagcatcttcctgaggatgacaagacccccatgtcccgaagactggagaagacagaaccttatttcattgggatcttttgctttgaagctgggatcaaaattgtggccctggggttcatcttccataagggctcttacctccgcaatggctggaatgtcatggacttcatcgtggtcctcagtggcatcctggccactgcaggaacccacttcaatactcacgtggacctgaggaccctccgggctgtgcgtgtcctgcggcctttgaagctcgtgtcagggatacctagcctgcagattgtgttgaagtccatcatgaaggccatggtacctcttctgcagattggccttctgctcttctttgccatcctgatgtttgctatcattggtttggagttctacagtggcaagttacatcgagcatgcttcatgaacaattcaggtattctagaaggatttgacccccctcacccatgtggtgtgcagggctgcccagctggttatgaatgcaaggactggatcggccccaatgatgggatcacccagtttgataacatcctttttgctgtgctgactgtcttccagtgcatcaccatggaagggtggaccactgtgctgtacaataccaatgatgccttaggagccacctggaattggctgtacttcatccccctcatcatcattggatccttctttgttctcaacctagtcctgggagtgctttccggggaatttgccaaagagagagagagagtggagaaccgaagggctttcatgaagctgcggcgccagcagcagattgagcgtgagctgaatggctaccgtgcctggatagacaaagcagaggaagtcatgctcgctgaagaaaataaaaatgctggaacatccgccttagaagtgcttcgaagggcaaccatcaagaggagccggacagaggccatgactcgagactccagtgatgagcactgtgttgatatctcctctgtgggcacacctctggcccgagccagtatcaaaagtgcaaaggtagacggggtctcttatttccggcacaaggaaaggcttctgcgcatctccattcgccacatggttaaatcccaggtgttttactggattgtgctgagccttgtggcactcaacactgcctgtgtggccattgtccatcacaaccagccccagtggctcacccacctcctctactatgcagaatttctgtttctgggactcttcctcttggagatgtccctgaagatgtatggcatggggcctcgcctttattttcactcttcattcaactgctttgattttggggtcacagtgggcagtatctttgaagtggtctgggcaatcttcagacctggtacgtcttttggaatcagtgtcttgcgagccctccggcttctaagaatatttaaaataaccaagtattgggcttccctacggaatttggtggtctccttgatgagctcaatgaagtctatcatcagtttgcttttcctcctcttcctcttcatcgttgtctttgctctcctaggaatgcagttatttggaggcaggtttaactttaatgatgggactccttcggcaaattttgataccttccctgcagccatcatgactgtgttccagatcctgacgggtgaggactggaatgaggtgatgtacaatgggatccgctcccagggtggggtcagctcaggcatgtggtctgccatctacttcattgtgctcaccttgtttggcaactacacgctactgaatgtgttcttggctatcgctgtggataatctcgccaacgcccaggaactgaccaaggatgaacaggaggaagaagaggccttcaaccagaaacatgcactgcagaaggccaaggaggtcagcccgatgtctgcacccaacatgccttcgatcgaaagagacagaaggagaagacaccacatgtcgatgtgggagccacgcagcagccacctgagggagcggaggcgccggcaccacatgtccgtgtgggagcagcgtaccagccagctgaggaagcacatgcagatgtccagccaggaggccctcaacagagaggaggcgccgaccatgaacccgctcaaccccctcaacccgctcagctccctcaacccgctcaatgcccaccccagcctttatcggcgacccagggccattgagggcctggccctgggcctggccctggagaagttcgaggaggagcgcatcagccgtggggggtccctcaagggggatggaggggaccgatccagtgccctggacaaccagaggacccctttgtccctgggccagcgggagccaccatggctggccaggccctgtcatggaaactgtgacccgactcagcaggaggcagggggaggagaggctgtggtgacctttgaggaccgggccaggcacaggcagagccaacggcgcagccggcatcgccgcgtcaggacagaaggcaaggagtcctcttcagcctcccggagcaggtctgccagccaggaacgcagtctggatgaagccatgcccactgaaggggagaaggaccatgagctcaggggcaaccatggtgccaaggagccaacgatccaagaagagagagcccaggatttaaggaggaccaacagtctgatggtgtccagaggctccgggctggcaggaggccttgatgaggctgacacccccctagtcctgccccatcctgagctggaagtggggaagcacgtggtgctgacggagcaggagccagaaggcagcagtgagcaggccctgctggggaatgtgcagctagacatgggccgggtcatcagccagagcgagcctgacctctcctgcatcacggccaacacggacaaggccaccaccgagagcaccagcgtcaccgtcgccatccccgacgtggaccccttggtggactcaaccgtggtgcacattagcaacaagacggatggggaagccagtcccttgaaggaggcagagatcagagaggatgaggaggaggtggagaagaagaagcagaagaaggagaagcgtgagacaggcaaagccatggtgccccacagctcaatgttcatcttcagcaccaccaacccgatccggagggcctgccactacatcgtgaacctgcgctactttgagatgtgcatcctcctggtgattgcagccagcagcatcgccctggcggcagaggaccccgtcctgaccaactcggagcgcaacaaagtcctgaggtattttgactatgtgttcacgggcgtgttcacctttgagatggttataaagatgatagaccaaggcttgatcctgcaggatgggtcctacttccgagacttgtggaacatcctggactttgtggtggtcgttggcgcattggtggcctttgctctggcgaacgctttgggaaccaacaaaggacgggacatcaagaccatcaagtctctgcgggtgctccgagttctaaggccactgaaaaccatcaagcgcttgcccaagctcaaggccgtcttcgactgcgtagtgacctccttgaagaatgtcttcaacatactcattgtgtacaagctcttcatgttcatctttgctgtcatcgcagttcagctcttcaagggaaagttcttttattgcacggacagttccaaggacacagagaaggagtgcataggcaactatgtagatcatgagaaaaacaagatggaggtgaagggccgggaatggaagcgccatgaattccactacgacaacattatctgggccctgctgaccctcttcaccgtctccacaggggaaggatggcctcaagttctgcagcactctgtagatgtgacagaggaagaccgaggcccaagccgcagcaaccgcatggagatgtctatcttttatgtagtctactttgtggtcttccccttcttctttgtcaatatctttgtggctctcatcatcatcaccttccaggagcaaggggataagatgatggaggagtgcagcctggagaagaatgagagggcgtgcatcgacttcgccatcagcgccaaacctctcacccgctacatgccgcagaacagacacaccttccagtaccgcgtgtggcactttgtggtgtctccgtcctttgagtacaccattatggccatgatcgccttgaatactgttgtgctgatgatgaagtattattctgctccctgtacctatgagctggccctgaagtacctgaatatcgccttcaccatggtgttttccctggaatgtgtcctgaaggtcatcgcttttggctttttgaactatttccgagacacctggaatatctttgacttcatcaccgtgattggcagtatcacagaaattatcctgacagacagcaagctggtgaacaccagtggcttcaatatgagctttctgaagctcttccgagctgcccgcctcataaagctcctgcgtcagggctataccatacgcattttgctgtggacctttgtgcagtcctttaaggccctcccttatgtctgccttttaattgccatgcttttcttcatttatgccatcattgggatgcaggtatttggaaacataaaattagacgaggagagtcacatcaaccggcacaacaacttccggagtttctttgggtccctaatgctactcttcaggagtgccacaggtgaggcctggcaggagattatgctgtcatgccttggggagaagggctgtgagcctgacaccaccgcaccatcagggcagaacgagaacgaacgctgcggcaccgatctggcctacgtgtactttgtctccttcatcttcttctgctccttcttgatgctcaacctgtttgtggccgtcatcatggacaactttgagtacctgactcgggactcctccatcctggggcctcaccacttggacgagtttgtccgcgtctgggcagaatatgaccgagcagcatgtggccgcatccattacactgagatgtatgaaatgctgactctcatgtcacctccgctaggcctcggcaagagatgtccctccaaagtggcatataagaggttggtcctgatgaacatgccagtagctgaggacatgacggtccacttcacctccacacttatggctctgatccggacagctctggacattaaaattgccaaaggtggtgcagacaggcagcagctagactcagagctacaaaaggagaccctagccatctggcctcacctatcccagaagatgctggatctgcttgtgcccatgcccaaagcctctgacctgactgtgggcaaaatctatgcagcaatgatgatcatggactactataagcagagtaaggtgaagaagcagaggcagcagctggaggaacagaaaaatgcccccatgttccagcgcatggagccttcatctctgcctcaggagatcattgctaatgccaaagccctgccttacctccagcaggaccccgtttcaggcctgagtggccggagtggatacccttcgatgagtccactctctccccaggatatattccagttggcttgtatggaccccgccgatgacggacagttccaagaacggcagtctctggtggtgacagaccctagctccatgagacgttcattttccactattcgggataagcgttcaaattcctcgtggttggaggaattctccatggagcgaagcagtgaaaatacctacaagtcccgtcgccggagttaccactcctccttgcggctgtcagcccaccgcctgaactctgattcaggccacaagtctgacactcaccgctcagggggcagggagcggggacgatcaaaagagcgaaagcatcttctctctcctgatgtctcccgctgcaattcagaagagcgagggacccaggctgactgggagtccccagagcgccgtcaatccaggtcacccagtgagggcaggtcacagacgcccaacagacagggcacaggttccctaagtgagagctccatcccctctgtctctgacaccagcaccccaagaagaagtcgtcggcagctcccacccgtcccgccaaagccccggcccctcctttcctacagctccctgattcgacacgcgggcagcatctctccacctgctgatggaagcgaggagggctccccgctgacctcccaagctctggagagcaacaatgcttgcctgaccgagtcttccaactctccgcacccccagcagagccaacatgcctccccacagcgctacatctccgagccctacttggccctgcacgaagactcccacgcctcagactgtggtgaggaggagacgctcactttcgaagcagccgtggctactagcctgggccgttccaacaccatcggctcagccccacccctgcggcatagctggcagatgcccaacgggcactatcggcggcggaggcgcggggggcctgggccaggcatgatgtgtggggctgtcaacaacctgctaagtgacacggaagaagatgacaaatgctagaggctgctcccccctccgatgcatgctcttctctcacatggagaaaaccaagacagaattgggaagccagtgcggcccgggggggaggaagagggaaaaggaagatggaaggacaccatgcattatcagagaagaggaagtaaaggacaatcagaacaccagtcaaacccaccaaattgctttattcccctttgcaagatgggcactgccatagttctgcctctttgctggggaaagaaaccaggaacgtggagggttattactgcgggagaagggacacgaggatggctttgcttccccttgccccttcccacttttctaaaagctgtggagggatctagctggcctatgtctacactcagtgccctgagaagcctggaagactttctggctcttaactggggagtagtggagaccataggagaggactctcctccctcaccagctcttacgcctcagccagcaccactgccaccagggcaactgcagcagcatctcatgcataaccctgtggcttgcttcccccagggcagcacaggctaagtcaggaacatcggatgccagggagggaggagaaagccgaagcgaaaggggtcagggtgctgaggcaacagcagcaagggctggtctggacaagaaaagccatagcccggcagcccctaccatgagggagacagagaaacagaactggtggtgctggggggtatagccccccatccttgaggcctgtcacccacacagtaggtgctgagagttaggacaggtcaggaagtcccccagggtccacaaaggtgcctgaggctctggtaagggtgaagataaaagtatttaacaaccgctatggcatcaatgtaagtggagtttggtcctagtgccggagcccatgctattccaggcattggctctttagatgccagtcatgggggaaccctgagggtgtgggtagagtagcaggggccacctaagagattaaaaacagtctgttttccaaccagtgtggaagcaattaaatatgcgtaacagtgctacggccacaccagcacctcctggctgaaggtcagcccacactctggtccatgaggcagcaaggccagtgctgtgccaagcccggtaaggccaagtgccgaggcccagccttccctgccactcctctgagagggcagaacacacatatccaagtaggctacccaccactgggtagggatttctgtaaagatgggaaaggctgatagattgaaataagcttctgtgaaagtctggatttactgaggacctcccctgaggagggaccgttgggaccgcagattctgcagctggtgtggggttcaggtcagtttgtcaggatgctttaaggtgattagtaaatatacctcagcttagacttgggctgctccttctagcaaagcaggctccagtggggcctcatcatacaggatgacaagactggggccctgttcaccttgaacatgcccctgggccaagatggggcttcacccctccccagagtaagagctggggctgacagtcccaccctgtcattcctaatagcccaaacgcagaagcactgagcaagagagccctttcttgccaagccagtgctcttttggtatatggcatacagctccattggaggggacacatcactggctttatctggtggaaatgtacctttcccttaagttcctccttagtgccatcacagcaggtgaatgggtgccctacggggccctccttcccccaccaggaacagatggaacctgccacccaggatcctgatctgccctgcactgagcactcagtggataaacactcctccagcccagacacactcctcctcttgggcaggagcaatccagagttgttatttttcttagaaggagcctcttttccctctattttttaaattgaaatataatagctgcatcagccctgaaaagccaaattcaaccacatggctggagaatcatttgtcatggccccgccttctcttctgatactaatggagcttcatgacccacggtcagcccccaaaccaaagttgtcccaacagaggaggccagtgaggcagagacagagctctcccactctcagaccctcttttgtcttcattttcctctcccacttagcacatgtgtgcttgagggtggctgggaatgtgatatacagcaccctgatcctaacaggtgtgattgttacgtaagacgctgatactgggccttgtattgcttttaaagtttcctctgctcagcatcatttcatgccaaagtgctgctatgggctgctttgtgtgcacaaaattgctttttccacctcggaaatgcagctttccctagggggaggcctacaacaggacgaccattctgagccagtgagtctattgcatggtgttttgagaaagggaattttagtgacaccttatgccatttcaagaggagaaatgcaggctggcagagcaatttccagaaatggaatttgcctgcaaatagtataaacaacactaaatttactgtgccaggaaatcttcctgaactccttgaactcatacacacaggtatttgagtcctgaataaagtgttggaaagcactgcagatgcggtcacctgactgaccacctgggttttctattaccagtgaatttcttttattcaccttcccttgaccaagaaattgggtttcttttccctcagcctgcacttactcttctattaagaccagaaaataaaataattttccgttgagtcacaaaaaaaaaaaaa

SEQ ID NO: 542 - DNA, 2714 bp, Homo Sapiens
  NM_000725
gggtggggggagcggtgatctgagctccgagcagctggtcttcgcggctcgctccctccttcgcgctctctcgctccctgccgccgcccgcagggctgcggggctcggtggcatctcccgggcgcggcccgcagtccttgcccctgcctccgggccgctcccgcccccggcgccgctcgctcccccgacccggactcccccatgtatgacgactcctacgtgcccgggtttgaggactcggaggcgggttcagccgactcctacaccagccgcccatctctggactcagacgtctccctggaggaggaccgggagagtgcccggcgtgaagtagagagccaggctcagcagcagctcgaaagggccaagcacaaacctgtggcatttgcggtgaggaccaatgtcagctactgtggcgtactggatgaggagtgcccagtccagggctctggagtcaactttgaggccaaagattttctgcacattaaagagaagtacagcaatgactggtggatcgggcggctagtgaaagagggcggggacatcgccttcatccccagcccccagcgcctggagagcatccggctcaaacaggagcagaaggccaggagatctgggaacccttccagcctgagtgacattggcaaccgacgctcccctccgccatctctagccaagcagaagcaaaagcaggcggaacatgttcccccatatgacgtggtgccctccatgcggcctgtggtgctggtgggaccctctctgaaaggttatgaggtcacagacatgatgcagaaggctctcttcgacttcctcaaacacagatttgatggcaggatctccatcacccgagtcacagccgacctctccctggcaaagcgatctgtgctcaacaatccgggcaagaggaccatcattgagcgctcctctgcccgctccagcattgcggaagtgcagagtgagatcgagcgcatatttgagctggccaaatccctgcagctagtagtgttggacgctgacaccatcaaccacccagcacagctggccaagacctcgctggcccccatcatcgtctttgtcaaagtgtcctcaccaaaggtactccagcgtctcattcgctcccgggggaagtcacagatgaagcacctgaccgtacagatgatggcatatgataagctggttcagtgcccaccggagtcatttgatgtgattctggatgagaaccagctggaggatgcctgtgagcacctggctgagtacctggaggtttactggcgggccacgcaccacccagcccctggccccggacttctgggtcctcccagtgccatccccggacttcagaaccagcagctgctgggggagcgtggcgaggagcactccccccttgagcgggacagcttgatgccctctgatgaggccagcgagagctcccgccaagcctggacaggatcttcacagcgtagctcccgccacctggaggaggactatgcagatgcctaccaggacctgtaccagcctcaccgccaacacacctcggggctgcctagtgctaacgggcatgacccccaagaccggcttctagcccaggactcagagcacaaccacagtgaccggaactggcagcgcaaccggccttggcccaaggatagctactgacagcctcctgctgccctaccctggcaggcacaggcgcagctggctggggggcccactccaggcagggtggcgttagactggcatcaggctggcactaggctcagcccccaaaaccccctgcccagccccagcttcagggctgcctgtggtcccaaggttctgggagaaacaggggaccccctcacctcctgggcagtgacccctactaggctcccattccaggtactagctgtgtgttctgcacccctggcaccttcctctcctcccacacaggaagctgccccactgggcagtgccctcaggccaggatccccttagcagggtccttcccaccagactcagggaagggatgccccattaaagtgacaaaagggtggggtgtgggcaccatggcatgaggaagaaacaaggtccctgagcaggcacaagtcctgacagtcaagggactgctttggcatccagggcctccagtcacctcactgccatacattagaaatgagacaatcaaagcccccccagggtggcacacccatctgtttgctggggtgtggcagccacatccaagactggagcagcaggctggccacgctcgggccagagagagctcacagctgaagctcttggagggaagggctctcctcaccctgccaggaagcttcttaacatgtgacaggaccagggaccaggagcatggtgaagccaagtggcagatgggagccaacctggatgggggtttggggaaggagggcatgtgtagcagagaacttaggggggcctccttgcctttctcattcttttgccctgcatcctgtcatttctgttcttgtccctcatacatctttggagaaccgggctccagactttgttccctgactcatagctgccgcttgttaggttagggttagatggggagagacagggcacagaggacctgtctccccggctactcttgccttatggctctagtgtgtgacctacagagcatgctccacaagcccctgcctcacctcactgtcatcactaataaacatcatgcacagtcaaaaaaaaaaaaaaaa

SEQ ID NO: 543 - DNA, 771 bp, Homo Sapiens
  NM_000732
agagaagcagacatcttctagttcctcccccactctcctctttccggtacctgtgagtcagctaggggagggcagctctcacccaggctgatagttcggtgacctggctttatctactggatgagttccgctgggagatggaacatagcacgtttctctctggcctggtactggctacccttctctcgcaagtgagccccttcaagatacctatagaggaacttgaggacagagtgtttgtgaattgcaataccagcatcacatgggtagagggaacggtgggaacactgctctcagacattacaagactggacctgggaaaacgcatcctggacccacgaggaatatataggtgtaatgggacagatatatacaaggacaaagaatctaccgtgcaagttcattatcgaatgtgccagagctgtgtggagctggatccagccaccgtggctggcatcattgtcactgatgtcattgccactctgctccttgctttgggagtcttctgctttgctggacatgagactggaaggctgtctggggctgccgacacacaagctctgttgaggaatgaccaggtctatcagcccctccgagatcgagatgatgctcagtacagccaccttggaggaaactgggctcggaacaagtgaacctgagactggtggcttctagaagcagccattaccaactgtaccttcccttcttgctcagccaataaatatatcctctttcactcagaaaaaaaaaaaaaaaaaaaaaaaaaaaaaa

SEQ ID NO: 544 - DNA, 1534 bp, Homo Sapiens
  NM_000733
tattgtcagagtcctcttgtttggccttctaggaaggctgtgggacccagctttcttcaaccagtccaggtggaggcctctgccttgaacgtttccaagtgaggtaaaacccgcaggcccagaggcctctctacttcctgtgtggggttcagaaaccctcctcccctcccagcctcaggtgcctgcttcagaaaatgaagtagtaagtctgctggcctccgccatcttagtaaagtaacagtcccatgaaacaaagatgcagtcgggcactcactggagagttctgggcctctgcctcttatcagttggcgtttgggggcaagatggtaatgaagaaatgggtggtattacacagacaccatataaagtctccatctctggaaccacagtaatattgacatgccctcagtatcctggatctgaaatactatggcaacacaatgataaaaacataggcggtgatgaggatgataaaaacataggcagtgatgaggatcacctgtcactgaaggaattttcagaattggagcaaagtggttattatgtctgctaccccagaggaagcaaaccagaagatgcgaacttttatctctacctgagggcaagagtgtgtgagaactgcatggagatggatgtgatgtcggtggccacaattgtcatagtggacatctgcatcactgggggcttgctgctgctggtttactactggagcaagaatagaaaggccaaggccaagcctgtgacacgaggagcgggtgctggcggcaggcaaaggggacaaaacaaggagaggccaccacctgttcccaacccagactatgagcccatccggaaaggccagcgggacctgtattctggcctgaatcagagacgcatctgaccctctggagaacactgcctcccgctggcccaggtctcctctccagtccccctgcgactccctgtttcctgggctagtcttggaccccacgagagagaatcgttcctcagcctcatggtgaactcgcgccctccagcctgatcccccgctccctcctccctgccttctctgctggtacccagtcctaaaatattgctgcttcctcttcctttgaagcatcatcagtagtcacaccctcacagctggcctgccctcttgccaggatatttatttgtgctattcactcccttccctttggatgtaacttctccgttcagttccctccttttcttgcatgtaagttgtcccccatcccaaagtattccatctacttttctatcgccgtccccttttgcagccctctctggggatggactgggtaaatgttgacagaggccctgccccgttcacagatcctggccctgagccagccctgtgctcctccctcccccaacactccctaccaaccccctaatcccctactccctccaccccccctccactgtaggccactggatggtcatttgcatctccgtaaatgtgctctgctcctcagctgagagagaaaaaaataaactgtatttggctgcaagaaaaaaaaaaaaaaaaaaaaaa

SEQ ID NO: 545 - DNA, 1687 bp, Homo Sapiens
  NM_000734
tgctttctcaaaggccccacagtcctccacttcctggggaggtagctgcagaataaaaccagcagagactccttttctcctaaccgtcccggccaccgctgcctcagcctctgcctcccagcctctttctgagggaaaggacaagatgaagtggaaggcgcttttcaccgcggccatcctgcaggcacagttgccgattacagaggcacagagctttggcctgctggatcccaaactctgctacctgctggatggaatcctcttcatctatggtgtcattctcactgccttgttcctgagagtgaagttcagcaggagcgcagacgcccccgcgtaccagcagggccagaaccagctctataacgagctcaatctaggacgaagagaggagtacgatgttttggacaagagacgtggccgggaccctgagatggggggaaagccgagaaggaagaaccctcaggaaggcctgtacaatgaactgcagaaagataagatggcggaggcctacagtgagattgggatgaaaggcgagcgccggaggggcaaggggcacgatggcctttaccagggtctcagtacagccaccaaggacacctacgacgcccttcacatgcaggccctgccccctcgctaacagccaggggatttcaccactcaaaggccagacctgcagacgcccagattatgagacacaggatgaagcatttacaacccggttcactcttctcagccactgaagtattcccctttatgtacaggatgctttggttatatttagctccaaaccttcacacacagactgttgtccctgcactctttaagggagtgtactcccagggcttacggccctggccttgggccctctggtttgccggtggtgcaggtagacctgtctcctggcggttcctcgttctccctgggaggcgggcgcactgcctctcacagctgagttgttgagtctgttttgtaaagtccccagagaaagcgcagatgctagcacatgccctaatgtctgtatcactctgtgtctgagtggcttcactcctgctgtaaatttggcttctgttgtcaccttcacctcctttcaaggtaactgtactgggccatgttgtgcctccctggtgagagggccgggcagaggggcagatggaaaggagcctaggccaggtgcaaccagggagctgcaggggcatgggaaggtgggcgggcaggggagggtcagccagggcctgcgagggcagcgggagcctccctgcctcaggcctctgtgccgcaccattgaactgtaccatgtgctacaggggccagaagatgaacagactgaccttgatgagctgtgcacaaagtggcataaaaaacatgtggttacacagtgtgaataaagtgctgcggagcaagaggaggccgttgattcacttcacgctttcagcgaatgacaaaatcatctttgtgaaggcctcgcaggaagacccaacacatgggacctataactgcccagcggacagtggcaggacaggaaaaacccgtcaatgtactaggatactgctgcgtcattacagggcacaggccatggatggaaaacgctctctgctctgctttttttctactgttttaatttatactggcatgctaaagccttcctattttgcataataaatgcttcagtgaaaatgcaaaaaaaaaa

SEQ ID NO: 546 - DNA, 3419 bp, Homo Sapiens
  NM_000760
gagtactgtgaagatgtggtccccaaggctagagctgaaaagaggcttagggccgggtgagccttccagccagggcctgcctccaagtgatgctcccccagggcagggggcataaggatggcacccagccaggtgggagcctgggccctgcccagcctcaaagctttgagctcaggaaatccggaggcaggggagggggacatcgttgccacattccccagccctttaagacccccaaggcaggaaggctgcccgggcctcaccagcttccctcacaggctccttcctgggaggaaggggctgcctgtgccctcgaaggcgcaagggagggcaggagggaggctcggaaggtgttgcaatccccagcccccgggcctgtcagaggctgagccattaacgacagagctcggggagagaagctggactgcagctggtttcaggaacttctcttgacgagaagagagaccaaggaggccaagcaggggctgggccagaggtgccaacatggggaaactgaggctcggctcggaaaggtgaagtaacttgtccaagatcacaaagctggtgaacatcaagttggtgctatggcaaggctgggaaactgcagcctgacttgggctgccctgatcatcctgctgctccccggaagtctggaggagtgcgggcacatcagtgtctcagcccccatcgtccacctgggggatcccatcacagcctcctgcatcatcaagcagaactgcagccatctggacccggagccacagattctgtggagactgggagcagagcttcagcccgggggcaggcagcagcgtctgtctgatgggacccaggaatctatcatcaccctgccccacctcaaccacactcaggcctttctctcctgctgcctgaactggggcaacagcctgcagatcctggaccaggttgagctgcgcgcaggctaccctccagccataccccacaacctctcctgcctcatgaacctcacaaccagcagcctcatctgccagtgggagccaggacctgagacccacctacccaccagcttcactctgaagagtttcaagagccggggcaactgtcagacccaaggggactccatcctggactgcgtgcccaaggacgggcagagccactgctgcatcccacgcaaacacctgctgttgtaccagaatatgggcatctgggtgcaggcagagaatgcgctggggaccagcatgtccccacaactgtgtcttgatcccatggatgttgtgaaactggagccccccatgctgcggaccatggaccccagccctgaagcggcccctccccaggcaggctgcctacagctgtgctgggagccatggcagccaggcctgcacataaatcagaagtgtgagctgcgccacaagccgcagcgtggagaagccagctgggcactggtgggccccctccccttggaggcccttcagtatgagctctgcgggctcctcccagccacggcctacaccctgcagatacgctgcatccgctggcccctgcctggccactggagcgactggagccccagcctggagctgagaactaccgaacgggcccccactgtcagactggacacatggtggcggcagaggcagctggaccccaggacagtgcagctgttctggaagccagtgcccctggaggaagacagcggacggatccaaggttatgtggtttcttggagaccctcaggccaggctggggccatcctgcccctctgcaacaccacagagctcagctgcaccttccacctgccttcagaagcccaggaggtggcccttgtggcctataactcagccgggacctctcgtcccactccggtggtcttctcagaaagcagaggcccagctctgaccagactccatgccatggcccgagaccctcacagcctctgggtaggctgggagccccccaatccatggcctcagggctatgtgattgagtggggcctgggcccccccagcgcgagcaatagcaacaagacctggaggatggaacagaatgggagagccacggggtttctgctgaaggagaacatcaggccctttcagctctatgagatcatcgtgactcccttgtaccaggacaccatgggaccctcccagcatgtctatgcctactctcaagaaatggctccctcccatgccccagagctgcatctaaagcacattggcaagacctgggcacagctggagtgggtgcctgagccccctgagctggggaagagcccccttacccactacaccatcttctggaccaacgctcagaaccagtccttctccgccatcctgaatgcctcctcccgtggctttgtcctccatggcctggagcccgccagtctgtatcacatccacctcatggctgccagccaggctggggccaccaacagtacagtcctcaccctgatgaccttgaccccagaggggtcggagctacacatcatcctgggcctgttcggcctcctgctgttgctcacctgcctctgtggaactgcctggctctgttgcagccccaacaggaagaatcccctctggccaagtgtcccagacccagctcacagcagcctgggctcctgggtgcccacaatcatggaggaggatgccttccagctgcccggccttggcacgccacccatcaccaagctcacagtgctggaggaggatgaaaagaagccggtgccctgggagtcccataacagctcagagacctgtggcctccccactctggtccagacctatgtgctccagggggacccaagagcagtttccacccagccccaatcccagtctggcaccagcgatcaggtcctttatgggcagctgctgggcagccccacaagcccagggccagggcactatctccgctgtgactccactcagcccctcttggcgggcctcacccccagccccaagtcctatgagaacctctggttccaggccagccccttggggaccctggtaaccccagccccaagccaggaggacgactgtgtctttgggccactgctcaacttccccctcctgcaggggatccgggtccatgggatggaggcgctggggagcttctagggcttcctggggttcccttcttgggcctgcctcttaaaggcctgagctagctggagaagaggggagggtccataagcccatgactaaaaactaccccagcccaggctctcaccatctccagtcaccagcatctccctctcctcccaatctccataggctgggcctcccaggcgatctgcatactttaaggaccagatcatgctccatccagccccacccaatggccttttgtgcttgtttcctataacttcagtattgtaaactagtttttggtttgcagtttttgttgttgtttatagacactcttgggtgtaaaaaaaaaaa

SEQ ID NO: 547 - DNA, 1473 bp, Homo Sapiens
  NM_000769
atggatccttttgtggtccttgtgctctgtctctcatgtttgcttctcctttcaatctggagacagagctctgggagaggaaaactccctcctggccccactcctctcccagtgattggaaatatcctacagatagatattaaggatgtcagcaaatccttaaccaatctctcaaaaatctatggccctgtgttcactctgtattttggcctggaacgcatggtggtgctgcatggatatgaagtggtgaaggaagccctgattgatcttggagaggagttttctggaagaggccatttcccactggctgaaagagctaacagaggatttggaatcgttttcagcaatggaaagagatggaaggagatccggcgtttctccctcatgacgctgcggaattttgggatggggaagaggagcattgaggaccgtgttcaagaggaagcccgctgccttgtggaggagttgagaaaaaccaaggcttcaccctgtgatcccactttcatcctgggctgtgctccctgcaatgtgatctgctccattattttccagaaacgtttcgattataaagatcagcaatttcttaacttgatggaaaaattgaatgaaaacatcaggattgtaagcaccccctggatccagatatgcaataattttcccactatcattgattatttcccgggaacccataacaaattacttaaaaaccttgcttttatggaaagtgatattttggagaaagtaaaagaacaccaagaatcgatggacatcaacaaccctcgggactttattgattgcttcctgatcaaaatggagaaggaaaagcaaaaccaacagtctgaattcactattgaaaacttggtaatcactgcagctgacttacttggagctgggacagagacaacaagcacaaccctgagatatgctctccttctcctgctgaagcacccagaggtcacagctaaagtccaggaagagattgaacgtgtcattggcagaaaccggagcccctgcatgcaggacaggggccacatgccctacacagatgctgtggtgcacgaggtccagagatacatcgacctcatccccaccagcctgccccatgcagtgacctgtgacgttaaattcagaaactacctcattcccaagggcacaaccatattaacttccctcacttctgtgctacatgacaacaaagaatttcccaacccagagatgtttgaccctcgtcactttctggatgaaggtggaaattttaagaaaagtaactacttcatgcctttctcagcaggaaaacggatttgtgtgggagagggcctggcccgcatggagctgtttttattcctgaccttcattttacagaactttaacctgaaatctctgattgacccaaaggaccttgacacaactcctgttgtcaatggatttgcttctgtcccgcccttctatcagctgtgcttcattcctgtctga

SEQ ID NO: 548 - DNA, 1876 bp, Homo Sapiens
  NM_000775
gagccatgctcgcggcgatgggctctctggcggctgccctctgggcagtggtccatcctcggactctcctactgggcactgtcgcctttctgctcgctgctgactttctcaaaagacggcgcccaaagaactacccgccggggccctggcgcctgcccttccttggcaacttcttccttgtggacttcgagcagtcgcacctggaggttcagctgtttgtgaagaaatatgggaacctttttagcttggagcttggtgacatatctgcagttcttattactggcttgcccttaatcaaagaagcccttatccacatggaccaaaactttgggaaccgccccgtgacccctatgcgagaacatatctttaagaaaaatggattgattatgtcaagtggccaggcatggaaggagcaaagaaggttcactctgacagcactaaggaactttggtttaggaaagaagagcttagaggaacgcattcaggaggaggcccaacacctcactgaagcaataaaagaggagaacggacagccttttgaccctcatttcaagatcaacaatgcagtttccaatatcatttgctccatcaccttcggagaacgctttgagtaccaggatagttggtttcagcagctgctgaagttactagatgaagtcacatacttggaggcttcaaagacatgccagctctacaatgtctttccatggataatgaaattcctgcctggaccccaccaaactctcttcagcaactggaaaaaactgaaattgtttgtttctcatatgattgacaaacacagaaaggattggaatcctgcagaaacaagagactttattgatgcttaccttaaagaaatgtcaaagcacacaggcaatcctacttcaagtttccatgaagaaaacctcatctgcagcaccctggacctcttctttgccggaaccgagacaacttccacaactctgcgatgggctctgctttatatggccctctacccagaaatccaagaaaaagtacaagctgagattgacagagtgattggccaggggcagcagccgagcacagccgcccgggagtccatgccctacaccaatgctgtcatccatgaggtgcagagaatgggcaacatcatccccctgaacgttcccagggaagtgacagttgataccactttggctgggtaccacctgcccaagggtaccatgatcctgaccaatttgacggcgctgcacagggaccccacagagtgggccacccctgacacattcaatccggaccattttctggagaatggacagtttaagaaaagggaagcctttatgcctttctcaataggaaagcgggcatgcctcggagaacagttggccaggactgagctgtttattttcttcacttcccttatgcaaaaatttaccttcaggcccccaaacaatgagaagctgagcctgaagtttagaatgggtatcaccatttccccagtcagtcaccgcctctgcgctgttcctcaggtgtaatattgttaagaaagaaaggggcaaggaaagtaagaagacatggcacgtgttctgaaaccactggtgtctgctcagatgtgttgggacaaaatgaaagtgactttcaagaaagatcagaggaatttgactcagagaaaactagatccaaatcccagctctactgtctcgtccgaattagccttgggaaaatcatttatatgctaaataatttacctttttatctaggagatgaaaagaggataatgtttccttccataaagaaagttcttgtaagaatcaaaagaaatggtgagctttaagtggtttgtaaaccataaaacacatcataaaagttctatctataaaaaaaaaaaaaaaaaaaa

SEQ ID NO: 549 - DNA, 2119 bp, Homo Sapiens
  NM_000783
agcgctggcggcggcggcaggtggcgcgggaggtcgcggcgcgccatggggctcccggcgctgctggccagtgcgctctgcaccttcgtgctgccgctgctgctcttcctggctgcgatcaagctctgggacctgtactgcgtgagcggccgcgaccgcagttgtgccctcccattgccccccgggactatgggcttccccttctttggggaaaccttgcagatggtactgcagcggaggaagttcctgcagatgaagcgcaggaaatacggcttcatctacaagacgcatctgttcgggcggcccaccgtacgggtgatgggcgcggacaatgtgcggcgcatcttgctcggagagcaccggctggtgtcggtccactggccagcgtcggtgcgcaccattctgggatctggctgcctctctaacctgcacgactcctcgcacaagcagcgcaagaaggtgattatgcgggccttcagccgcgaggcactcgaatgctacgtgccggtgatcaccgaggaagtgggcagcagcctggagcagtggctgagctgcggcgagcgcggcctcctggtctaccccgaggtgaagcgcctcatgttccgaatcgccatgcgcatcctactgggctgcgaaccccaactggcgggcgacggggactccgagcagcagcttgtggaggccttcgaggaaatgacccgcaatctcttctcgctgcccatcgacgtgcccttcagcgggctgtaccggggcatgaaggcgcggaacctcattcacgcgcgcatcgagcagaacattcgcgccaagatctgcgggctgcgggcatccgaggcgggccagggctgcaaagacgcgctgcagctgttgatcgagcactcgtgggagaggggagagcggctggacatgcaggcactaaagcaatcttcaaccgaactcctctttggaggacacgaaaccacggccagtgcagccacatctctgatcacttacctggggctctacccacatgttctccagaaagtgcgagaagagctgaagagtaagggtttactttgcaagagcaatcaagacaacaagttggacatggaaattttggaacaacttaaatacatcgggtgtgttattaaggagacccttcgactgaatcccccagttccaggagggtttcgggttgctctgaagacttttgaattaaatggataccagattcccaagggctggaatgttatctacagtatctgtgatactcatgatgtggcagagatcttcaccaacaaggaagaatttaatcctgaccgattcatgctgcctcacccagaggatgcatccaggttcagcttcattccatttggaggaggccttaggagctgtgtaggcaaagaatttgcaaaaattcttctcaaaatatttacagtggagctggccaggcattgtgactggcagcttctaaatggacctcctacaatgaaaaccagtcccaccgtgtatcctgtggacaatctccctgcaagattcacccatttccatggggaaatctgatgagcttgaatgttcaaacctgagacttattggaagtgtacatatgagtttttaaggagtgttgtgttgactttatatttaatttctaaatgtatattataatatttatgtgttttgactatactaccacaatctttaaatattaaaataatgaatttgtatcatttccaaataaagtaaaatttgaaggtacttttctggtattttaagattcctgttgggtaaaactcaccagtttagtattttcttagtgtatttaaccagattttacaatgcctacctggacttatttgtcatctttgcatctgttttctgtgagaagaaatcttagctgttttttatgttaacagttattagaaaatatatgtctgtgtgtgttattccagacgtatctctgtaaattcttctacagtcacttagattccctatttggaaaattgatccaagttaatttaatttttttttggtttgctgtactttagggaaagatgaacctgaaaaggtaacactgagaactgtcactctaacctctccagcttatctaacatgtcataaacataataaatctgtgttgtccaat

SEQ ID NO: 550 - DNA, 2388 bp, Homo Sapiens
  NM_000784
gggagaagccgagggcagcttagccacggccggttcccgttccctccaggacgcgagggtcgccttgggtggggaaccgcgaccgggcgaggacctatcccggtgtggggcttcccgatttcgaaagaatctcgctgcacccccgcccagagttcagaccaagcgaaaagttatttgagaggcctcgggggcgcggggtgaggagtcgtggcggaggccttggtcggggcgccgtggatatccccgagtcaccgcgtccctctcctgcagctcccgcgtcgctgggaggagcgagggagcgagcgggaaggggtctagctggcctttgctcggccctccccagcgcccggctttgaacccgccctgcactgctgtctgggcgggtccggggactcagcactcgacccaaaggtgcaggcgcgcgagcacaacccatggctgcgctgggctgcgcgaggctgaggtgggcgctgcgaggggccggccgtggcctctgcccccacggggccagagccaaggccgcgatccctgccgccctcccctcggacaaggccaccggagctcccggagccgggcctggtgtccggcggcggcaacggagcttagaggagattccacgtctaggacagctgcgcttcttctttcagctgttcgttcaaggctatgccctgcaactgcaccagttacaggtgctttacaaggccaagtacggtccaatgtggatgtcctacttagggcctcagatgcacgtgaacctggccagtgccccgctcttggagcaagtgatgcggcaagagggcaagtacccagtacggaacgacatggagctatggaaggagcaccgggaccagcacgacctgacctatgggccgttcaccacggaaggacaccactggtaccagctgcgccaggctctgaaccagcggttgctgaagccagcggaagcagcgctctatacggatgctttcaatgaggtgattgatgactttatgactcgactggaccagctgcgggcagagagtgcttcggggaaccaggtgtcggacatggctcaactcttctactactttgccttggaagctatttgctacatcctgttcgagaaacgcattggctgcctgcagcgatccatccccgaggacaccgtgaccttcgtcagatccatcgggttaatgttccagaactcactctatgccaccttcctccccaagtggactcgccccgtgctgcctttctggaagcgatacctggatggttggaatgccatcttttcctttgggaagaagctgattgatgagaagctcgaagatatggaggcccaactgcaggcagcagggccagatggcatccaggtgtctggctacctgcacttcttactggccagtggacagctcagtcctcgggaggccatgggcagcctgcctgagctgctcatggctggagtggacacgacatccaacacgctgacatgggccctgtaccacctctcaaaggaccctgagatccaggaggccttgcacgaggaagtggtgggtgtggtgccagccgggcaagtgccccagcacaaggactttgcccacatgccgttgctcaaagctgtgcttaaggagactctgcgtctctaccctgtggtccccacaaactcccggatcatagaaaaggaaattgaagttgatggcttcctcttccccaagaacacccagtttgtgttctgccactatgtggtgtcccgggaccccactgccttctctgagcctgaaagcttccagccccaccgctggctgagaaacagccagcctgctacccccaggatccagcacccatttggctctgtgccctttggctatggggtccgggcctgcctgggccgcaggattgcagagctggagatgcagctactcctcgcaaggctgatccagaagtacaaggtggtcctggccccggagacgggggagttgaagagtgtggcccgcattgtcctggttcccaataagaaagtgggcctgcagttcctgcagagacagtgctgagctgagtctccgccttgctggggcttgtcctagaggctccagctctggcacagtggttcctggctgctgccatgtctcagatgaggagggagagaaggaggccgccagactcgagaggtgggaggaactccttgcacacaccctgagcttttgccacttctatcatttttgagcaactccctctcagctaaaaggccacccctttatcgcattgctgtccttgggtagaatataaaataaagggacttttatttcttattggaaaaaaaaaaaaaaaaaaaaaaaaaaaaaaaaaaaaaaaaaaaaaaaaaaaaaaaaaaaaaaaaaaaaaaaaaaaaaaaaaaaaaaaaaaaaaaaa

SEQ ID NO: 551 - DNA, 1643 bp, Homo Sapiens
  NM_000801
tttccgggacgtcgcgcgccgtgtggggcgcgcacgcagggctgggcgtgagggggcgtgcgcgtgcgcaggcgacgcgccgaggtactaggcagagccgtggaaccgccgccaggtcgctgttggtccacgccgcccgtcgcgccgcccgcccgctcagcgtccgccgccgccatgggagtgcaggtggaaaccatctccccaggagacgggcgcaccttccccaagcgcggccagacctgcgtggtgcactacaccgggatgcttgaagatggaaagaaatttgattcctcccgggacagaaacaagccctttaagtttatgctaggcaagcaggaggtgatccgaggctgggaagaaggggttgcccagatgagtgtgggtcagagagccaaactgactatatctccagattatgcctatggtgccactgggcacccaggcatcatcccaccacatgccactctcgtcttcgatgtggagcttctaaaactggaatgacaggaatggcctcctcccttagctccctgttcttggatctgccatggagggatctggtgcctccagacatgtgcacatgaatccatatggagcttttcctgatgttccactccactttgtatagacatctgccctgactgaatgtgttctgtcactcagctttgcttccgacacctctgtttcctcttcccctttctcctcgtatgtgtgtttacctaaactatatgccataaacctcaagttattcattttattttgttttcattttggggtgaagattcagtttcagtcttttggatataggtttccaattaagtacatggtcaagtattaacagcacaagtggtaggttaacattagaataggaattggtgttggggggggggtttgcaagaatattttattttaattttttggatgaaatttttatctattatatattaaacattcttgctgctgcgctgcaaagccatagcagatttgaggcgctgttgaggactgaattactctccaagttgagagatgtctttgggttaaattaaaagccctacctaaaactgaggtggggatggggagagcctttgcctccaccattcccacccaccctccccttaaaccctctgcctttgaaagtagatcatgttcactgcaatgctggacactacaggtatctgtccctgggccagcagggacctctgaagccttctttgtggccttttttttttttcatcctgtggtttttctaatggactttcaggaattttgtaatctcataactttccaagctccaccacttcctaaatcttaagaactttaattgacagtttcaattgaaggtgctgtttgtagacttaacacccagtgaaagcccagccatcatgacaaatccttgaatgttctcttaagaaaatgatgctggtcatcgcagcttcagcatctcctgttttttgatgcttggctccctctgctgatctcagtttcctggcttttcctccctcagccccttctcacccctttgctgtcctgtgtagtgatttggtgagaaatcgttgctgcacccttcccccagcaccatttatgagtctcaagttttattattgcaataaaagtgctttatgccggcttttctcagaaaaaaaaaa

SEQ ID NO: 552 - DNA, 1145 bp, Homo Sapiens
  NM_000803
atttcactcagtgcttaccagagcgcgttgtctaccctgtaccgaagacagaggctgtggggacagcctaggggcctggatctattgcctacttagagagaggccaactcagacacagccgtgtatgctcccagcagcaacggaggttcagctccgcctgcagggacagaaagacatggtctggaaatggatgccacttctgctgcttctggtctgtgtagccaccatgtgcagtgcccaggacaggactgatctcctcaatgtctgtatggatgccaagcaccacaagacaaagccaggtcctgaggacaagctgcatgaccaatgcagtccctggaagaagaatgcctgctgcacagccagcaccagccaggagctgcacaaggacacctcccgcctgtacaactttaactgggaccactgcggcaagatggagcccgcctgcaagcgccacttcatccaggacacctgtctctatgagtgctcacccaacctggggccctggatccagcaggtgaatcagagctggcgcaaagaacgcttcctggatgtgcccttatgcaaagaggactgtcagcgctggtgggaggattgtcacacctcccacacgtgcaagagcaactggcacagaggatgggactggacctcaggagttaacaagtgcccagctggggctctctgccgcacctttgagtcctacttccccactccagctgccctttgtgaaggcctctggagtcactcatacaaggtcagcaactacagccgagggagcggccgctgcatccagatgtggtttgattcagcccagggcaaccccaacgaggaagtggcgaggttctatgctgcagccatgcatgtgaatgctggtgagatgcttcatgggactgggggtctcctgctcagtctggccctgatgctgcaactctggctccttggctgagttcagtcctcccagactacctgccctcagcttggataaccaggctgggctcagctcagctcccacaaatgacagccccttaagcatgcttctattagtcacctaaccctctgtcacccagtctgttgctgctccatggtggggccaagagtcacttctaataaacagactgttttctaataattccaaaaaaaaaaaaaaa

SEQ ID NO: 553 - DNA, 858 bp, Homo Sapiens
  NM_000804
agagcctggacctacagcgctgttggtggaggtcctgcctccaggaatagatggacatggcctggcagatgatgcagctgctgcttctggctttggtgactgctgcggggagtgcccagcccaggagtgcgcgggccaggacggacctgctcaatgtctgcatgaacgccaagcaccacaagacacagcccagccccgaggacgagctgtatggccagtgcagtccctggaagaagaatgcctgctgcacggccagcaccagccaggagctgcacaaggacacctcccgcctgtacaactttaactgggatcactgtggtaagatggaacccacctgcaagcgccactttatccaggacagctgtctctatgagtgctcacccaacctggggccctggatccggcaggtcaaccagagctggcgcaaagagcgcattctgaacgtgcccctgtgcaaagaggactgtgagcgctggtgggaggactgtcgcacctcctacacctgcaaaagcaactggcacaaaggctggaattggacctcagggattaatgagtgtccggccggggccctctgcagcacctttgagtcctacttccccactccagccgccctttgtgaaggcctctggagccactccttcaaggtcagcaactatagtcgagggagcggccgctgcatccagatgtggtttgactcagcccagggcaaccccaatgaggaggtggccaagttctatgctgcggccatgaatgctggggccccgtctcgtgggattattgattcctgatccaagaagggtcctctggggttcttccaacaacctattctaatagacaaatccacatgaaaaaaaaaaa

SEQ ID NO: 554 - DNA, 3376 bp, Homo Sapiens
  NM_000819
agtgaggggcggtgccgcgctggtcccgcgccggtcccggtgggccgacttccggcgagcgggcaagcgggaaccaggtggccacccggtgtcggtttcattttcctttggaatttctgctttacagacagaacaatggcagcccgagtacttataattggcagtggaggaagggaacatacgctggcctggaaacttgcacagtctcatcatgtcaaacaagtgttggttgccccaggaaacgcaggcactgcctgctctgaaaagatttcaaataccgccatctcaatcagtgaccacactgcccttgctcaattctgcaaagagaagaaaattgaatttgtagttgttggaccagaagcacctctggctgctgggattgttgggaacctgaggtctgcaggagtgcaatgctttggcccaacagcagaagcggctcagttagagtccagcaaaaggtttgccaaagagtttatggacagacatggaatcccaaccgcacaatggaaggctttcaccaaacctgaagaagcctgcagcttcattttgagtgcagacttccctgctttggttgtgaaggccagtggtcttgcagctggaaaaggggtgattgttgcaaagagcaaagaagaggcctgcaaagctgtacaagagatcatgcaggagaaagcctttggggcagctggagaaacaattgtcattgaagaacttcttgacggagaagaggtgtcgtgtctgtgtttcactgatggcaagactgtggcccccatgcccccagcacaggaccataagcgattactggagggagatggtggccctaacacagggggaatgggagcctattgtccagcccctcaggtttctaatgatctattactaaaaattaaagatactgttcttcagaggacagtggatggcatgcagcaagagggtactccatatacaggtattctctatgctggaataatgctgaccaagaatggcccaaaagttctagagtttaattgccgttttggtgatccagagtgccaagtaatcctcccacttcttaaaagtgatctttatgaagtgattcagtccaccttagatggactgctctgcacatctctgcctgtttggctagaaaaccacaccgccctaactgttgtcatggcaagtaaaggttatcctggagactacaccaagggtgtagagataacagggtttcctgaggctcaagctctaggactggaggtgttccatgcaggcactgccctcaaaaatggcaaagtagtaactcatgggggtagagttcttgcagtcacagccatccgggaaaatctcatatcagcccttgaggaagccaagaaaggactagctgctataaagtttgagggagcaatttataggaaagacgtcggctttcgtgccatagctttcctccagcagcccaggagtttgacttacaaggaatctggagtagatatcgcagctggaaatatgctggtcaagaaaattcagcctttagcaaaagccacttccagatcaggctgtaaagttgatcttggaggttttgctggtctttttgatttaaaagcagctggtttcaaagatccccttctggcctctggaacagatggcgttggaactaaactaaagattgcccagctatgcaataaacatgataccattggtcaagatttggtagcaatgtgtgttaatgatattctggcacaaggagcagagcccctcttcttccttgattacttttcctgtggaaaacttgacctcagtgtaactgaagctgttgttgctggaattgctaaagcttgtggaaaagctggatgtgctctccttggaggtgaaacagcagaaatgcctgacatgtatccccctggagagtatgacctagctgggtttgccgttggtgccatggagcgagatcagaaactccctcacctggaaagaatcactgagggtgatgttgttgttggaatagcttcatctggtcttcatagcaatggatttagccttgtgaggaaaatcgtggcaaaatcttccctccagtactcctctccagcacctgatggttgtggtgaccagactttaggggacttacttctcacgcctaccagaatctacagccattcactgttacctgtcctacgttcaggacatgtcaaagcctttgcccatattactggtggaggattactagagaacatccccagagtcctccctgagaaacttggggtagatttagatgcccagacctggaggatccccagggtcttctcatggttgcagcaggaaggacacctctctgaggaagagatggccagaacatttaactgtggggttggcgctgtccttgtggtatcaaaggagcagacagagcagattctgagggatatccagcagcacaaggaagaagcctgggtgattggcagtgtggttgcacgagctgaaggttccccacgtgtgaaagtcaagaatctgattgaaagcatgcaaataaatgggtcagtgttgaagaatggctccctgacaaatcatttctcttttgaaaaaaaaaaggccagagtggctgtcttaatatctggaacaggatcgaacctgcaagcacttatagacagtactcgggaaccaaatagctctgcacaaattgatattgttatctccaacaaagccgcagtagctgggttagataaagcggaaagagctggtattcccactagagtaattaatcataaactgtataaaaatcgtgtagaatttgacagtgcaattgacctagtccttgaagagttctccatagacatagtctgtcttgcaggattcatgagaattctttctggcccctttgtccaaaagtggaatggaaaaatgctcaatatccacccatccttgctcccttcttttaagggttcaaatgcccatgagcaagccctggaaaccggagtcacagttactgggtgcactgtacactttgtagctgaagatgtggatgctggacagattattttgcaagaagctgttcccgtgaagaggggtgatactgtcgcaactctttctgaaagagtaaaattagcagaacataaaatatttcctgcagcccttcagctggtggccagtggaactgtacagcttggagaaaatggcaagatctgttgggttaaagaggaatgaagccttttaattcagaaatggggccagtttagaaagaattatttgctgtttgcatggtggttttttatcatggacttggcccaaaagaaaaactgctaaaagacaaaaaagacctcacccttacttcatctatttttttaataaatagagactcactaaaaacaagactagttagtgcagcatatctgagacaaaaaaaaaaaaaaaa

SEQ ID NO: 555 - DNA, 2521 bp, Homo Sapiens
  NM_000820
ccgagcgcttgaggtgccgcagccgccgccgccgccgccgccgcgatgtgaccttcagggccgccaggacgggatgaccggagcctccgccccgcggcgcccgcggctcgcctcggcctcccgggcgctctgaccgcgcgtccccggcccgccatggccccttcgctctcgcccgggcccgccgccctgcgccgcgcgccgcagctgctgctgctgctgctggccgcggagtgcgcgcttgccgcgctgttgccggcgcgcgaggccacgcagttcctgcggcccaggcagcgccgcgcctttcaggtcttcgaggaggccaagcagggccacctggagagggagtgcgtggaggagctgtgcagccgcgaggaggcgcgggaggtgttcgagaacgaccccgagacggattatttttacccaagatacttagactgcatcaacaagtatgggtctccgtacaccaaaaactcaggcttcgccacctgcgtgcaaaacctgcctgaccagtgcacgcccaacccctgcgataggaaggggacccaagcctgccaggacctcatgggcaacttcttctgcctgtgtaaagctggctgggggggccggctctgcgacaaagatgtcaacgaatgcagccaggagaacgggggctgcctccagatctgccacaacaagccgggtagcttccactgttcctgccacagcggcttcgagctctcctctgatggcaggacctgccaagacatagacgagtgcgcagactcggaggcctgcggggaggcgcgctgcaagaacctgcccggctcctactcctgcctctgtgacgagggctttgcgtacagctcccaggagaaggcttgccgagatgtggacgagtgtctgcagggccgctgtgagcaggtctgcgtgaactccccagggagctacacctgccactgtgacgggcgtgggggcctcaagctgtcccaggacatggacacctgtgaggacatcttgccgtgcgtgcccttcagcgtggccaagagtgtgaagtccttgtacctgggccggatgttcagtgggacccccgtgatccgactgcgcttcaagaggctgcagcccaccaggctggtagctgagtttgacttccggacctttgaccccgagggcatcctcctctttgccggaggccaccaggacagcacctggatcgtgctggccctgagagccggccggctggagctgcagctgcgctacaacggtgtcggccgtgtcaccagcagcggcccggtcatcaaccatggcatgtggcagacaatctctgttgaggagctggcgcggaatctggtcatcaaggtcaacagggatgctgtcatgaaaatcgcggtggccggggacttgttccaaccggagcgaggactgtatcatctgaacctgaccgtgggaggtattcccttccatgagaaggacctcgtgcagcctataaaccctcgtctggatggctgcatgaggagctggaactggctgaacggagaagacaccaccatccaggaaacggtgaaagtgaacacgaggatgcagtgcttctcggtgacggagagaggctctttctaccccgggagcggcttcgccttctacagcctggactacatgcggacccctctggacgtcgggactgaatcaacctgggaagtagaagtcgtggctcacatccgcccagccgcagacacaggcgtgctgtttgcgctctgggcccccgacctccgtgccgtgcctctctctgtggcactggtagactatcactccacgaagaaactcaagaagcagctggtggtcctggccgtggagcatacggccttggccctaatggagatcaaggtctgcgacggccaagagcacgtggtcaccgtctcgctgagggacggtgaggccaccctggaggtggacggcaccaggggccagagcgaggtgagcgccgcgcagctgcaggagaggctggccgtgctcgagaggcacctgcggagccccgtgctcacctttgctggcggcctgccagatgtgccggtgacttcagcgccagtcaccgcgttctaccgcggctgcatgacactggaggtcaaccggaggctgctggacctggacgaggcggcgtacaagcacagcgacatcacggcccactcctgcccccccgtggagcccgccgcagcctaggcccccacgggacgcggcaggcttctcagtctctgtccgagacagccgggaggagcctgggggctcctcaccacgtggggccatgctgagagctgggctttcctctgtgaccatcccggcctgtaacatatctgtaaatagtgagatggacttggggcctctgacgccgcgcactcagccgtgggcccgggcgcggggaggccggcgcagcgcagagcgggctcgaagaaaataattctctattatttttattaccaagcgcttctttctgactctaaaatatggaaaataaaatatttacagaaagctttgtaaaaaaaaaaaaaaaaaa

SEQ ID NO: 556 - DNA, 2166 bp, Homo Sapiens
  NM_000825
aatttctcatctttctgttcccactgcccttaagagtgatttgcatatttaactcaataagcatctactgaaatgagttgatctgttgatgtaagtctgctcaatatggtcttgctctcagaatatgtttcttgcctttttgatgctttagaaggctttcaaggtaagtcaagcagggaacctggtgggtagatgagggaattttcaaacacacaactgtctgatttaggatcctacatggacttggtatatagtgtcacttacttgtaaatcagatttttaaaattggaagcaactctgtgatcatctagtccatctagtctacacccttccttttacaaatgaagaatccaagagccagaagctcccagacatcctgactcaatgtcctatatttgttgtatagcctcctttgtggaagttatgtatgcatttgacttcacttaatctaagacatctattttccttgaactcttgataggtctgctggtttcctcaagggaatccaatctagctggattttaatctctttgaattgtgtcctcagctataaaagttttagctgaggttttaatggctgcacttaagtaaatctaacagatataccagggggtgttccaattacatacaccattaaagggctttatgtgaggatttttaaaaattaccattaaaaaaaaaaaagcatagtccatttgcagtataatttaccagcaggaaagatttcaatgtcctggaaaaattccctataaaaaggaagataggaaaacagaaaagtcacagtactcaacctacttcaagggaagattgggatctttttggctctctgcctctaaacaggtaaaaggctttgtattatttctagcacgagtttttcttctttagattgcatgctattgtatgtctacagggcatttgacagcccaagggctaaatccaggtgtgacggtatctaatgatgtcctgtccttcactgtccttgccatcaccagccacagagatccaggctttggggactcccacagcttatcgaccagtgtttgatttagtttttagcctctttcccatcaaatgaaaattaacttggagacacatttcattagaaaattagaggcccccttggctaggaaggcatctggtctgggactaactactttgaacagtgttgagtcctctctcccacagatggttcagccagcagtaatgctaggaagactgaaggataaatagaaaaatgtcattagtaccatggggtagccatgtaatgtcaagcaattttatattagccagagattcctagtaggagctacttttcttaacagatgactcagttctctttatctcaggaatgaaagagttgaagaccaatccacaacaggggaaatgttaaggcaaaatgatgaacttgataagggatgaattatggggtttggataaccaaacaataaaaataaaagtatagactattttagtactaaaaaggtcctgaacatgtgagcttaagtactcattttgtccccagtggctaagaaactaaaggcaagccagcaagtgtctctgagtttcagtgtctgtatgtaaaaactgactctgacttccatcttctgcagggttagtgatacagatgctagctttttcactaaagaggtcttttagtttatactcaaccttgtctggatctaatttgattgtgcattcatgtgccttagaatgaagccaattcaaaaactcctagctggccttattctactgacttggtgcgtggaaggctgctccagccagcactggtcctatggactgcgccctggaggaaagagagatgccgaaaatttgattgattctttccaagagatagtcaaagaggttggtcaactggcagaaacccaacgcttcgaatgcaccacgcaccagccacgttctcccctccgagacctgaaaggagctctggaaagtctgattgaagaggaaactgggcagaagaagatttaaatccattgggccagaaggaatgaccattactaacatgacttaagtataattctgacattgaaaatttataacccattaaatacctgtaaatggtatgaatttcagaaatccttacaccaagttgcacatattccataataaagtgctgtgttgtgaatgaaaaaaaaaaaaaaaaaa

SEQ ID NO: 557 - DNA, 1986 bp, Homo Sapiens
  NM_000837
aaggccccgctgcgtcttccgagccgcaggcgcaggcccagctgagcggccgccgagcgggtgcgggtgcgggcgcatcggccatcaccgcgcggccgcgcagcggacaccgtgcgtaccggcctgcggcgcccggccaccggtgagtccccggcccgagcccaggagcgcctctgacccgctgcgccgcgcggcctgccgcccccgcccccgcccccacgcggatcttgcgcatccgagcgtggccgcctcgggggcggaccgcggaacccgaggccatgtcccatgaaaagagttttttggtgtctggggacaactatcctccccccaaccctggatatccgggggggccccagccacccatgcccccctatgctcagcctccctaccctggggccccttacccacagccccctttccagccctccccctacggtcagccagggtacccccatggccccagcccctacccccaagggggctacccacagggtccctacccccaagggggctacccacagggcccctacccacaagagggctacccacagggcccctacccccaagggggctacccccaggggccatatccccagagccccttcccccccaacccctatggacagccacaggtcttcccaggacaagaccctgactcaccccagcatggaaactaccaggaggagggtcccccatcctactatgacaaccaggacttccctgccaccaactgggatgacaagagcatccgacaggccttcatccgcaaggtgttcctagtgctgaccttgcagctgtcggtgaccctgtccacggtgtctgtgttcacttttgttgcggaggtgaagggctttgtccgggagaatgtctggacctactatgtctcctatgctgtcttcttcatctctctcatcgtcctcagctgttgtggggacttccggcgaaagcacccctggaaccttgttgcactgtcggtcctgaccgccagcctgtcgtacatggtggggatgatcgccagcttctacaacaccgaggcagtcatcatggccgtgggcatcaccacagccgtctgcttcaccgtcgtcatcttctccatgcagacccgctacgacttcacctcatgcatgggcgtgctcctggtgagcatggtggtgctcttcatcttcgccattctctgcatcttcatccggaaccgcatcctggagatcgtgtacgcctcactgggcgctctgctcttcacctgcttcctcgcagtggacacccagctgctgctggggaacaagcagctgtccctgagcccagaagagtatgtgtttgctgcgctgaacctgtacacagacatcatcaacatcttcctgtacatcctcaccatcattggccgcgccaaggagtagccgagctccagctcgctgtgcccgctcaggtggcacggctggcctggaccctgcccctggcacggcagtgccagctgtacttcccctctctcttgtccccaggcacagcctagggaaaaggatgcctctctccaaccctcctgtatgtacactgcagatacttccatttggacccgctgtggccacagcatggcccctttagtcctcccgcccccgccaaggggcaccaaggccacgtttccgtgccacctcctgtctactcattgttgcatgagccctgtctgccagcccaccccagggactgggggcagcaccaggtcccggggagagggattgagccaagaggtgagggtgcacgtcttccctcctgtcccagctccccagcctggcgtagagcacccctcccctcccccccacccccctggagtgctgccctctggggacatgcggagtgggggtcttatccctgtgctgagccctgagggcagagaggatggcatgtttcaggggagggggaagccttcctctcaatttgttgtcagtgaaattccaataaatgggatttgctctctgcaaaaaaaaaaaaaaaaaa

SEQ ID NO: 558 - DNA, 3389 bp, Homo Sapiens
  NM_000839
ggagagcgcagagccagcgagccagcgagcgagcgagcgggagccggagcctcgcgccccccgctccactccgattctctccgcgccagagccagcgcgccaggagctgggtcccttcgcatctctcttcttgtctgtcctttcctggtccctgtttcctcctctctttgccttcgctgcttctaatctcatcccctggagacccaggtctgcgggacccatccatcccctttggggccatgggatcgctgcttgcgctcctggcactgctgctgctgtggggtgctgtggctgagggcccagccaagaaggtgctgaccctggagggagacttggtgctgggtgggctgttcccagtgcaccagaagggcggcccagcagaggactgtggtcctgtcaatgagcaccgtggcatccagcgcctggaggccatgctttttgcactggaccgcatcaaccgtgacccgcacctgctgcctggcgtgcgcctgggtgcacacatcctcgacagttgctccaaggacacacatgcgctggagcaggcactggactttgtgcgtgcctcactcagccgtggtgctgatggctcacgccacatctgccccgacggctcttatgcgacccatggtgatgctcccactgccatcactggtgttattggcggttcctacagtgatgtctccatccaggtggccaacctcttgaggctatttcagatcccacagattagctacgcctctaccagtgccaagctgagtgacaagtcccgctatgactactttgcccgcacagtgcctcctgacttcttccaagccaaggccatggctgagattctccgcttcttcaactggacctatgtgtccactgtggcgtctgagggcgactatggcgagacaggcattgaggcctttgagctagaggctcgtgcccgcaacatctgtgtggccacctcggagaaagtgggccgtgccatgagccgcgcggcctttgagggtgtggtgcgagccctgctgcagaagcccagtgcccgcgtggctgtcctgttcacccgttctgaggatgcccgggagctgcttgctgccagccagcgcctcaatgccagcttcacctgggtggccagtgatggttggggggccctggagagtgtggtggcaggcagtgagggggctgctgagggtgctatcaccatcgagctggcctcctaccccatcagtgactttgcctcctacttccagagcctggacccttggaacaacagccggaacccctggttccgtgaattctgggagcagaggttccgctgcagcttccggcagcgagactgcgcagcccactctctccgggctgtgccctttgagcaggagtccaagatcatgtttgtggtcaatgcagtgtacgccatggcccatgcgctccacaacatgcaccgtgccctctgccccaacaccacccggctctgtgacgcgatgcggccagttaacgggcgccgcctctacaaggactttgtgctcaacgtcaagtttgatgccccctttcgcccagctgacacccacaatgaggtccgctttgaccgctttggtgatggtattggccgctacaacatcttcacctatctgcgtgcaggcagtgggcgctatcgctaccagaaggtgggctactgggcagaaggcttgactctggacaccagcctcatcccatgggcctcaccctcagccggccccctgcccgcctctcgctgcagtgagccctgcctccagaatgaggtgaagagtgtgcagccgggcgaagtctgctgctggctctgcattccgtgccagccctatgagtaccgattggacgaattcacttgcgctgattgtggcctgggctactggcccaatgccagcctgactggctgcttcgaactgccccaggagtacatccgctggggcgatgcctgggctgtgggacctgtcaccatcgcctgcctcggtgccctggccaccctctttgtgctgggtgtctttgtgcggcacaatgccacaccagtggtcaaggcctcaggtcgggagctctgctacatcctgctgggtggtgtcttcctctgctactgcatgaccttcatcttcattgccaagccatccacggcagtgtgtaccttacggcgtcttggtttgggcactgccttctctgtctgctactcagccctgctcaccaagaccaaccgcattgcacgcatcttcggtggggcccgggagggtgcccagcggccacgcttcatcagtcctgcctcacaggtggccatctgcctggcacttatctcgggccagctgctcatcgtggtcgcctggctggtggtggaggcaccgggcacaggcaaggagacagcccccgaacggcgggaggtggtgacactgcgctgcaaccaccgcgatgcaagtatgttgggctcgctggcctacaatgtgctcctcatcgcgctctgcacgctttatgccttcaagactcgcaagtgccccgaaaacttcaacgaggccaagttcattggcttcaccatgtacaccacctgcatcatctggctggcattcctgcccatcttctatgtcacctccagtgactaccgggtacagaccaccaccatgtgcgtgtcagtcagcctcagcggctccgtggtgcttggctgcctctttgcgcccaagctgcacatcatcctcttccagccgcagaagaacgtggttagccaccgggcacccaccagccgctttggcagtgctgctgccagggccagctccagccttggccaagggtctggctcccagtttgtccccactgtttgcaatggccgtgaggtggtggactcgacaacgtcatcgctttgaagaccccatactcccgccctgacacagctgctcctgggaacctagtgcagacccacgtccagggccaggaggaagttggctggagcactgcaataatttattacccaccctatgtctgcccccaaagtcacttacccacctccttaccccagctcttcagactcagaagtcaggagccttggccaggagcctctgcagtggccactaactgcccttgtagctgtgtttcctcctggccaggcccagggctcagagaggagcaagccagggttcactctgccctggacccgggtggctgaggacggcaggccccagtcctaaccagcaaaggtgcttccagcccagcccctccccccaactagggccttttttattttttatataagttactctgggatggggagggtggttattgtgggggctgcccctccccctgcacagtagtttgtcctgtggtttattttgtattacctgtaaataaagtggctttattttaaaaaaaaaaaaaaaaaaaaaaaaaaaaaaaaaaaa

SEQ ID NO: 559 - DNA, 986 bp, Homo Sapiens
  NM_000852
tgggaaagagggaaaggcttccccggccagctgcgcggcgactccggggactccagggcgcccctctgcggccgacgcccggggtgcagcggccgccggggctggggccggcgggagtccgcgggaccctccagaagagcggccggcgccgtgactcagcactggggcggagcggggcgggaccacccttataaggctcggaggccgcgaggccttcgctggagtttcgccgccgcagtcttcgccaccatgccgccctacaccgtggtctatttcccagttcgaggccgctgcgcggccctgcgcatgctgctggcagatcagggccagagctggaaggaggaggtggtgaccgtggagacgtggcaggagggctcactcaaagcctcctgcctatacgggcagctccccaagttccaggacggagacctcaccctgtaccagtccaataccatcctgcgtcacctgggccgcacccttgggctctatgggaaggaccagcaggaggcagccctggtggacatggtgaatgacggcgtggaggacctccgctgcaaatacatctccctcatctacaccaactatgaggcgggcaaggatgactatgtgaaggcactgcccgggcaactgaagccttttgagaccctgctgtcccagaaccagggaggcaagaccttcattgtgggagaccagatctccttcgctgactacaacctgctggacttgctgctgatccatgaggtcctagcccctggctgcctggatgcgttccccctgctctcagcatatgtggggcgcctcagtgcccggcccaagctcaaggccttcctggcctcccctgagtacgtgaacctccccatcaatggcaacgggaaacagtgagggttggggggactctgagcgggaggcagagtttgccttcctttctccaggaccaataaaatttctaagagagctaaaaaaaaaaaaaaaaaaaaaaaaaaaaa

SEQ ID NO: 560 - DNA, 2787 bp, Homo Sapiens
  NM_000860
agaacgctcagggggcaggtgacacagtcgtgggttccccggcgggcgctggcttgacagtttcctccccgcccactggcaggggagcgccccgccgggctgcacgcgcgcgcgcgcaggggggcataaaagccgcggccgcgcggagacgcggagctcgcccaccgcccgccccagcagtggctgcaccatgcacgtgaacggcaaagtggcgctggtgaccggcgcggctcagggcataggcagagcctttgcagaggcgctgctgcttaagggcgccaaggtagcgctggtggattggaatcttgaagcaggtgtacagtgtaaagctgccctggatgagcagtttgaacctcagaagactctgttcatccagtgcgatgtggctgaccagcaacaactgagagacacttttagaaaagttgtagaccactttggaagactggacattttggtcaataatgctggagtgaataatgagaaaaactgggaaaaaactctgcaaattaatttggtttctgttatcagtggaacctatcttggtttggattacatgagtaagcaaaatggaggtgaaggcggcatcattatcaatatgtcatctttagcaggactcatgcccgttgcacagcagccggtttattgtgcttcaaagcatggcatagttggattcacacgctcagcagcgttggctgctaatcttatgaacagtggtgtgagactgaatgccatttgtccaggctttgttaacacagccatccttgaatcaattgaaaaagaagaaaacatgggacaatatatagaatataaggatcatatcaaggatatgattaaatactatggaattttggacccaccattgattgccaatggattgataacactcattgaagatgatgctttaaatggtgctattatgaagatcacaacttctaagggaattcattttcaagactatgatacaactccatttcaagcaaaaacccaatgaacagcttatgtgttagccatagctgaaaataagcacaaatagcttatattcagatcctatcttcatttgaatatagcttttaaatgaaatgttacagtttgaagttttccttcatgcacttggtgataaacgttttctaaatttttagttaagtatatggataaaaagttatgaactattaaaaatgtgatgtggaccaaaggctaggttgtaatcttgatagtctaaaaaatgatcaaaacaaatgattttcaaggaatattcaatattctgcctttcagaaagtgtatttatatctgtgcttcataaatattaatgttcttcagaacatcattttaaaggagatacttgaattgttatttaaatcaaaccagatgtaaaacactcacatacaagttcatactttaaaagaggaaagctacttaacaatgacaaatatttcacaataataatttttacttatataccatctttcaactgaacatttcagttcttccaagagcttcttagagtagtatattttgggggcagtcaaggaataaactacagtgtaaacatatcccagatgaaaactgctgtatggaaaaatgacagaaagtaactgattgacactgttgattcacagttcagcctcctatctgggaaagacatttctttcctctgctcactttaagaacttttaccgactccaaaaatctcaggaattaaacttttaacagttacagcaataaagaatagttagtactccaaaaatattatatttaagatgctcaacaagaaaaaaatgcaaatgtaatatttttttcaaattacttctttattgacttgtccaaatttcaaaagtgcctacccttcaataaaacttttttattctgatctccataaattacttagtcttctatgtatagctatcaaggaaataaaaccaattttgccacagccacaactgtaaatgtttttgtacccatgctgaaactcataacaacacagacataaaaatagctgtgaggttttgctttttttgttgtcagctatcttaagaatcattaaatacacctgctttgggtaaaactctttgcaagcagtaattaacactagtaacagtgaaagcacaagatttccaaatcagtcgttttctcaaaaaaatatcgtataagtgactcatcctgtctgctaactccagacctcccagcttgaagccaaatctttccatgtgagattgatatggatttcctagaagtactggaatgttgtcatatcttgccctattttaattctgctatagaaaacaattgccttcacttttaaggagtaatttgaatattaataactctggtctagattttcatataatgtattaaagacaaagtagtgaacatcaatgaacatctgatagagataaactgtaatcaggcataagcttgtttgtatgttctggcagtgactaatcagtaaatgatgtcggtttgcccagtatcacttatcttctgtatttttcctctgtcgtgtaaatagtataaccttttcatttatggacaattttttggactagtagccttcaatatacattctgctttgaattaattttttcaaatcaataaattatgtagacatttaaaatcaaatatcaagtagaattgaaaaatgtgagttacataagttaaaaacttactttaaatcttaccttctataggtagctctaaataaattcatatggttatatggcatctctggtgtatactgattgagaaaataattaaactgaagttaggggaggggaaaaaaaaaaaaaaaaa

SEQ ID NO: 561 - DNA, 4909 bp, Homo Sapiens
  NM_000877
tagacgcaccctctgaagatggtgactccctcctgagaagctggaccccttggtaaaagacaaggccttctccaagaagaatatgaaagtgttactcagacttatttgtttcatagctctactgatttcttctctggaggctgataaatgcaaggaacgtgaagaaaaaataattttagtgtcatctgcaaatgaaattgatgttcgtccctgtcctcttaacccaaatgaacacaaaggcactataacttggtataaagatgacagcaagacacctgtatctacagaacaagcctccaggattcatcaacacaaagagaaactttggtttgttcctgctaaggtggaggattcaggacattactattgcgtggtaagaaattcatcttactgcctcagaattaaaataagtgcaaaatttgtggagaatgagcctaacttatgttataatgcacaagccatatttaagcagaaactacccgttgcaggagacggaggacttgtgtgcccttatatggagttttttaaaaatgaaaataatgagttacctaaattacagtggtataaggattgcaaacctctacttcttgacaatatacactttagtggagtcaaagataggctcatcgtgatgaatgtggctgaaaagcatagagggaactatacttgtcatgcatcctacacatacttgggcaagcaatatcctattacccgggtaatagaatttattactctagaggaaaacaaacccacaaggcctgtgattgtgagcccagctaatgagacaatggaagtagacttgggatcccagatacaattgatctgtaatgtcaccggccagttgagtgacattgcttactggaagtggaatgggtcagtaattgatgaagatgacccagtgctaggggaagactattacagtgtggaaaatcctgcaaacaaaagaaggagtaccctcatcacagtgcttaatatatcggaaattgaaagtagattttataaacatccatttacctgttttgccaagaatacacatggtatagatgcagcatatatccagttaatatatccagtcactaatttccagaagcacatgattggtatatgtgtcacgttgacagtcataattgtgtgttctgttttcatctataaaatcttcaagattgacattgtgctttggtacagggattcctgctatgattttctcccaataaaagcttcagatggaaagacctatgacgcatatatactgtatccaaagactgttggggaagggtctacctctgactgtgatatttttgtgtttaaagtcttgcctgaggtcttggaaaaacagtgtggatataagctgttcatttatggaagggatgactacgttggggaagacattgttgaggtcattaatgaaaacgtaaagaaaagcagaagactgattatcattttagtcagagaaacatcaggcttcagctggctgggtggttcatctgaagagcaaatagccatgtataatgctcttgttcaggatggaattaaagttgtcctgcttgagctggagaaaatccaagactatgagaaaatgccagaatcgattaaattcattaagcagaaacatggggctatccgctggtcaggggactttacacagggaccacagtctgcaaagacaaggttctggaagaatgtcaggtaccacatgccagtccagcgacggtcaccttcatctaaacaccagttactgtcaccagccactaaggagaaactgcaaagagaggctcacgtgcctctcgggtagcatggagaagttgccaagagttctttaggtgcctcctgtcttatggcgttgcaggccaggttatgcctcatgctgacttgcagagttcatggaatgtaactatatcatcctttatccctgaggtcacctggaatcagattattaagggaataagccatgacgtcaatagcagcccagggcacttcagagtagagggcttgggaagatcttttaaaaaggcagtaggcccggtgtggtggctcacgcctataatcccagcactttgggaggctgaagtgggtggatcaccagaggtcaggagttcgagaccagcccagccaacatggcaaaaccccatctctactaaaaatacaaaaatgagctaggcatggtggcacacgcctgtaatcccagctacacctgaggctgaggcaggagaattgcttgaaccggggagacggaggttgcagtgagccgagtttgggccactgcactctagcctggcaacagagcaagactccgtctcaaaaaaagggcaataaatgccctctctgaatgtttgaactgccaagaaaaggcatggagacagcgaactagaagaaagggcaagaaggaaatagccaccgtctacagatggcttagttaagtcatccacagcccaagggcggggctatgccttgtctggggaccctgtagagtcactgaccctggagcggctctcctgagaggtgctgcaggcaaagtgagactgacacctcactgaggaagggagacatattcttggagaactttccatctgcttgtattttccatacacatccccagccagaagttagtgtccgaagaccgaattttattttacagagcttgaaaactcacttcaatgaacaaagggattctccaggattccaaagttttgaagtcatcttagctttccacaggagggagagaacttaaaaaagcaacagtagcagggaattgatccacttcttaatgctttcctccctggcatgaccatcctgtcctttgttattatcctgcattttacgtctttggaggaacagctccctagtggcttcctccgtctgcaatgtcccttgcacagcccacacatgaaccatccttcccatgatgccgctcttctgtcatcccgctcctgctgaaacacctcccaggggctccacctgttcaggagctgaagcccatgctttcccaccagcatgtcactcccagaccacctccctgccctgtcctccagcttcccctcgctgtcctgctgtgtgaattcccaggttggcctggtggccatgtcgcctgcccccagcactcctctgtctctgctcttgcctcgacccttcctcctcctttgcctaggaggccttctcgcattttctctagctgatcagaattttaccaaaattcagaacatcctccaattccacagtctctgggagactttccctaagaggcgacttcctctccagccttctctctctggtcaggcccactgcagagatggtggtgagcacatctgggaggctggtctccctccagctggaattgctgctctctgagggagaggctgtggtggctgtctctgtccctcactgccttccaggagcaatttgcacatgtaacatagatttatgtaatgctttatgtttaaaaacattccccaattatcttatttaatttttgcaattattctaattttatatatagagaaagtgacctattttttaaaaaaatcacactctaagttctattgaacctaggacttgagcctccatttctggcttctagtctggtgttctgagtacttgatttcaggtcaataacggtcccccctcactccacactggcacgtttgtgagaagaaatgacattttgctaggaagtgaccgagtctaggaatgcttttattcaagacaccaaattccaaacttctaaatgttggaattttcaaaaattgtgtttagattttatgaaaaactcttctactttcatctattctttccctagaggcaaacatttcttaaaatgtttcattttcattaaaaatgaaagccaaatttatatgccaccgattgcaggacacaagcacagttttaagagttgtatgaacatggagaggacttttggtttttatatttctcgtatttaatatgggtgaacaccaacttttatttggaataataattttcctcctaaacaaaaacacattgagtttaagtctctgactcttgcctttccacctgctttctcctgggcccgctttgcctgcttgaaggaacagtgctgttctggagctgctgttccaacagacagggcctagctttcatttgacacacagactacagccagaagcccatggagcagggatgtcacgtcttgaaaagcctattagatgttttacaaatttaattttgcagattattttagtctgtcatccagaaaatgtgtcagcatgcatagtgctaagaaagcaagccaatttggaaacttaggttagtgacaaaattggccagagagtgggggtgatgatgaccaagaattacaagtagaatggcagctggaatttaaggagggacaagaatcaatggataagcgtgggtggaggaagatccaaacagaaaagtgcaaagttattccccatcttccaagggttgaattctggaggaagaagacacattcctagttccccgtgaacttcctttgacttattgtccccactaaaacaaaacaaaaaacttttaatgccttccacattaattagattttcttgcagtttttttatggcatttttttaaagatgccctaagtgttgaagaagagtttgcaaatgcaacaaaatatttaattaccggttgttaaaactggtttagcacaatttatattttccctctcttgcctttcttatttgcaataaaaggtattgagccattttttaaatgacatttttgataaattatgtttgtactagttgatgaaggagttttttttaacctgtttatataattttgcagcagaagccaaattttttgtatattaaagcaccaaattcatgtacagcatgcatcacggatcaatagactgtacttattttccaataaaattttcaaactttgtactgttaaa

SEQ ID NO: 562 - DNA, 4045 bp, Homo Sapiens
  NM_000878
gcagccagagctcagcagggccctggagagatggccacggtcccagcaccggggaggactggagagcgcgcgctgccaccgccccatgtctcagccagggcttccttcctcggctccaccctgtggatgtaatggcggcccctgctctgtcctggcgtctgcccctcctcatcctcctcctgcccctggctacctcttgggcatctgcagcggtgaatggcacttcccagttcacatgcttctacaactcgagagccaacatctcctgtgtctggagccaagatggggctctgcaggacacttcctgccaagtccatgcctggccggacagacggcggtggaaccaaacctgtgagctgctccccgtgagtcaagcatcctgggcctgcaacctgatcctcggagccccagattctcagaaactgaccacagttgacatcgtcaccctgagggtgctgtgccgtgagggggtgcgatggagggtgatggccatccaggacttcaagccctttgagaaccttcgcctgatggcccccatctccctccaagttgtccacgtggagacccacagatgcaacataagctgggaaatctcccaagcctcccactactttgaaagacacctggagttcgaggcccggacgctgtccccaggccacacctgggaggaggcccccctgctgactctcaagcagaagcaggaatggatctgcctggagacgctcaccccagacacccagtatgagtttcaggtgcgggtcaagcctctgcaaggcgagttcacgacctggagcccctggagccagcccctggccttcaggacaaagcctgcagcccttgggaaggacaccattccgtggctcggccacctcctcgtgggcctcagcggggcttttggcttcatcatcttagtgtacttgctgatcaactgcaggaacaccgggccatggctgaagaaggtcctgaagtgtaacaccccagacccctcgaagttcttttcccagctgagctcagagcatggaggagacgtccagaagtggctctcttcgcccttcccctcatcgtccttcagccctggcggcctggcacctgagatctcgccactagaagtgctggagagggacaaggtgacgcagctgctcctgcagcaggacaaggtgcctgagcccgcatccttaagcagcaaccactcgctgaccagctgcttcaccaaccagggttacttcttcttccacctcccggatgccttggagatagaggcctgccaggtgtactttacttacgacccctactcagaggaagaccctgatgagggtgtggccggggcacccacagggtcttccccccaacccctgcagcctctgtcaggggaggacgacgcctactgcaccttcccctccagggatgacctgctgctcttctcccccagtctcctcggtggccccagccccccaagcactgcccctgggggcagtggggccggtgaagagaggatgcccccttctttgcaagaaagagtccccagagactgggacccccagcccctggggcctcccaccccaggagtcccagacctggtggattttcagccaccccctgagctggtgctgcgagaggctggggaggaggtccctgacgctggccccagggagggagtcagtttcccctggtccaggcctcctgggcagggggagttcagggcccttaatgctcgcctgcccctgaacactgatgcctacttgtccctccaagaactccagggtcaggacccaactcacttggtgtagacagatggccagggtgggaggcaggcagctgcctgctctgcgccgagcctcagaaggaccctgttgagggtcctcagtccactgctgaggacactcagtgtccagttgcagctggacttctccacccggatggcccccacccagtcctgcacacttggtccatccatttccaaacctccactgctgctcccgggtcctgctgcccgagccaggaactgtgtgtgttgcaggggggcagtaactccccaactccctcgttaatcacaggatcccacgaatttaggctcagaagcatcgctcctctccagccctgcagctattcaccaatatcagtcctcgcggctctccagggctccctgccctgacctcttccctgggttttctgccccagcctcctccttccctcccctccccgtccacagggcagcctgagcgtgctttccaaaacccaaatatggccacgctccccctcggttcaaaaccttgcacaggtcccactgccctcagccccacttctcagcctggtacttgtacctccggtgtcgtgtggggacatccccttctgcaatcctccctaccgtcctcctgagccactcagagctccctcacaccccctctgttgcacatgctattccctggggctgctgtgcgctccccctcatctaggtgacaaacttccctgactcttcaagtgccggttttgcttctcctggagggaagcactgcctcccttaatctgccagaaacttctagcgtcagtgctggagggagaagctgtcagggacccagggcgcctggagaaagaggccctgttactattcctttgggatctctgaggcctcagagtgcttggctgctgtatctttaatgctggggcccaagtaagggcacagatccccccacaaagtggatgcctgctgcatcttcccacagtggcttcacagacccacaagagaagctgatggggagtaaaccctggagtccgaggcccaggcagcagccccgcctagtggtgggccctgatgctgccaggcctgggacctcccactgccccctccactggaggggtctcctctgcagctcagggactggcacactggcctccagaagggcagctccacagggcagggcctcattatttttcactgccccagacacagtgcccaacaccccgtcgtataccctggatgaacgaattaattacctggcaccacctcgtctgggctccctgcgcctgacattcacacagagaggcagagtcccgtgcccattaggtctggcatgccccctcctgcaaggggctcaaccccctaccccgacccctccacgtatctttcctaggcagatcacgttgcaatggctcaaacaacattccaccccagcaggacagtgaccccagtcccagctaactctgacctgggagccctcaggcacctgcacttacaggccttgctcacagctgattgggcacctgaccacacgcccccacaggctctgaccagcagcctatgagggggtttggcaccaagctctgtccaatcaggtaggctgggcctgaactagccaatcagatcaactctgtcttgggcgtttgaactcagggagggaggcccttgggagcaggtgcttgtggacaaggctccacaagcgttgagccttggaaaggtagacaagcgttgagccactaagcagaggaccttgggttcccaatacaaaaatacctactgctgagagggctgctgaccatttggtcaggattcctgttgcctttatatccaaaataaactcccctttcttgaggttgtctgagtcttgggtctatgccttgaaaaaagctgaattattggacagtctcacctcctgccatagggtcctgaatgtttcagaccacaaggggctccacacctttgctgtgtgttctggggcaacctactaatcctctctgcaagtcggtctccttatccccccaaatggaaattgtatttgccttctccactttgggaggctcccacttcttgggagggttacattttttaagtcttaatcatttgtgacatatgtatctatacatccgtatcttttaatgatccgtgtgtaccatctttgtgattatttccttaatattttttctttaagtcagttcattttcgttgaaatacatttatttaaagaaaaatctttgttactctgtaaatgaaaaaacccattttcgctataaataaaaggtaactgtacaaaataagtacaatgcaacaaaa

SEQ ID NO: 563 - DNA, 2625 bp, Homo Sapiens
  NM_000883
actcgaccgggctgcgctcactgcccagccggggccccgggagcctccaggctcccgcccgccctgagctgcggcctccgcatggaggggccactcactccaccaccgctgcagggaggcggagccgccgctgttccggagcccggagcccggcaacacccgggacacgagacggcggcgcagcggtacagcgcccgactgctgcaggccggctacgagcccgagagccctagattggacctcgctacacacccgacgacaccccgttcagaactatcttcagtggtcttactggcaggtgttggtgtccagatggatcgccttcgcagggctagcatggcggactacctgatcagcggcggcaccggctacgtgcccgaggatgggctcaccgcgcagcagctcttcgccagcgccgacggcctcacctacaacgacttcctgattctcccaggattcatagacttcatagctgatgaggtggacctgacctcagccctgacccggaagatcacgctgaagacgccactgatctcctcccccatggacactgtgacagaggctgacatggccattgccatggctctgatgggaggtattggtttcattcaccacaactgcaccccagagttccaggccaacgaggtgcggaaggtcaagaagtttgaacagggcttcatcacggaccctgtggtgctgagcccctcgcacactgtgggcgatgtgctggaggccaagatgcggcatggcttctctggcatccccatcactgagacgggcaccatgggcagcaagctggtgggcatcgtcacctcccgagacatcgactttcttgctgagaaggaccacaccaccctcctcagtgaggtgatgacgccaaggattgaactggtggtggctccagcaggtgtgacgttgaaagaggcaaatgagatcctgcagcgtagcaagaaagggaagctgcctatcgtcaatgattgcgatgagctggtggccatcatcgcccgcaccgacctgaagaagaaccgagactaccctctggcctccaaggattcccagaagcagctgctctgtggggcagctgtgggcacccgtgaggatgacaaataccgtctggacctgctcacccaggcgggcgtcgacgtcatagtcttggactcgtcccaagggaattcggtgtatcagatcgccatggtgcattacatcaaacagaagtacccccacctccaggtgattggggggaacgtggtgacagcagcccaggccaagaacctgattgatgctggtgtggacgggctgcgcgtgggcatgggctgcggctccatctgcatcacccaggaagtgatggcctgtggtcggccccagggcactgctgtgtacaaggtggctgagtatgcccggcgctttggtgtgcccatcatagccgatggcggcatccagaccgtgggacacgtggtcaaggccctggcccttggagcctccacagtgatgatgggctccctgctggccgccactacggaggcccctggcgagtacttcttctcagacggggtgcggctcaagaagtaccggggcatgggctcactggatgccatggagaagagcagcagcagccagaaacgatacttcagcgagggggataaagtgaagatcgcgcagggtgtctcgggctccatccaggacaaaggatccattcagaagttcgtgccctacctcatagcaggcatccaacacggctgccaggatatcggggcccgcagcctgtctgtccttcggtccatgatgtactcaggagagctcaagtttgagaagcggaccatgtcggcccagattgagggtggtgtccatggcctgcactcttacgaaaagcggctgtactgaggacagcggtggaggccgaggtggtggaggggatgcaccccagtgtccacttttgggcacagcctccctccataactgagtggtccacagatttgcactacgggttctccagctcctttccaggcagagaggaggggaggtcctgaggggactgctgcccctcactcggcatcccctgcagagtcaggactgctcccggggccaggctgccctgggagcccccctccgagcccagccagccaggctctcaggccctgcgcctgcctcaggtctttcttgctgcagcctgctccagcctggcccccaccccaggggcaggcggcccctcctggcttctcctgtagggcacctccctgcccctagcctcccaggaaatggtgctctcctggccctgcctctggcccttcccgggccgctgcccctcagccatgtggcacttctgagctcctgacctaggccaaggggaggtctctgcccccttccccggccctgggctacccttgggtcctgctcctcaggccgctcccctgtccctggccatgggtaggagactgccctggtcatggccgcctgcctgtcattcctgactcaccaccgtccccaggtgaaccattcctcccttctcctcagctgcagtcgaaggctttaactttgcacacttgggatcacagttgcgtcattgtgtattaaatacttggaataaatcaagcaggtctcaacgcctccactaaaaaaaaaaaaaaa

SEQ ID NO: 564 - DNA, 1712 bp, Homo Sapiens
  NM_000884
cgaaatcggctggtttatattggcgcggcccagacggcagaggtctctgcggcgcggtcctcggagacacgcggcggtgtcctgtgttggccatggccgactacctgattagtgggggcacgtcctacgtgccagacgacggactcacagcacagcagctcttcaactgcggagacggcctcacctacaatgactttctcattctccctgggtacatcgacttcactgcagaccaggtggacctgacttctgctctgaccaagaaaatcactcttaagaccccactggtttcctctcccatggacacagtcacagaggctgggatggccatagcaatggcgcttacaggcggtattggcttcatccaccacaactgtacacctgaattccaggccaatgaagttcggaaagtgaagaaatatgaacagggattcatcacagaccctgtggtcctcagccccaaggatcgcgtgcgggatgtttttgaggccaaggcccggcatggtttctgcggtatcccaatcacagacacaggccggatggggagccgcttggtgggcatcatctcctccagggacattgattttctcaaagaggaggaacatgactgtttcttggaagagataatgacaaagagggaagacttggtggtagcccctgcaggcatcacactgaaggaggcaaatgaaattctgcagcgcagcaagaagggaaagttgcccattgtaaatgaagatgatgagcttgtggccatcattgcccggacagacctgaagaagaatcgggactacccactagcctccaaagatgccaagaaacagctgctgtgtggggcagccattggcactcatgaggatgacaagtataggctggacttgctcgcccaggctggtgtggatgtagtggttttggactcttcccagggaaattccatcttccagatcaatatgatcaagtacatcaaagacaaataccctaatctccaagtcattggaggcaatgtggtcactgctgcccaggccaagaacctcattgatgcaggtgtggatgccctgcgggtgggcatgggaagtggctccatctgcattacgcaggaagtgctggcctgtgggcggccccaagcaacagcagtgtacaaggtgtcagagtatgcacggcgctttggtgttccggtcattgctgatggaggaatccaaaatgtgggtcatattgcgaaagccttggcccttggggcctccacagtcatgatgggctctctcctggctgccaccactgaggcccctggtgaatacttcttttccgatgggatccggctaaagaaatatcgcggtatgggttctctcgatgccatggacaagcacctcagcagccagaacagatatttcagtgaagctgacaaaatcaaagtggcccagggagtgtctggtgctgtgcaggacaaagggtcaatccacaaatttgtcccttacctgattgctggcatccaacactcatgccaggacattggtgccaagagcttgacccaagtccgagccatgatgtactctggggagcttaagtttgagaagagaacgtcctcagcccaggtggaaggtggcgtccatagcctccattcgtatgagaagcggcttttctgaaaagggatccagcacacctcctcggtttttttttcaataaaagtttagaaagaaaaaaaaaaaaaaaaaaaaaaa

SEQ ID NO: 565 - DNA, 6082 bp, Homo Sapiens
  NM_000885
ataacgtctttgtcactaaaatgttccccaggggccttcggcgagtctttttgtttggttttttgtttttaatctgtggctcttgataatttatctagtggttgcctacacctgaaaaacaagacacagtgtttaactatcaacgaaagaactggacggctccccgccgcagtcccactccccgagtttgtggctggcatttgggccacgccgggctgggcggtcacagcgaggggcgcgcagtttggggtcacacagctccgcttctaggccccaaccaccgttaaaaggggaagcccgtgccccatcaggtccgctcttgctgagcccagagccatcccgcgctctgcgggctgggaggcccgggccaggacgcgagtcctgcgcagccgaggttccccagcgccccctgcagccgcgcgtaggcagagacggagcccggccctgcgcctccgcaccacgcccgggaccccacccagcggcccgtacccggagaagcagcgcgagcacccgaagctcccggctggcggcagaaaccgggagtggggccgggcgagtgcgcggcatcccaggccggcccgaacgctccgcccgcggtgggccgacttcccctcctcttccctctctccttcctttagcccgctggcgccggacacgctgcgcctcatctcttggggcgttcttccccgttggccaaccgtcgcatcccgtgcaactttggggtagtggccgtttagtgttgaatgttccccaccgagagcgcatggcttgggaagcgaggcgcgaacccggcccccgaagggccgccgtccgggagacggtgatgctgttgctgtgcctgggggtcccgaccggccgcccctacaacgtggacactgagagcgcgctgctttaccagggcccccacaacacgctgttcggctactcggtcgtgctgcacagccacggggcgaaccgatggctcctagtgggtgcgcccactgccaactggctcgccaacgcttcagtgatcaatcccggggcgatttacagatgcaggatcggaaagaatcccggccagacgtgcgaacagctccagctgggtagccctaatggagaaccttgtggaaagacttgtttggaagagagagacaatcagtggttgggggtcacactttccagacagccaggagaaaatggatccatcgtgacttgtgggcatagatggaaaaatatattttacataaagaatgaaaataagctccccactggtggttgctatggagtgccccctgatttacgaacagaactgagtaaaagaatagctccgtgttatcaagattatgtgaaaaaatttggagaaaattttgcatcatgtcaagctggaatatccagtttttacacaaaggatttaattgtgatgggggccccaggatcatcttactggactggctctctttttgtctacaatataactacaaataaatacaaggcttttttagacaaacaaaatcaagtaaaatttggaagttatttaggatattcagtcggagctggtcattttcggagccagcatactaccgaagtagtcggaggagctcctcaacatgagcagattggtaaggcatatatattcagcattgatgaaaaagaactaaatatcttacatgaaatgaaaggtaaaaagcttggatcgtactttggagcttctgtctgtgctgtggacctcaatgcagatggcttctcagatctgctcgtgggagcacccatgcagagcaccatcagagaggaaggaagagtgtttgtgtacatcaactctggctcgggagcagtaatgaatgcaatggaaacaaacctcgttggaagtgacaaatatgctgcaagatttggggaatctatagttaatcttggcgacattgacaatgatggctttgaagatgttgctatcggagctccacaagaagatgacttgcaaggtgctatttatatttacaatggccgtgcagatgggatctcgtcaaccttctcacagagaattgaaggacttcagatcagcaaatcgttaagtatgtttggacagtctatatcaggacaaattgatgcagataataatggctatgtagatgtagcagttggtgcttttcggtctgattctgctgtcttgctaaggacaagacctgtagtaattgttgacgcttctttaagccaccctgagtcagtaaatagaacgaaatttgactgtgttgaaaatggatggccttctgtgtgcatagatctaacactttgtttctcatataagggcaaggaagttccaggttacattgttttgttttataacatgagtttggatgtgaacagaaaggcagagtctccaccaagattctatttctcttctaatggaacttctgacgtgattacaggaagcatacaggtgtccagcagagaagctaactgtagaacacatcaagcatttatgcggaaagatgtgcgggacatcctcaccccaattcagattgaagctgcttaccaccttggtcctcatgtcatcagtaaacgaagtacagaggaattcccaccacttcagccaattcttcagcagaagaaagaaaaagacataatgaaaaaaacaataaactttgcaaggttttgtgcccatgaaaattgttctgctgatttacaggtttctgcaaagattgggtttttgaagccccatgaaaataaaacatatcttgctgttgggagtatgaagacattgatgttgaatgtgtccttgtttaatgctggagatgatgcatatgaaacgactctacatgtcaaactacccgtgggtctttatttcattaagattttagagctggaagagaagcaaataaactgtgaagtcacagataactctggcgtggtacaacttgactgcagtattggctatatatatgtagatcatctctcaaggatagatattagctttctcctggatgtgagctcactcagcagagcggaagaggacctcagtatcacagtgcatgctacctgtgaaaatgaagaggaaatggacaatctaaagcacagcagagtgactgtagcaatacctttaaaatatgaggttaagctgactgttcatgggtttgtaaacccaacttcatttgtgtatggatcaaatgatgaaaatgagcctgaaacgtgcatggtggagaaaatgaacttaactttccatgttatcaacactggcaatagtatggctcccaatgttagtgtggaaataatggtaccaaattcttttagcccccaaactgataagctgttcaacattttggatgtccagactactactggagaatgccactttgaaaattatcaaagagtgtgtgcattagagcagcaaaagagtgcaatgcagaccttgaaaggcatagtccggttcttgtccaagactgataagaggctattgtactgcataaaagctgatccacattgtttaaatttcttgtgtaattttgggaaaatggaaagtggaaaagaagccagtgttcatatccaactggaaggccggccatccattttagaaatggatgagacttcagcactcaagtttgaaataagagcaacaggttttccagagccaaatccaagagtaattgaactaaacaaggatgagaatgttgcgcatgttctactggaaggactacatcatcaaagacccaaacgttatttcaccatagtgattatttcaagtagcttgctacttggacttattgtacttctgttgatctcatatgttatgtggaaggctggcttctttaaaagacaatacaaatctatcctacaagaagaaaacagaagagacagttggagttatatcaacagtaaaagcaatgatgattaaggacttctttcaaattgagagaatggaaaacagactcaggttgtagtaaagaaatttaaaagacactgtttacaagaaaaaatgaattttgtttggacttcttttactcatgatcttgtgacatattatgtcttcatgcaaggggaaaatctcagcaatgattactctttgagatagaagaactgcaaaggtaataatacagccaaagataatctctcagcttttaaatgggtagagaaacactaaagcattcaatttattcaagaaaagtaagcccttgaagatatcttgaaatgaaagtataactgagttaaattatactggagaagtcttagacttgaaatactacttaccatatgtgcttgcctcagtaaaatgaaccccactgggtgggcagaggttcatttcaaatacatctttgatacttgttcaaaatatgttctttaaaaatataattttttagagagctgttcccaaattttctaacgagtggaccattatcactttaaagccctttatttataatacatttcctacgggctgtgttccaacaaccattttttttcagcagactatgaatattatagtattataggccaaactggcaaacttcagactgaacatgtacactggtttgagcttagtgaaattacttctggataattatttttttataattatggatttcaccatctttctttctgtatatatacatgtgtttttatgtaggtatatatttaccattcttcctatctattcttcctataacacacctttatcaagcatacccaggagtaatcttcaaatcttttgttatattctgaaacaaaagattgtgagtgttgcactttacctgatacacgctgatttagaaaatacagaaaccatacctcactaataactttaaaatcaaagctgtgcaaagactagggggcctatacttcatatgtattatgtactatgtaaaatattgactatcacacaactatttccttggatgtaattctttgttaccctttacaagtataagtgttaccttacatggaaacgaagaaacaaaattcataaatttaaattcataaatttagctgaaagatactgattcaatttgtatacagtgaatataaatgagacgacagcaaaattttcatgaaatgtaaaatatttttatagtttgttcatactatatgaggttctattttaaatgactttctggattttaaaaaatttctttaaatacaatcatttttgtaatatttattttatgcttatgatctagataattgcagaatatcattttatctgactctgccttcataagagagctgtggccgaattttgaacatctgttatagggagtgatcaaattagaaggcaatgtggaaaaacaattctgggaaagatttctttatatgaagtccctgccactagccagccatcctaattgatgaaagttatctgttcacaggcctgcagtgatggtgaggaatgttctgagatttgcgaaggcatttgagtagtgaaatgtaagcacaaaacctcctgaacccagagtgtgtatacacaggaataaactttatgacatttatgtatttttaaaaaactttgtatcgttataaaaaggctagtcattctttcaggagaacatctaggatcatagatgaaaaatcaagccccgatttagaactgtcttctccaggatggtctctaaggaaatttacatttggttctttcctactcagaactactcagaaacaactatatatttcaggttatctgagcacagtgaaagcagagtactatggttgtccaacacaggcctctcagatacaaggggaacacaattacatattgggctagattttgcccagttcaaaatagtatttgttatcaacttactttgttacttgtatcatgaattttaaaaccctaccactttaagaagacagggatgggttattcttttttggcaggtaggctatataactatgtgattttgaaatttaactgctctggattagggagcagtgaatcaaggcagacttatgaaatctgtattatatttgtaacagaatataggaaatttaacataattgatgagctcaaatcctgaaaaatgaaagaatccaaattatttcagaattatctaggttaaatattgatgtattatgatggttgcaaagtttttttgtgtgtccaataaacacattgtaaaaaaaa

SEQ ID NO: 566 - DNA, 4666 bp, Homo Sapiens
  NM_000887
agtaccttggtccagctcttcctgcaacggcccaggagctcagagctccacatctgaccttctagtcatgaccaggaccagggcagcactcctcctgttcacagccttagcaacttctctaggtttcaacttggacacagaggagctgacagccttccgtgtggacagcgctgggtttggagacagcgtggtccagtatgccaactcctgggtggtggttggagccccccaaaagataacagctgccaaccaaacgggtggcctctaccagtgtggctacagcactggtgcctgtgagcccatcggcctgcaggtgcccccggaggccgtgaacatgtccctgggcctgtccctggcgtctaccaccagcccttcccagctgctggcctgcggccccaccgtgcaccacgagtgcgggaggaacatgtacctcaccggactctgcttcctcctgggccccacccagctcacccagaggctcccggtgtccaggcaggagtgcccaagacaggagcaggacattgtgttcctgatcgatggctcaggcagcatctcctcccgcaactttgccacgatgatgaacttcgtgagagctgtgataagccagttccagagacccagcacccagttttccctgatgcagttctccaacaaattccaaacacacttcactttcgaggaattcaggcgcagctcaaaccccctcagcctgttggcttctgttcaccagctgcaagggtttacatacacggccaccgccatccaaaatgtcgtgcaccgattgttccatgcctcatatggggcccgtagggatgccgccaaaattctcattgtcatcactgatgggaagaaagaaggcgacagcctggattataaggatgtcatccccatggctgatgcagcaggcatcatccgctatgcaattggggttggattagcttttcaaaacagaaattcttggaaagaattaaatgacattgcatcgaagccctcccaggaacacatatttaaagtggaggactttgatgctctgaaagatattcaaaaccaactgaaggagaagatctttgccattgagggtacggagaccacaagcagtagctccttcgaattggagatggcacaggagggcttcagcgctgtgttcacacctgatggccccgttctgggggctgtggggagcttcacctggtctggaggtgccttcctgtaccccccaaatatgagccctaccttcatcaacatgtctcaggagaatgtggacatgagggactcttacctgggttactccaccgagctggccctctggaaaggggtgcagagcctggtcctgggggccccccgctaccagcacaccgggaaggctgtcatcttcacccaggtgtccaggcaatggaggatgaaggccgaagtcacggggactcagatcggctcctacttcggggcctccctctgctccgtggacgtagacagcgacggcagcaccgacctggtcctcatcggggccccccattactacgagcagacccgagggggccaggtgtctgtgtgtcccttgcccagggggtggagaaggtggtggtgtgatgctgttctctacggggagcagggccacccctggggtcgctttggggcggctctgacagtgctgggggatgtgaatggggacaagctgacagacgtggtcatcggggccccaggagaggaggagaaccggggtgctgtctacctgtttcacggagtcttgggacccagcatcagcccctcccacagccagcggatcgcgggctcccagctctcctccaggctgcagtattttgggcaggcactgagcgggggtcaagacctcacccaggatggactggtggacctggctgtgggggcccggggccaggtgctcctgctcaggaccagacctgtgctctgggtgggggtgagcatgcagttcatacctgccgagatccccaggtctgcgtttgagtgtcgggagcaggtggtctctgagcagaccctggtacagtccaacatctgcctttacattgacaaacgttctaagaacctgcttgggagccgtgacctccaaagctctgtgaccttggacctggccctcgaccctggccgcctgagtccccgtgccaccttccaggaaacaaagaaccggagtctgagccgagtccgagtcctcgggctgaaggcacactgtgaaaacttcaacctgctgctcccgagctgcgtggaggactctgtgacccccattaccttgcgtctgaacttcacgctggtgggcaagcccctccttgccttcagaaacctgcggcctatgctggccgccgatgctcagagatacttcacggcctccctaccctttgagaagaactgtggagccgaccatatctgccaggacaatctcggcatctccttcagcttcccaggcttgaagtccctgctggtggggagtaacctggagctgaacgcagaagtgatggtgtggaatgacggggaagactcctacggaaccaccatcaccttctcccaccccgcaggactgtcctaccgctacgtggcagagggccagaaacaagggcagctgcgttccctgcacctgacatgtgacagcgccccagttgggagccagggcacctggagcaccagctgcagaatcaaccacctcatcttccgtggcggcgcccagatcaccttcttggctacctttgacgtctcccccaaggctgtcctgggagaccggctgcttctgacagccaatgtgagcagtgagaacaacactcccaggaccagcaagaccaccttccagctggagctcccggtgaagtatgctgtctacactgtggttagcagccacgaacaattcaccaaatacctcaacttctcagagtctgaggagaaggaaagccatgtggccatgcacagataccaggtcaataacctgggacagagggacctgcctgtcagcatcaacttctgggtgcctgtggagctgaaccaggaggctgtgtggatggatgtggaggtctcccacccccagaacccatcccttcggtgctcctcagagaaaatcgcacccccagcatctgacttcctggcgcacattcagaagaatcccgtgctggactgctccattgctggctgcctgcggttccgctgtgacgtcccctccttcagcgtccaggaggagctggatttcaccctgaagggcaacctcagctttggctgggtccgccagatattgcagaagaaggtgtcggtcgtgagtgtggctgaaattacgttcgacacatccgtgtactcccagcttccaggacaggaggcatttatgagagctcagacgacaacggtgctggagaagtacaaggtccacaaccccacccccctcatcgtaggcagctccattgggggtctgttgctgctggcactcatcacagcggtactgtacaaagttggcttcttcaagcgtcagtacaaggaaatgatggaggaggcaaatggacaaattgccccagaaaacgggacacagacccccagcccgcccagtgagaaatgatcccctctttgccttggacttcttctcccccgcgagttttccccacttacttaccctcacctgtcaggcctgacggggaggaaccactgcaccaccgagagaggctgggatgggcctgcttcctgtctttgggagaaaacgtcttgcttgggaaggggcctttgtcttgtcaaggttccaactggaaacccttaggacagggtccctgctgtgttccccaaaggacttgacttgcaatttctacctagaaatacatggacaatacccccaggcctcagtctcccttctcccatgaggcacgaatgatctttctttcctttctttttttttttttttcttttcttttttttttttttgagacggagtctcgctctgtcacccaggctggagtgcaatggcgtgatctcggctcactgcaacctccgcctcccgggttcaagtaattctgctgtctcagcctcctgagtagctgggactacaggcacacgccacctcgcccggcccgatctttctaaaatacagttctgaatatgctgctcatccccacctgtcttcaacagctccccattaccctcaggacaatgtctgaactctccagcttcgcgtgagaagtccccttccatcccagagggtgggcttcagggcgcacagcatgagaggctctgtgcccccatcaccctcgtttccagtgaattagtgtcatgtcagcatcagctcagggcttcatcgtggggctctcagttccgatttcccaggctgaattgggagtgagatgcctgcatgctgggttctgcacagctggcctcccgcgttgggcaacattgctggctggaagggaggagcgccctctagggagggacatggccccggtgcggctgcagctcacccagccccaggggcagaagagacccaaccacttctattttttgaggctatgaatatagtacctgaaaaaatgccaagacatgattatttttttaaaaagcgtactttaaatgtttgtgttaataaattaaaacatgcacaaaaagatgcatctaccgctcttgggaaatatgtcaaaggtctaaaaataaaaaagccttctgtgaaaaaaaaaaaaaaaaa

SEQ ID NO: 567 - DNA, 2798 bp, Homo Sapiens
  NM_000889
cgttgctgtcgctctgcacgcacctatgtggaaactaaagcccagagagaaagtctgacttgccccacagccagtgagtgactgcagcagcaccagaatctggtctgtttcctgtttggctcttctaccactacggcttgggatctcgggcatggtggctttgccaatggtccttgttttgctgctggtcctgagcagaggtgagagtgaattggacgccaagatcccatccacaggggatgccacagaatggcggaatcctcacctgtccatgctggggtcctgccagccagccccctcctgccagaagtgcatcctctcacaccccagctgtgcatggtgcaagcaactgaacttcaccgcgtcgggagaggcggaggcgcggcgctgcgcccgacgagaggagctgctggctcgaggctgcccgctggaggagctggaggagccccgcggccagcaggaggtgctgcaggaccagccgctcagccagggcgcccgcggagagggtgccacccagctggcgccgcagcgggtccgggtcacgctgcggcctggggagccccagcagctccaggtccgcttccttcgtgctgagggatacccggtggacctgtactaccttatggacctgagctactccatgaaggacgacctggaacgcgtgcgccagctcgggcacgctctgctggtccggctgcaggaagtcacccattctgtgcgcattggttttggttcctttgtggacaaaacggtgctgccctttgtgagcacagtaccctccaaactgcgccacccctgccccacccggctggagcgctgccagtcaccattcagctttcaccatgtgctgtccctgacgggggacgcacaagccttcgagcgggaggtggggcgccagagtgtgtccggcaatctggactcgcctgaaggtggcttcgatgccattctgcaggctgcactctgccaggagcagattggctggagaaatgtgtcccggctgctggtgttcacttcagacgacacattccatacagctggggacgggaagttgggcggcattttcatgcccagtgatgggcactgccacttggacagcaatggcctctacagtcgcagcacagagtttgactacccttctgtgggtcaggtagcccaggccctctctgcagcaaatatccagcccatctttgctgtcaccagtgccgcactgcctgtctaccaggagctgagtaaactgattcctaagtctgcagttggggagctgagtgaggactccagcaacgtggtacagctcatcatggatgcttataatagcctgtcttccaccgtgacccttgaacactcttcactccctcctggggtccacatttcttacgaatcccagtgtgagggtcctgagaagagggagggtaaggctgaggatcgaggacagtgcaaccacgtccgaatcaaccagacggtgactttctgggtttctctccaagccacccactgcctcccagagccccatctcctgaggctccgggcccttggcttctcagaggagctgattgtggagttgcacacgctgtgtgactgtaattgcagtgacacccagccccaggctccccactgcagtgatggccagggacacctacaatgtggtgtatgcagctgtgcccctggccgcctaggtcggctctgtgagtgctctgtggcagagctgtcctccccagacctggaatctgggtgccgggctcccaatggcacagggcccctgtgcagtggaaagggtcactgtcaatgtggacgctgcagctgcagtggacagagctctgggcatctgtgcgagtgtgacgatgccagctgtgagcgacatgagggcatcctctgcggaggctttggtcgctgccaatgtggagtatgtcactgtcatgccaaccgcacgggcagagcatgcgaatgcagtggggacatggacagttgcatcagtcccgagggagggctctgcagtgggcatggacgctgcaaatgcaaccgctgccagtgcttggacggctactatggtgctctatgcgaccaatgcccaggctgcaagacaccatgcgagagacaccgggactgtgcagagtgtggggccttcaggactggcccactggccaccaactgcagtacagcttgtgcccataccaatgtgaccctggccttggcccctatcttggatgatggctggtgcaaagagcggaccctggacaaccagctgttcttcttcttggtggaggatgacgccagaggcacggtcgtgctcagagtgagaccccaagaaaagggagcagaccacacgcaggccattgtgctgggctgcgtagggggcatcgtggcagtggggctggggctggtcctggcttaccggctctcggtggaaatctatgaccgccgggaatacagtcgctttgagaaggagcagcaacaactcaactggaagcaggacagtaatcctctctacaaaagtgccatcacgaccaccatcaatcctcgctttcaagaggcagacagtcccactctctgaaggagggagggacacttacccaaggctcttctccttggaggacagtgggaactggagggtgagaggaagggtgggtctgtaagaccttggtaggggactaattcactggcgaggtgcggccaccaccctacttcattttcagagtgacacccaagagggctgcttcccatgcctgcaaccttgcatccatctgggctaccccacccaagtatacaataaagtcttacctcagaaaaaaaaaaaaaaaaaa

SEQ ID NO: 568 - DNA, 5397 bp, Homo Sapiens
  NM_000891
gcgcactggagccctggccagcgcgcagccttcccggcgccggcgggctgggtcttgggaattctggtttgctttggctcactcgctttttacaaaccactggatcttacatgcctctgtaccccccacttccactccatgtccccatgctcctgcgccagcaacaggacatgttctctggatgtcagctgagtcattaaagtaactctgcatgtcagtagacagaccttggtagaaccacaaggctcccagagacacccatctctcctcatttttttggtgtgtgtgtcttcaccgaacattcaaaactgtttctccaaagcgttttgcaaaaactcagactgttttccaaagcagaagcactggagtccccagcagaagcgatgggcagtgtgcgaaccaaccgctacagcatcgtctcttcagaagaagacggtatgaagttggccaccatggcagttgcaaatggctttgggaacgggaagagtaaagtccacacccgacaacagtgcaggagccgctttgtgaagaaagatggccactgtaatgttcagttcatcaatgtgggtgagaaggggcaacggtacctcgcagacatcttcaccacgtgtgtggacattcgctggcggtggatgctggttatcttctgcctggctttcgtcctgtcatggctgttttttggctgtgtgttttggttgatagctctgctccatggggacctggatgcatccaaagagggcaaagcttgtgtgtccgaggtcaacagcttcacggctgccttcctcttctccattgagacccagacaaccataggctatggtttcagatgtgtcacggatgaatgcccaattgctgttttcatggtggtgttccagtcaatcgtgggctgcatcatcgatgctttcatcattggcgcagtcatggccaagatggcaaagccaaagaagagaaacgagactcttgtcttcagtcacaatgccgtgattgccatgagagacggcaagctgtgtttgatgtggcgagtgggcaatcttcggaaaagccacttggtggaagctcatgttcgagcacagctcctcaaatccagaattacttctgaaggggagtatatccctctggatcaaatagacatcaatgttgggtttgacagtggaatcgatcgtatatttctggtgtccccaatcactatagtccatgaaatagatgaagacagtcctttatatgatttgagtaaacaggacattgacaacgcagactttgaaatcgtggtcatactggaaggcatggtggaagccactgccatgacgacacagtgccgtagctcttatctagcaaatgaaatcctgtggggccaccgctatgagcctgtgctctttgaagagaagcactactacaaagtggactattccaggttccacaaaacttacgaagtccccaacactcccctttgtagtgccagagacttagcagaaaagaaatatatcctctcaaatgcaaattcattttgctatgaaaatgaagttgccctcacaagcaaagaggaagacgacagtgaaaatggagttccagaaagcactagtacggacacgccccctgacatagaccttcacaaccaggcaagtgtacctctagagcccaggcccttacggcgagagtcggagatatgactgactgattccttctctggaatagttactttacaacacggtctgttggtcagaggcccaaaacagttatacagatgacggtactggtcaagatgggtcaagcaagcggccacaagggactgaggcaagcacaatggtttcaaagaaagactgtaagctccatgattagcataaagcactaaccatgtctccatgtgacccgatggcacatagatgttgtagaataagttatgggtttttatgttttgttttgtgtttttccaaaacttgaacttgcaggcaagccttggttgggtatttgatttatccagaatgcttctctttagggaacaaggatgtttttaatggcataacaaaggcaagactctgccttaatttttgaaaagctgctaactacatgaacacaaatgtgtatttttgttgcagtgtagttttccttttgtgtaattttaaagtcagtgttgaattttattgaaagctcatgatgcgcttcaaagtggcaagtatttggctattaactgccaaaacaagagcctgattttttgaggccagtaattcgtttgctagaattgattttttttctctctctctttgttacataagggcattatgtaacactagccgaatggtagcctctgggttgttgtttttttcttttcctccatgatgttaatgggttatctcaaattttaagttaaactacctaaaataaataccaaagataatgcatatttttgcacagtggagcttacacttaaaagaaaacaaagccccatgggctgccttgaaatcaagagacaataactttgaacctcagcaagaccttgaaccgccggttcattttgcaccttattcagaaaatagagcatcatactcaccgagtctagtcagtgtagtgcttttaaaaattttgtcctttcatgtaacttttttattttaagaggaagaagaagaaaggggcacacacacacaataccgacgtctatcctttcctgctaggcagtgctggccaggctcatgtgtagtgtgcgagatggtgatgtactcttatatttttctgggcttttccttttgcacattccaaaattcatttcataagacaagatcttcataggacctccttggcatcctggcattctcaaaactgagccatccagcatgaaagataaatgggtttaaacccttgctgctgaatttattgcctggactgtcaggacatcaccagcccaccttcaccttagggaagatgccacacctggcctccacacttgctcttctgatcagtctgtctggattgagtcctacagtgtcagatagggcggcaaatgccaaagcagggaaacagggaggtgtggacaagccagtttgatgcagcacttcagatcaagtgcttaggaaggagaggaaacttgccttttttatggcagaggatagtaatgaaaatgtctcagtattttagggtcaatgagagccataaaaatataacataatcacaagtaaaggagataatggtctaaaacagctatttcccttttctgtgtgcatacttatgactgaatgtgagctaagcattttctcctgtggagccctagagcaggttactaaggaaggacacattgttttccagaagcctcccctgcctggctgactgccttgctagaaacataattttttttttctcactgaagctcaataatggaactctttttttttttttttttaatttaaagttccctatttgtgaattctgggattactgacttttctttttaattggagtctcaaaatcaactctcttatggtattatatctctgtatgccattaaaaaacagcttgttctagaatcatgtattttgtaaactgatgtttgtgatggtctctggttcttgaacagccatatctgaatgccgtgcctgcaaaactatgacaatttttgctgttttcagccttcagatttgatggcttgggaaactgaggtgttattttcaatgaaacaaagaaagagatgttaagcaagtggttgttttagatccaaatgtaaaggcaggtttgggaaggtgtttaaagagttggaggaattggggattgagttgtaaagaaaacttacagaagaggcaacaatttggttcttgacagtgagaggatattgagggcttcagctgctgctattatgatgttttgcaaaggaaaataatcaaaccaaagagtattcagtgatatgtaaattaaatgaagatacagtggagaatgggggtgaccacaaaagaggctccccctaaacacacagtgctgccacttaaaaagacttgagaaatttgaaagggggtgggtatggggggggcaagaaagagggagggaaatctttcaacttatttctgaaaaagagaaaaaaatataaaatttctggtgcacaggtttgttttttcaagaaaattttgcagaagctatgtttttaaagtgtacattttataaagtttatcagatattttcatatttaaagccaaatgtaaatagaggtctgtaaagaaaaataattgccatagaaagtataatttcagtgcagtaatttctgagagctagtacctatatgctaccggttagcatggttttagcaaatatataccagccttataaggttcgtattgctatgttcttctgttatttatttcagcatggactgttcatttgaaacctttttctagttattagcgttttaacagttacaagctttaaatggcaattttttttttttttttttttttttttttttttttgtcaagagccaagacacaggtaatgcacgacattgattgctgcattttaccttcaaaatatttgtccttattgactgggtctccttaattaatgtacacatgtcattagaatgcagacggaggggactcaccatgaatatctggggttgattcccagatgtgtgttgcttctctattgcaagcagattccctgttggatttacttcggatttattcccttttaaagaatttttgcccatatctggaagggcactatatttttgggaggagccatagattcctggttatcctatttttaaacaaaatgtagacaaagtgaactctattttgattattgagaaaggagtagttttctatccctctaagagtatacttgaatcagacattttaaggatgtcactatggcactgttgtcatttccaaattcctagaaaagtttgttttactttgtttttattctgttaatgcattctttcttctctttacttcctttcttaccagtacactcctatctcaactctgtttatttgatgagttctgtcccgtaaatcatatttcccttacaattaataaatgtcacttcatattttataataaaccactcagtaaaagcaaaagcttgtcctgagaagtagagtgagttctttttcactctgtgtctaataatgttaaggtgggaaaaaaaaaagtgtggcatagctacctgcccatccccaaccctcagcaaagtagaatctcttttctggtaattttgggtttccgctctgggctctggcaagttgaacaatcctagccattgacaatcgtgatagttattattttcccatttgctgtctttttgtatctaaagtcttcctattgtactgcacaaaccatggattgtacatatttttatatattatgtcttattttattatttctaaataaaaaaattaaaaattgaaaaaaaaaaaaa

SEQ ID NO: 569 - DNA, 2252 bp, Homo Sapiens
  NM_000892
agaacagcttgaagaccgttcatttttaagtgacaagagactcacctccaagaagcaattgtgttttcagaatgattttattcaagcaagcaacttatttcatttccttgtttgctacagtttcctgtggatgtctgactcaactctatgaaaacgccttcttcagaggtggggatgtagcttccatgtacaccccaaatgcccaatactgccagatgaggtgcacattccacccaaggtgtttgctattcagttttcttccagcaagttcaatcaatgacatggagaaaaggtttggttgcttcttgaaagatagtgttacaggaaccctgccaaaagtacatcgaacaggtgcagtttctggacattccttgaagcaatgtggtcatcaaataagtgcttgccatcgagacatttataaaggagttgatatgagaggagtcaattttaatgtgtctaaggttagcagtgttgaagaatgccaaaaaaggtgcaccagtaacattcgctgccagtttttttcatatgccacgcaaacatttcacaaggcagagtaccggaacaattgcctattaaagtacagtcccggaggaacacctaccgctataaaggtgctgagtaacgtggaatctggattctcactgaagccctgtgccctttcagaaattggttgccacatgaacatcttccagcatcttgcgttctcagatgtggatgttgccagggttctcactccagatgcttttgtgtgtcggaccatctgcacctatcaccccaactgcctcttctttacattctatacaaatgtatggaaaatcgagtcacaaagaaatgtttgtcttcttaaaacatctgaaagtggcacaccaagttcctctactcctcaagaaaacaccatatctggatatagccttttaacctgcaaaagaactttacctgaaccctgccattctaaaatttacccgggagttgactttggaggagaagaattgaatgtgacttttgttaaaggagtgaatgtttgccaagagacttgcacaaagatgattcgctgtcagtttttcacttattctttactcccagaagactgtaaggaagagaagtgtaagtgtttcttaagattatctatggatggttctccaactaggattgcgtatgggacacaagggagctctggttactctttgagattgtgtaacactggggacaactctgtctgcacaacaaaaacaagcacacgcattgttggaggaacaaactcttcttggggagagtggccctggcaggtgagcctgcaggtgaagctgacagctcagaggcacctgtgtggagggtcactcataggacaccagtgggtcctcactgctgcccactgctttgatgggcttcccctgcaggatgtttggcgcatctatagtggcattttaaatctgtcagacattacaaaagatacacctttctcacaaataaaagagattattattcaccaaaactataaagtctcagaagggaatcatgatatcgccttgataaaactccaggctcctttgaattacactgaattccaaaaaccaatatgcctaccttccaaaggtgacacaagcacaatttataccaactgttgggtaaccggatggggcttctcgaaggagaaaggtgaaatccaaaatattctacaaaaggtaaatattcctttggtaacaaatgaagaatgccagaaaagatatcaagattataaaataacccaacggatggtctgtgctggctataaagaagggggaaaagatgcttgtaagggagattcaggtggtcccttagtttgcaaacacaatggaatgtggcgtttggtgggcatcaccagctggggtgaaggctgtgcccgcagggagcaacctggtgtctacaccaaagtcgctgagtacatggactggattttagagaaaacacagagcagtgatggaaaagctcagatgcagtcaccagcatgagaagcagtccagagtctaggcaatttttacaacctgagttcaagtcaaattctgagcctggggggtcctcatctgcaaagcatggagagtggcatcttctttgcatcctaaggacgaaaaacacagtgcactcagagctgctgaggacaatgtctggctgaagcccgctttcagcacgccgtaaccaggggctgacaatgcgaggtcgcaactgagatctccatgactgtgtgttgtgaaataaaatggtgaaagatcaaaaaa

SEQ ID NO: 570 - DNA, 2060 bp, Homo Sapiens
  NM_000895
ctctatcgacgagtctggtagctgagcgttgggctgtaggtcgctgtgctgtgtgatcccccagagccatgcccgagatagtggatacctgttcgttggcctctccggcttccgtctgccggaccaagcacctgcacctgcgctgcagcgtcgactttactcgccggacgctgaccgggactgctgctctcacggtccagtctcaggaggacaatctgcgcagcctggttttggatacaaaggaccttacaatagaaaaagtagtgatcaatggacaagaagtcaaatatgctcttggagaaagacaaagttacaagggatcgccaatggaaatctctcttcctatcgctttgagcaaaaatcaagaaattgttatagaaatttcttttgagacctctccaaaatcttctgctctccagtggctcactcctgaacagacttctgggaaggaacacccatatctctttagtcagtgccaggccatccactgcagagcaatccttccttgtcaggacactccttctgtgaaattaacctatactgcagaggtgtctgtccctaaagaactggtggcacttatgagtgctattcgtgatggagaaacacctgacccagaagacccaagcaggaaaatatacaaattcatccaaaaagttccaataccctgctacctgattgctttagttgttggagctttagaaagcaggcaaattggcccaagaactttggtgtggtctgagaaagagcaggtggaaaagtctgcttatgagttttctgagactgaatctatgcttaaaatagcagaagatctgggaggaccgtatgtatggggacagtatgacctattggtcctgccaccatccttcccttatggtggcatggagaatccttgccttacttttgtaactcctactctactggcaggcgacaagtcactctccaatgtcattgcacatgaaatatctcatagctggacagggaatctagtgaccaacaaaacttgggatcacttttggttaaatgagggacatactgtgtacttggaacgccacatttgcggacgattgtttggtgaaaagttcagacattttaatgctctgggaggatggggagaactacagaattcggtaaagacatttggggagacacatcctttcaccaaacttgtggttgatctgacagatatagaccctgatgtagcttattcttcagttccctatgagaagggctttgctttacttttttaccttgaacaactgcttggaggaccagagattttcctaggattcttaaaagcttatgttgagaagttttcctataagagcataactactgatgactggaaggatttcctgtattcctattttaaagataaggttgatgttctcaatcaagttgattggaatgcctggctctactctcctggactgcctcccataaagcccaattatgatatgactctgacaaatgcttgtattgccttaagtcaaagatggattactgccaaagaagatgatttaaattcattcaatgccacagacctgaaggatctctcttctcatcaattgaatgagtttttagcacagacgctccagagggcacctcttccattggggcacataaagcgaatgcaagaggtgtacaacttcaatgccattaacaattctgaaatacgattcagatggctgcggctctgcattcaatccaagtgggaggacgcaattcctttggcgctaaagatggcaactgaacaaggaagaatgaagtttacccggcccttattcaaggatcttgctgcctttgacaaatcccatgatcaagctgtccgaacctaccaagagcacaaagcaagcatgcatcccgtgactgcaatgctggtggggaaagacttaaaagtggattaaagacctgcgtattgatgattttagagatttctcttttttaaatggaattcgtaaagaaatataaaacttcagctcacaattaaaactgtctttttagttttggctttttattgttttgttggtgattttactgaaataaagatgagctacttcttc

SEQ ID NO: 571 - DNA, 5915 bp, Homo Sapiens
  NM_000901
aaaagggccagccctccagctggcccactccccctccgggctttcgcccgccctctctccctcccttttttgcccgccctggccctgcccctgcccctgccccctcctctcagcccctccgcgcccggggtgtcattgggcccgggagacgggagccaacttcaggctgctcagaggaagcccgtgcagtcagtcacctgggtgcaagagcgttgctgcctcgggctctcccgctgcagggagagcggcactcgctggcctggatgtggttggatttaggggggctccgcagcaggggtttcgtggcggtggcaagcgctgcaacaggtagacggcgagagacggaccccggccgaggcagcgatggagaccaaaggctaccacagtctccctgaaggtctagatatggaaagacggtggggtcaagtttctcaggctgtggagcgttcttccctgggacctacagagaggaccgatgagaataactacatggagattgtcaacgtaagctgtgtttccggtgctattccaaacaacagtactcaaggaagcagcaaagaaaaacaagaactactcccttgccttcagcaagacaataatcggcctgggattttaacatctgatattaaaactgagctggaatctaaggaactttcagcaactgtagctgagtccatgggtttatatatggattctgtaagagatgctgactattcctatgagcagcagaaccaacaaggaagcatgagtccagctaagatttatcagaatgttgaacagctggtgaaattttacaaaggaaatggccatcgtccttccactctaagttgtgtgaacacgcccttgagatcatttatgtctgactctgggagctccgtgaatggtggcgtcatgcgcgccgttgttaaaagccctatcatgtgtcatgagaaaagcccgtctgtttgcagccctctgaacatgacatcttcggtttgcagccctgctggaatcaactctgtgtcctccaccacagccagctttggcagttttccagtgcacagcccaatcacccagggaactcctctgacatgctcccctaatgttgaaaatcgaggctccaggtcgcacagccctgcacatgctagcaatgtgggctctcctctctcaagtccgttaagtagcatgaaatcctcaatttccagccctccaagtcactgcagtgtaaaatctccagtctccagtcccaataatgtcactctgagatcctctgtgtctagccctgcaaatattaacaactcaaggtgctctgtttccagcccttcgaacactaataacagatccacgctttccagtccggcagccagtactgtgggatctatctgtagccctgtaaacaatgccttcagctacactgcttctggcacctctgctggatccagtacattgcgggatgtggttcccagtccagacacgcaggagaaaggtgctcaagaggtcccttttcctaagactgaggaagtagagagtgccatctcaaatggtgtgactggccagcttaatattgtccagtacataaaaccagaaccagatggagcttttagcagctcatgtctaggaggaaatagcaaaataaattcggattcttcattctcagtaccaataaagcaagaatcaaccaagcattcatgttcaggcacctcttttaaagggaatccaacagtaaacccgtttccatttatggatggctcgtatttttcctttatggatgataaagactattattccctatcaggaattttaggaccacctgtgcccggctttgatggtaactgtgaaggcagcggattcccagtgggtattaaacaagaaccagatgatgggagctattacccagaggccagcatcccttcctctgctattgttggggtgaattcaggtggacagtccttccactacaggattggtgctcaaggtacaatatctttatcacgatcggctagagaccaatctttccaacacctgagttcctttcctcctgtcaatactttagtggagtcatggaaatcacacggcgacctgtcgtctagaagaagtgatgggtatccggtcttagaatacattccagaaaatgtatcaagctctactttacgaagtgtttctactggatcttcaagaccttcaaaaatatgtttggtgtgtggggatgaggcttcaggatgccattatggggtagtcacctgtggcagctgcaaagttttcttcaaaagagcagtggaagggcaacacaactatttatgtgctggaagaaatgattgcatcattgataagattcgacgaaagaattgtcctgcttgcagacttcagaaatgtcttcaagctggaatgaatttaggagcacgaaagtcaaagaagttgggaaagttaaaagggattcacgaggagcagccacagcagcagcagcccccacccccacccccacccccgcaaagcccagaggaagggacaacgtacatcgctcctgcaaaagaaccctcggtcaacacagcactggttcctcagctctccacaatctcacgagcgctcacaccttcccccgttatggtccttgaaaacattgaacctgaaattgtatatgcaggctatgacagctcaaaaccagatacagccgaaaatctgctctccacgctcaaccgcttagcaggcaaacagatgatccaagtcgtgaagtgggcaaaggtacttccaggatttaaaaacttgcctcttgaggaccaaattaccctaatccagtattcttggatgtgtctatcatcatttgccttgagctggagatcgtacaaacatacgaacagccaatttctctattttgcaccagacctagtctttaatgaagagaagatgcatcagtctgccatgtatgaactatgccaggggatgcaccaaatcagccttcagttcgttcgactgcagctcacctttgaagaatacaccatcatgaaagttttgctgctactaagcacaattccaaaggatggcctcaaaagccaggctgcatttgaagaaatgaggacaaattacatcaaagaactgaggaagatggtaactaagtgtcccaacaattctgggcagagctggcagaggttctaccaactgaccaagctgctggactccatgcatgacctggtgagcgacctgctggaattctgcttctacaccttccgagagtcccatgcgctgaaggtagagttccccgcaatgctggtggagatcatcagcgaccagctgcccaaggtggagtcggggaacgccaagccgctctacttccaccggaagtgactgcccgctgcccagaagaactttgccttaagtttccctgtgttgttccacacccagaaggacccaagaaaacctgtttttaacatgtgatggttgattcacacttgttcaacagtttctcaagtttaaagtcatgtcagaggtttggagccgggaaagctgtttttccgtggatttggcgagaccagagcagtctgaaggattccccacctccaatcccccagcgcttagaaacatgttcctgttcctcgggatgaaaagccatatctagtcaataactctgattttgatattttcacagatggaagaagttttaactatgccgtgtagtttctggtatcgttcgcttgttttaaaagggttcaaggactaacgaacgttttaaagcttacccttggtttgcacataaaacgtatagtcaatatggggcattaatattcttttgttattaaaaaaacacaaaaaaataataaaaaaatatatacagattcctgttgtgtaataacagaactcgtggcgtggggcagcagctgcctctgagccctcgctcgtccacggtcttctgcatcactggtatacacactcgttagcgtccatttcttatttaattagaatggataagatgatgttaaatgccttggtttgatttctagtatctattgtgttggctttacaaataattttttgcagtcttttgctgtgctgtacattactgtatgtataaattatgaaggacctgaaataaggtataaggatcttttgtaaatgagacacatacaaaaaaaatctttaatggttaataggatgaatgggaaagtatttttgaaagaattctattttgctggagactatttaagtactatctttgtctaaacaaggtaatttttttttgtaaagtgcaatgtcctgcatgcataatgaaccgtttacagtgtatttaagaaagggaaagctgtgccttttttagcttcatatctaatttaccattattttacagtctctgttgtaaataaccacactgaaacctcttcggttgtcttgaaacctttctactttttctgtactttttgttttgttcttggtctcccgcttggggcatttgtgggactccagcacgttttctggcttctgcttcatcctgctccatcggggaatgacacactgcggtgtctgcagctcctggaaggtgtcatttgacaacacatgtgggagaggaggtccttggagtgctgcagctttgggaaagctgcctcgtttcccttttcctctagaagcagaaccagctctacgagagtgagactgggaacttgatggctcagagagcatcttttcctcccattttagaaaatcagattttctcctgtgggaaaaaaaaattccatgcactctctctctgttaaagatcagctattcccttctgatcttggaaagaggttctgcactcctggaaccggtcacaggaacgcacagatcatggcaggatgcgctgggacggcccatcttggcaaggttcagtctgaatggcatggagaccgggagatagaggggttttagatttttaaaaggtaggttttaaaaataagttttatacataaacagttttggagaaaaattacagatcatataagcaagacagtggcactaaaatgtttaattcattaatctgtttgtttggcactgatgcaatgtatggcttttctcttgccccaaatcacaaacatatgtatctttggggaaactaacaatatgattgcactaaataaactactttgaatagaggccaaattaatcttttaaaaatgatgataatcatcaggtttactcagtgaaatcatattaattattttccaaaatctaaaagctgtagctggagaagcccatggccacgaggaagcagcaattaattagatcaacacttttctccagggttcaccatgcaggcaacattaccttgtctttcaaaagacacctgccttatgcaaggggaaacctgtgaaagctgcactcagagggaggagtttttcttacataatttgcaatttcaggaatttaatttataggcagatctttaaatacagtcaacttacggtgcacagtaatatgaaagccacactttgaaggtaataaatacacagcatgcagactgggagttgctagcaaacaaatggcttacttacaaaagcagcttttagttcagacttagtttttataaaatgggaattctgacttacttaaccaggtttgggatggagatggtctgcatcagctttttgtattaacaaagttactggctctttgtgtgtctccaggtaactttgcttgattaaacagcaaagccatattctaaattcactgttgaatgcctgtcccagtccaaattgtctgtctgctcttatttttgtaccatattgctcttaaaaatcttggtttggtacagttcataattcaccaaaagttcatataatttaaagaaacactaaattagtttaaaatgaagcaatttatatctttatgcaaaaacatatgtctgtctttgcaaaggactgtaagcagattacaataaatcctttactttaatcaaaaaaaaaaaaaaaaaa

SEQ ID NO: 572 - DNA, 5643 bp, Homo Sapiens
  NM_000902
gagagcgccgagacgcgcggggcgcggagatgtgcaagtggcgaagcttgaccgagagcaggctggagcagccgcccaactcctggcgcgggatctgctgaggggtcacgattttaggtgatgggcaagtcagaaagtcagatggatataactgatatcaacactccaaagccaaagaagaaacagcgatggactccactggagatcagcctctcggtccttgtcctgctcctcaccatcatagctgtgacaatgatcgcactctatgcaacctacgatgatggtatttgcaagtcatcagactgcataaaatcagctgctcgactgatccaaaacatggatgccaccactgagccttgtacagactttttcaaatatgcttgcggaggctggttgaaacgtaatgtcattcccgagaccagctcccgttacggcaactttgacattttaagagatgaactagaagtcgttttgaaagatgtccttcaagaacccaaaactgaagatatagtagcagtgcagaaagcaaaagcattgtacaggtcttgtataaatgaatctgctattgatagcagaggtggagaacctctactcaaactgttaccagacatatatgggtggccagtagcaacagaaaactgggagcaaaaatatggtgcttcttggacagctgaaaaagctattgcacaactgaattctaaatatgggaaaaaagtccttattaatttgtttgttggcactgatgataagaattctgtgaatcatgtaattcatattgaccaacctcgacttggcctcccttctagagattactatgaatgcactggaatctataaagaggcttgtacagcatatgtggattttatgatttctgtggccagattgattcgtcaggaagaaagattgcccatcgatgaaaaccagcttgctttggaaatgaataaagttatggaattggaaaaagaaattgccaatgctacggctaaacctgaagatcgaaatgatccaatgcttctgtataacaagatgacattggcccagatccaaaataacttttcactagagatcaatgggaagccattcagctggttgaatttcacaaatgaaatcatgtcaactgtgaatattagtattacaaatgaggaagatgtggttgtttatgctccagaatatttaaccaaacttaagcccattcttaccaaatattctgccagagatcttcaaaatttaatgtcctggagattcataatggatcttgtaagcagcctcagccgaacctacaaggagtccagaaatgctttccgcaaggccctttatggtacaacctcagaaacagcaacttggagacgttgtgcaaactatgtcaatgggaatatggaaaatgctgtggggaggctttatgtggaagcagcatttgctggagagagtaaacatgtggtcgaggatttgattgcacagatccgagaagtttttattcagactttagatgacctcacttggatggatgccgagacaaaaaagagagctgaagaaaaggccttagcaattaaagaaaggatcggctatcctgatgacattgtttcaaatgataacaaactgaataatgagtacctcgagttgaactacaaagaagatgaatacttcgagaacataattcaaaatttgaaattcagccaaagtaaacaactgaagaagctccgagaaaaggtggacaaagatgagtggataagtggagcagctgtagtcaatgcattttactcttcaggaagaaatcagatagtcttcccagccggcattctgcagccccccttctttagtgcccagcagtccaactcattgaactatgggggcatcggcatggtcataggacacgaaatcacccatggcttcgatgacaatggcagaaactttaacaaagatggagacctcgttgactggtggactcaacagtctgcaagtaactttaaggagcaatcccagtgcatggtgtatcagtatggaaacttttcctgggacctggcaggtggacagcaccttaatggaattaatacactgggagaaaacattgctgataatggaggtcttggtcaagcatacagagcctatcagaattatattaaaaagaatggcgaagaaaaattacttcctggacttgacctaaatcacaaacaactatttttcttgaactttgcacaggtgtggtgtggaacctataggccagagtatgcggttaactccattaaaacagatgtgcacagtccaggcaatttcaggattattgggactttgcagaactctgcagagttttcagaagcctttcactgccgcaagaattcatacatgaatccagaaaagaagtgccgggtttggtgatcttcaaaagaagcattgcagcccttggctagacttgccaacaccacagaaatggggaattctctaatcgaaagaaaatgggccctaggggtcactgtactgacttgagggtgattaacagagagggcaccatcacaatacagataacattaggttgtcctagaaagggtgtggagggaggaagggggtctaaggtctatcaagtcaatcatttctcactgtgtacataatgcttaatttctaaagataatattactgtttatttctgtttctcatatggtctaccagtttgctgatgtccctagaaaacaatgcaaaacctttgaggtagaccaggatttctaatcaaaagggaaaagaagatgttgaagaatacagttaggcaccagaagaacagtaggtgacactatagtttaaaacacattgcctaactactagtttttacttttatttgcaacatttacagtccttcaaaatccttccaaagaattcttatacacattggggccttggagcttacatagttttaaactcatttttgccatacatcagttattcattctgtgatcatttattttaagcactcttaaagcaaaaaatgaatgtctaaaattgttttttgttgtacctgctttgactgatgctgagattcttcaggcttcctgcaattttctaagcaatttcttgctctatctctcaaaacttggtatttttcagagatttatataaatgtaaaaataataatttttatatttaattattaactacatttatgagtaactattattataggtaatcaatgaatattgaagtttcagcttaaaataaacagttgtgaaccaagatctataaagcgatatacagatgaaaatttgagactatttaaacttataaatcatattgatgaaaagatttaagcacaaactttagggtaaaaattgccattggacagttgtctagagatatatatacttgtggttttcaaattggactttcaaaattaaatctgtccctgagagtgtctctgataaaagggcaaatctgcacctatgtagctctgcatctcctgtcttttcaggtttgtcatcagatggaaatattttgataataaattgaaattgtgaactcattgctccctaagactgtgacaactgtctaactttagaagtgcatttctgaatagaaatgggaggcctctgatggaccttctagaattataagtcacaaagagttctggaaaagaactgtttactgcttgataggaattcatcttttgaggcttctgttcctctcttttcctgttgtattgactattttcgttcattacttgattaagattttacaaaagaggagcacttccaaaattcttatttttcctaacaaaagatgaaagcagggaatttctatctaaatgatgagtattagttccctgtctcttgaaaaatgcccatttgcctttaaaaaaaaaagttacagaaatactataacatatgtacataaattgcataaagcataagtatacagttcaataaacttaactttaactgaacaatggccctgtagccagcacctgtaagaaacagagcagtaccagcgctctaaaagcacctccttgtcactttattactcccagaacaacaactatcctgacttctaatatcattcactagctttgcctggttttgtcttttatgcagatagaatcaatcagtatgtattcttttgtgcctggcttctttctctcagccttacatttgtgagattcctctgtattgtgctgattgtggatcttttcattctcattgcagaataatgttctattgtgggacttattacaatttgttcatcctattgttgatgggcacttgagaactttccattttggcgctattacaaatagtgcaactatgaatgtactgcatgttaccatcttacttgagcctttaatggacttatttcttcaaatccttccaaaaattattataagcattgaaattatagtttcaagccaactgtggatacccttaccctttcctcctttatcacaaccaccgttacaagtatacttatatttccctaaaatacatttaaaacttacctaagtgacatttgtagttggagtaataggagcttccagctctaataaaacagctgtctctaacttattttatttccatcatgtcagagcaggtgaagagccagaagtgaagagtgactagtacaaattataaaaagccactagactcttcactgttagctttttaaaacattaggctcccatccctatggaggaacaactctccagtgcctggatcccctctgtctacaaatataagattttctgggcctaaaggatagatcaaagtcaaaaatagcaatgcctccctatccctcacacatccagacatcatgaattttacatggtactcttgttgagttctgtagagccttctgatgtctctaaagcactaccgattctttggagttgtcacatcagataagacatatctctaattccatccataaatccagttctactatggctgagttctggtcaaagaaagaaagtttagaagctgagacacaaagggttgggagctgatgaaactcacaaatgatggtaggaagaagctctcgacaatacccgttggcaaggagtctgcctccatgctgcagtgttcgagtggattgtaggtgcaagatggaaaggattgtaggtgcaagctgtccagagaaaagagtccttgttccagccctattctgccactcctgacagggtgaccttgggtatttgcaatattcctttgggcctctgcttctctcacctaaaaaaagagaattagattatattggtggttctcagcaagagaaggagtatgtgtccaatgctgccttcccatgaatctgtctcccagttatgaatcagtgggcaggataaactgaaaactcccatttacgtgtctgaatcgagtgagacaaaattttagtccaaataacaagtaccaaagttttatcaagtttgggtctgtgctgctgttactgttaaccatttaagtggggcaaaaccttgctaattttctcaaaagcatttatcattcttgttgccacagctggagctctcaaactaaaagacatttgttattttggaaagaagaaagactctattctcaaagtttcctaatcagaaatttttatcagtttccagtctcaaaaatacaaaataaaaacaaacgtttttaatactattgcttttatgcctagtcaactctg

SEQ ID NO: 573 - DNA, 2601 bp, Homo Sapiens
  NM_000903
ccgcccttgtaggctgtccacctcaaacgggccggacaggatatataagagagaatgcaccgtgcactacacacgcgactcccacaaggttgcagccggagccgcccagctcaccgagagcctagttccggccagggtcgccccggcaaccacgagcccagccaatcagcgccccggactgcaccagagccatggtcggcagaagagcactgatcgtactggctcactcagagaggacgtccttcaactatgccatgaaggaggctgctgcagcggctttgaagaagaaaggatgggaggtggtggagtcggacctctatgccatgaacttcaatcccatcatttccagaaaggacatcacaggtaaactgaaggaccctgcgaactttcagtatcctgccgagtctgttctggcttataaagaaggccatctgagcccagatattgtggctgaacaaaagaagctggaagccgcagaccttgtgatattccagttccccctgcagtggtttggagtccctgccattctgaaaggctggtttgagcgagtgttcataggagagtttgcttacacttacgctgccatgtatgacaaaggacccttccggagtaagaaggcagtgctttccatcaccactggtggcagtggctccatgtactctctgcaagggatccacggggacatgaatgtcattctctggccaattcagagtggcattctgcatttctgtggcttccaagtcttagaacctcaactgacatatagcattgggcacactccagcagacgcccgaattcaaatcctggaaggatggaagaaacgcctggagaatatttgggatgagacaccactgtattttgctccaagcagcctctttgacctaaacttccaggcaggattcttaatgaaaaaagaggtacaggatgaggagaaaaacaagaaatttggcctttctgtgggccatcacttgggcaagtccatcccaactgacaaccagatcaaagctagaaaatgagattccttagcctggatttccttctaacatgttatcaaatctgggtatctttccaggcttccctgacttgctttagtttttaagatttgtgtttttctttttccacaaggaataaatgagagggaatcgactgtattcgtgcatttttggatcatttttaactgattcttatgattactatcatggcatataaccaaaatccgactgggctcaagaggccacttagggaaagatgtagaaagatgctagaaaaatgttctttaaaggcatctacacaatttaattcctctttttagggctaaagttttagggtacagtttggctaggtatcattcaactctccaatgttctattaatcacctctctgtagtttatggcagaagggaattgctcagagaaggaaaagactgaatctacctgccctaagggacttaacttgtttggtagttagccatctaatgcttgtttatgatatttcttgctttcaattacaaagcagttactaatatgcctagcacaagtaccactcttggtcagcttttgttgtttatatacagtacacagataccttgaaaggaagagctaataaatctcttctttgctgcagtcatctactttttttttaattaaaaaaaatttttttttgaagcagtcttgctctgttacccaggctggagtgcagtggtgtgatctcggctcactgcaacctctgcctcccaggttccagcaattctcctgcctcagcctccctagtagctgggatgacaggcgcctgccatcatgcctgactaatttttgtatttttagtagagacggcgtttcaccatgttggccaggctggtctcaaactcctgacctcaggtgatccgcctacctcagcctcccaaagtgctgggattacaggcgtgatccaccacacctggcccttgcaatcttctactttaaggtttgcagagataaaccaataaatccacaccgtacatctgcaatatgaattcaagaaaggaaatagtaccttcaatacttaaaaatagtcttccacaaaaaatactttatttctgatctatacaaattttcagaaggttattttctttatcattgctaaactgatgacttactatgggatggggtccagtcccatgaccttggggtacaattgtaaacctagagttttatcaactttggtgaacagttttggcataatagtcaatttctacttctggaagtcatctcattccactgttggtattatataattcaaggagaatatgataaaacactgccctcttgtggtgcattgaaagaagagatgagaaatgatgaaaaggttgcctgaaaaatgggagacagcctcttacttgccaagaaaatgaagggattggaccgagctggaaaacctcctttaccagatgctgactggcactggtggtttttgctctcgacagtatccacaatagctgacggctgggtgtttcagtttgaaaatattttgttgccttcatcttcactgcaattttgtgtaaatttctcaaagatctgaattaaataaataaaattcatttctacagacccacaaaaaaaaaaa

SEQ ID NO: 574 - DNA, 1139 bp, Homo Sapiens
  NM_000904
gggcggggcctcggcgtggtaggcgcgctgcgtaaagaggcctgcagtcccgcggcgcggggcaggttccgggctgcttaggttggcaccggtccgtggtccccgggggcgcagtcgcagcgctcccgccctccaggcgtcagcgagtgcgcggtccagtgcggccggaacctggcgcaactcctagagcggtccttggggagacgcgggtcccagtcctgcggctcctactggggagtgcgctggtcggaagattgctggactcgctgaagagagactacgcaggaaagccccagccacccatcaaatcagagagaaggaatccaccttcttacgctatggcaggtaagaaagtactcattgtctatgcacaccaggaacccaagtctttcaacggatccttgaagaatgtggctgtagatgaactgagcaggcagggctgcaccgtcacagtgtctgatttgtatgccatgaaccttgagccgagggccacagacaaagatatcactggtactctttctaatcctgaggttttcaattatggagtggaaacccacgaagcctacaagcaaaggtctctggctagcgacatcactgatgagcagaaaaaggttcgggaggctgacctagtgatatttcagttcccgctgtactggttcagcgtgccagccatcctgaagggctggatggatagggtgctgtgccagggctttgcctttgacatcccaggattctacgattccggtttgctccagggtaaactagcgctcctttccgtaaccacgggaggcacggccgagatgtacacgaagacaggagtcaatggagattctcgatacttcctgtggccactccagcatggcacattacacttctgtggatttaaagtccttgcccctcagatcagctttgctcctgaaattgcatccgaagaagaaagaaaggggatggtggctgcgtggtcccagaggctgcagaccatctggaaggaagagcccatcccctgcacagcccactggcacttcgggcaataactctgtggcacgtgggcatcacgtaagcagcacactaggaggcccaggcgcaggcaaagagaagatggtgctgtcatgaaataaaattacaacatagctacctgg

SEQ ID NO: 575 - DNA, 3240 bp, Homo Sapiens
  NM_000913
tgggggtggcccggagagtcgaggtgctcatagtggagccctggctcccgggcggacggagccgcacggtagtagatgggggtgtggccgtggcccccgactctgctcggcggggccgttcctgctttgccatccgtgtgggacttccacgacagtggaggcacgagagctgggccccatatgctgcttgcccagcttgggaaagaggaggctgctgcaaaggaccgatcggcgggtaccgtacagagtggatttgcagggcagtggcatggagcccctcttccccgcgccgttctgggaggttatctacggcagccaccttcagggcaacctgtccctcctgagccccaaccacagtctgctgcccccgcatctgctgctcaatgccagccacggcgccttcctgcccctcgggctcaaggtcaccatcgtggggctctacctggccgtgtgtgtcggagggctcctggggaactgccttgtcatgtacgtcatcctcaggcacaccaaaatgaagacagccaccaatatttacatctttaacctggccctggccgacactctggtcctgctgacgctgcccttccagggcacggacatcctcctgggcttctggccgtttgggaatgcgctgtgcaagacagtcattgccattgactactacaacatgttcaccagcaccttcaccctaactgccatgagtgtggatcgctatgtagccatctgccaccccatccgtgccctcgacgtccgcacgtccagcaaagcccaggctgtcaatgtggccatctgggccctggcctctgttgtcggtgttcccgttgccatcatgggctcggcacaggtcgaggatgaagagatcgagtgcctggtggagatccctacccctcaggattactggggcccggtgtttgccatctgcatcttcctcttctccttcatcgtccccgtgctcgtcatctctgtctgctacagcctcatgatccggcggctccgtggagtccgcctgctctcgggctcccgagagaaggaccggaacctgcggcgcatcactcggctggtgctggtggtagtggctgtgttcgtgggctgctggacgcctgtccaggtcttcgtgctggcccaagggctgggggttcagccgagcagcgagactgccgtggccattctgcgcttctgcacggccctgggctacgtcaacagctgcctcaaccccatcctctacgccttcctggatgagaacttcaaggcctgcttccgcaagttctgctgtgcatctgccctgcgccgggacgtgcaggtgtctgaccgcgtgcgcagcattgccaaggacgtggccctggcctgcaagacctctgagacggtaccgcggcccgcatgactaggcgtggacctgcccatggtgcctgtcagcccgcagagcccatctacgcccaacacagagctcacacaggtcactgctctctaggcggacacaccctgggccctgagcatccagagcctgggatgggcttttccctgtgggccagggatgctcggtcccagaggaggacctagtgacatcatgggacaggtcaaagcattagggccacctccatggccccagacagactaaagctgccctcctggtgcagggccgaggggacacaaggacctacctggaagcagctgacatgctggtggacggccgtgactggagcccgtgcccctccctccccgtgcttcatgtgactcttggcctctctgctgctgcgttggcagaaccctgggtgggcaggcacccggaggaggagcagcagctgtgtcatcctgtgccccccatgtgctgtgtgctgtttgcatggcagggctccagctgccttcagccctgtgacgtctcctcagggcagctggacaggcttggcactgcccgggaagtgcagcaggcagcttttctttggggtgggacttgccctgagcttggagctgccacctggaggacttgcctgttccgactccacctgtgcagccggggccaccccaggagaaagtgtccaggtgggggctggcagtccctggctgcagaccccgagctggccctgggccagccgcacctctgaaggttttctgtgtgctgcacggtgcaggcctcatccctgactgcagcttgactctgggcccaacccccatttcccttcaggagaccagcgagaggccctggcccattccctccagcggtgcaatgaactatcatgctgtggaccgtcaacccagccctgcttctcagtgtggggcaggtgtctcaggacgaaggcgccgcgtgaccacatgggcagctctgttcacaaagtggaggcctcgttttcctggtcttgactgctctgtttgggtgggagaagattctctgggggtccccacatcctcccaaggctcccctcacagcctctcctttgcttgaagccagaggtcagtggccgtgctgtgttgcgggggaagctgtgtggaaggagaagctggtggccacagcagagtcctgctctggggacgcctgcttcatttacaagcctcaagatggctctgtgtagggcctgagcttgctgcccaacgggaggatggcttcacagcagagccagcatgaggggtggggcctggcagggcttgcttgagccaaactgcaaaggctgtggtggctgtgaggacactgcgggggttggggggggggcgtctgtacctcaggggatgccccgctgtggtcacccagagaatcacccttcctggtctacagatggaagctgcaggttggtgactttgcaaatgcacttcctacagatgaactattaaaagacctgcaacattgaaaaaactcattttttccaccaaaaccttggccaggtaacctaccttaggcacctgcaaagaacaggaagtgatggctgtctcgcaacagagcctgggctgctcctcctgctctggggagtctaggccgtggggactgttctggggaggctcatgctgtctccatgacgtctgtggcaggagtccctgaggacgggagctgcctagctacagttttcttgccaaggcgaggtgttttgtgaatctgtgctgatgtaatgtgcaccttcacgtatttatgcatgtggcaagcgttacttcctgtgcacgtagccagccctgggtctgtctctggggtaatgaaaaaggaccctaataaacacctgctcactggctgggtattctttgtaaaaaaaaaaaaaaaaa

SEQ ID NO: 576 - DNA, 3463 bp, Homo Sapiens
  NM_000924
actcgtccccggcgcctgtgtgcgtgcgctcgcccttgggcgcttctgtctgtgtgtgcccccggcttccaatcgttcctttgggagggggaggagtggctgtgaggagtgagagactggcgggcaggctgaggagaagggagggagagcagagggaggggggaacccggccgggggaggaggagagaggcgaggaggcggctctggcagcgcgcggcggcggcggcggtagcggcagcagcagcggcggtgcggagagcttggactgggagcccaaagctcggctgggcagcgggagaggaggagccgcaggagctgcagctctgccagcttgggccgagcctagagacaccggcctggctggtccacgccagccgcagaccgtggctgagcatggagctgtccccccgcagtcctccggagatgctggaggagtcggattgcccgtcacccctggagctgaagtcagcccccagcaagaagatgtggattaagcttcggtctctgctgcgctacatggtgaagcagttggagaatggggagataaacattgaggagctgaagaaaaatctggagtacacagcttctctgctggaagccgtctacatagatgagacacggcaaatcttggacacggaggacgagctgcaggagctgcggtcagatgccgtgccttcggaggtgcgggactggctggcctccaccttcacccagcaggcccgggccaaaggccgccgagcagaggagaagcccaagttccgaagcattgtgcacgctgtgcaggctgggatcttcgtggaacggatgttccggagaacatacacctctgtgggccccacttactctactgcggttctcaactgtctcaagaacctggatctctggtgctttgatgtcttttccttgaaccaggcagcagatgaccatgccctgaggaccattgtttttgagttgctgactcggcataacctcatcagccgcttcaagattcccactgtgtttttgatgagtttcctggatgccttggagacaggctatgggaagtacaagaatccttaccacaaccagatccacgcagccgatgttacccagacagtccattgcttcttgctccgcacagggatggtgcactgcctgtcggagattgagctcctggccatcatctttgctgcagctatccatgattatgagcacacgggcactaccaacagcttccacatccagaccaagtcagaatgtgccatcgtgtacaatgatcgttcagtgctggagaatcaccacatcagctctgttttccgattgatgcaggatgatgagatgaacattttcatcaacctcaccaaggatgagtttgtagaactccgagccctggtcattgagatggtgttggccacagacatgtcctgccatttccagcaagtgaagaccatgaagacagccttgcaacagctggagaggattgacaagcccaaggccctgtctctactgctccatgctgctgacatcagccacccaaccaagcagtggttggtccacagccgttggaccaaggccctcatggaggaattcttccgtcagggtgacaaggaggcagagttgggcctgcccttttctccactctgtgaccgcacttccactctagtggcacagtctcagatagggttcatcgacttcattgtggagcccacattctctgtgctgactgacgtggcagagaagagtgttcagcccctggcggatgaggactccaagtctaaaaaccagcccagctttcagtggcgccagccctctctggatgtggaagtgggagaccccaaccctgatgtggtcagctttcgttccacctgggtcaagcgcattcaggagaataagcagaaatggaaggaacgggcagcaagtggcatcaccaaccagatgtccattgacgagctgtccccctgtgaagaagaggcccccccatcccctgccgaagatgaacacaaccagaatgggaatctggattagccctggggctggcccaggtcttcattgagtccaaagtgtttgatgtcatcagcaccatccatcaggactggctcccccatctgctccaagggagcgtggtcgtggaagaaacaacccacctgaaggccaaatgccagagatttggggttggggaaagggcccctccccacctgacacccactggggtgcactttaatgttccggcagcaagactggggaacttcaggctcccagtggtcactgtgcccatccctcagcctctggattctcttcatggccaggtggctgccagggagcggggagcttcctggaggcttcccagggccttggggaagggtcagagatgccagccccctgggacctcccccatcctttttgcctccaagtttctaagcaatacattttgggggttccctcagccccccaccccagatcttagctggcaggtctgggtgccccttttcctcccctgggaagggctggaataggatagaaagctgggggttttcagagccctatgtgtggggaggggagtggattccttcagggcatggtacctttctaggacctgggaatggggtggagaggacatcctcttcaccccagaattgcgctgcttcagccccatctccagcctgatcctctgaatcttccttccctccctttctgatacagtgactggggcaaaaggagccattgtgaccaggggctgcgggaggcctttcctgggaccttccttgggactggtctgggcccctggggcttgtcgcctgccctgagtccggagccctttgcctccttcctctcccctggggctgggaggctccatccgaccaatgtctgtaaagtgctttgaggatctccccagcaaagcaccttcagaatgtatcgacaccagctgggttagggtcaagggtgcctggggagggtgagtaatcctgcattgctaaaagagagggtctgtcccctcctctccacgtcccagaactggcccagctgcaggcactaagaagctcctcccctgagacaagtgaggggtagtcggtgaaaggcagatggacaaggggctcagggctgctgccttcctgtcctctggagagaacccagccaggcgcggtgccccttcctctcctcaggctcctccttgcccccaccttgccccaggaaaggccaaagtccaggtgactgccctccttctttcttgtaaataccaaccatgcatttgtacagtgggccctgttcatgcgaaatccacatccatggtctcctagacctgctaccctggtacttccaccctaccccaccccgagaagggcagagacgcatgtgactcacccctgcccttggtttcccagacccctgctatagccagagaacaataaagaagggagaccaggaaaaaaaaaaaaaaaaaaaaaaaaaaaaaaaaaaaaaaaaaaaaaaaaaaaaaaaaaaaaaa

SEQ ID NO: 577 - DNA, 1544 bp, Homo Sapiens
  NM_000925
cccctctgttgtcgtttggcagcggatagaggacacgaccaagatggcggcggtgtctggcttggtgcggagaccccttcgggaggtctccgggctgctgaagaggcgctttcactggaccgcgccggctgcgctgcaggtgacagttcgtgatgctataaatcagggtatggatgaggagctggaaagagatgagaaggtatttctgcttggagaagaagttgcccagtatgatggggcatacaaggttagtcgagggctgtggaagaaatatggagacaagaggattattgacactcccatatcagagatgggctttgctggaattgctgtaggtgcagctatggctgggttgcggcccatttgtgaatttatgaccttcaatttctccatgcaagccattgaccaggttataaactcagctgccaagacctactacatgtctggtggccttcagcctgtgcctatagtcttcagggggcccaatggtgcctcagcaggtgtagctgcccagcactcacagtgctttgctgcctggtatgggcactgcccaggcttaaaggtggtcagtccctggaattcagaggatgctaaaggacttattaaatcagccattcgggataacaatccagtggtggtgctagagaatgaattgatgtatggggttccttttgaatttcctccggaagctcagtcaaaagattttctgattcctattggaaaagccaaaatagaaaggcaaggaacacatataactgtggtttcccattcaagacctgtgggccactgcttagaagctgcagcagtgctatctaaagaaggagttgaatgtgaggtgataaatatgcgtaccattagaccaatggacatggaaaccatagaagccagtgtcatgaagacaaatcatcttgtaactgtggaaggaggctggccacagtttggagtaggagctgaaatctgtgccaggatcatggaaggtcctgcgttcaatttcctggatgctcctgctgttcgtgtcactggtgctgatgtccctatgccttatgcaaagattctagaggacaactctatacctcaggtcaaagacatcatatttgcaataaagaaaacattaaatatttagtttggacttgaatatcaagtcgttgaaatttatttgaaatacttgctggcactgcacctggatttgtactgcaagacctgactattcataacggaaaacgatttctaaagcaacagcaggtatttttgtacagggaagtttaaatgtgtttgtgtatggaaaactctccactctcctcccctagatgccatgcttccttttgtctgttacggttgccatgttctttgaataacaaattatataacattttatcctctctcaccacaaggacaaagtatggatgtggcagagtcctcatgaaagatgtatccaaacaagataacttatatgtataaaattaaagcatataatatacatttactgttagtttgttttgataaggaataaaggaatttctaacatgaaaaaaaaaaaaaaaaaa

SEQ ID NO: 578 - DNA, 4718 bp, Homo Sapiens
  NM_000927
aaacacttgtattaccattttaaaggctatcattactctttacctgtgaagagtagaacatgaagaaatctactttattcagatattctccagattcctaaagattagagatcatttctcattctcctaggagtactcacttcaggaagcaaccagataaaagagaggtgcaacggaagccagaacattcctcctggaaattcaacctgtttcgcagtttctcgaggaatcagcattcagtcaatccgggccgggagcagtcatctgtggtgaggctgattggctgggcaggaacagcgccggggcgtgggctgagcacagccgcttcgctctctttgccacaggaagcctgagctcattcgagtagcggctcttccaagctcaaagaagcagaggccgctgttcgtttcctttaggtctttccactaaagtcggagtatcttcttccaaaatttcacgtcttggtggccgttccaaggagcgcgaggtcggaatggatcttgaaggggaccgcaatggaggagcaaagaagaagaacttttttaaactgaacaataaaagtgaaaaagataagaaggaaaagaaaccaactgtcagtgtattttcaatgtttcgctattcaaattggcttgacaagttgtatatggtggtgggaactttggctgccatcatccatggggctggacttcctctcatgatgctggtgtttggagaaatgacagatatctttgcaaatgcaggaaatttagaagatctgatgtcaaacatcactaatagaagtgatatcaatgatacagggttcttcatgaatctggaggaagacatgaccaggtatgcctattattacagtggaattggtgctggggtgctggttgctgcttacattcaggtttcattttggtgcctggcagctggaagacaaatacacaaaattagaaaacagttttttcatgctataatgcgacaggagataggctggtttgatgtgcacgatgttggggagcttaacacccgacttacagatgatgtctccaagattaatgaaggaattggtgacaaaattggaatgttctttcagtcaatggcaacatttttcactgggtttatagtaggatttacacgtggttggaagctaacccttgtgattttggccatcagtcctgttcttggactgtcagctgctgtctgggcaaagatactatcttcatttactgataaagaactcttagcgtatgcaaaagctggagcagtagctgaagaggtcttggcagcaattagaactgtgattgcatttggaggacaaaagaaagaacttgaaaggtacaacaaaaatttagaagaagctaaaagaattgggataaagaaagctattacagccaatatttctataggtgctgctttcctgctgatctatgcatcttatgctctggccttctggtatgggaccaccttggtcctctcaggggaatattctattggacaagtactcactgtattcttttctgtattaattggggcttttagtgttggacaggcatctccaagcattgaagcatttgcaaatgcaagaggagcagcttatgaaatcttcaagataattgataataagccaagtattgacagctattcgaagagtgggcacaaaccagataatattaagggaaatttggaattcagaaatgttcacttcagttacccatctcgaaaagaagttaagatcttgaagggtctgaacctgaaggtgcagagtgggcagacggtggccctggttggaaacagtggctgtgggaagagcacaacagtccagctgatgcagaggctctatgaccccacagaggggatggtcagtgttgatggacaggatattaggaccataaatgtaaggtttctacgggaaatcattggtgtggtgagtcaggaacctgtattgtttgccaccacgatagctgaaaacattcgctatggccgtgaaaatgtcaccatggatgagattgagaaagctgtcaaggaagccaatgcctatgactttatcatgaaactgcctcataaatttgacaccctggttggagagagaggggcccagttgagtggtgggcagaagcagaggatcgccattgcacgtgccctggttcgcaaccccaagatcctcctgctggatgaggccacgtcagccttggacacagaaagcgaagcagtggttcaggtggctctggataaggccagaaaaggtcggaccaccattgtgatagctcatcgtttgtctacagttcgtaatgctgacgtcatcgctggtttcgatgatggagtcattgtggagaaaggaaatcatgatgaactcatgaaagagaaaggcatttacttcaaacttgtcacaatgcagacagcaggaaatgaagttgaattagaaaatgcagctgatgaatccaaaagtgaaattgatgccttggaaatgtcttcaaatgattcaagatccagtctaataagaaaaagatcaactcgtaggagtgtccgtggatcacaagcccaagacagaaagcttagtaccaaagaggctctggatgaaagtatacctccagtttccttttggaggattatgaagctaaatttaactgaatggccttattttgttgttggtgtattttgtgccattataaatggaggcctgcaaccagcatttgcaataatattttcaaagattataggggtttttacaagaattgatgatcctgaaacaaaacgacagaatagtaacttgttttcactattgtttctagcccttggaattatttcttttattacatttttccttcagggtttcacatttggcaaagctggagagatcctcaccaagcggctccgatacatggttttccgatccatgctcagacaggatgtgagttggtttgatgaccctaaaaacaccactggagcattgactaccaggctcgccaatgatgctgctcaagttaaaggggctataggttccaggcttgctgtaattacccagaatatagcaaatcttgggacaggaataattatatccttcatctatggttggcaactaacactgttactcttagcaattgtacccatcattgcaatagcaggagttgttgaaatgaaaatgttgtctggacaagcactgaaagataagaaagaactagaaggttctgggaagatcgctactgaagcaatagaaaacttccgaaccgttgtttctttgactcaggagcagaagtttgaacatatgtatgctcagagtttgcaggtaccatacagaaactctttgaggaaagcacacatctttggaattacattttccttcacccaggcaatgatgtatttttcctatgctggatgtttccggtttggagcctacttggtggcacataaactcatgagctttgaggatgttctgttagtattttcagctgttgtctttggtgccatggccgtggggcaagtcagttcatttgctcctgactatgccaaagccaaaatatcagcagcccacatcatcatgatcattgaaaaaacccctttgattgacagctacagcacggaaggcctaatgccgaacacattggaaggaaatgtcacatttggtgaagttgtattcaactatcccacccgaccggacatcccagtgcttcagggactgagcctggaggtgaagaagggccagacgctggctctggtgggcagcagtggctgtgggaagagcacagtggtccagctcctggagcggttctacgaccccttggcagggaaagtgctgcttgatggcaaagaaataaagcgactgaatgttcagtggctccgagcacacctgggcatcgtgtcccaggagcccatcctgtttgactgcagcattgctgagaacattgcctatggagacaacagccgggtggtgtcacaggaagagattgtgagggcagcaaaggaggccaacatacatgccttcatcgagtcactgcctaataaatatagcactaaagtaggagacaaaggaactcagctctctggtggccagaaacaacgcattgccatagctcgtgcccttgttagacagcctcatattttgcttttggatgaagccacgtcagctctggatacagaaagtgaaaaggttgtccaagaagccctggacaaagccagagaaggccgcacctgcattgtgattgctcaccgcctgtccaccatccagaatgcagacttaatagtggtgtttcagaatggcagagtcaaggagcatggcacgcatcagcagctgctggcacagaaaggcatctatttttcaatggtcagtgtccaggctggaacaaagcgccagtgaactctgactgtatgagatgttaaatactttttaatatttgtttagatatgacatttattcaaagttaaaagcaaacacttacagaattatgaagaggtatctgtttaacatttcctcagtcaagttcagagtcttcagagacttcgtaattaaaggaacagagtgagagacatcatcaagtggagagaaatcatagtttaaactgcattataaattttataacagaattaaagtagattttaaaagataaaatgtgtaattttgtttatattttcccatttggactgtaactgactgccttgctaaaagattatagaagtagcaaaaagtattgaaatgtttgcataaagtgtctataataaaactaaactttcatgtgaaa

SEQ ID NO: 579 - DNA, 4009 bp, Homo Sapiens
  NM_000935
acaccgccctcccgccagactcccggcggctcctcctccctctcccaaacccactcccaaagctaagtgcaggcttccccgttccagccagaagcgctgcgtgagcctccacacgtagccgcaggcagctccttaaatagcgtccgcgctgagcaaacagtccagacgtggggcccaggagggcgagctgaggcgaccgcaccgggcgcgcagcggcggcgggtcagccggcggccaatagccagggcgcggcccgccccgtcgcctcccctcggggagcctataaggcctccgcagcgccccgggcgcctgctgctccgtgcctccaccgacgacctcactcagctgcgttacgcgccgctccggctgccggccgcgcgccttgcccgccggctcccgcccgcaatcggcggctcagggcggacccgggtctctgcgttctcgcgagaagcgcggcgctgcggggccgtgggcgcctgagcccgcgcggccctcgagggccgaatatggggggatgcacggtgaagcctcagctgctgctcctggcgctcgtcctccacccctggaatccctgtctgggtgcggactcggagaagccctcgagcatccccacagataaattattagtcataactgtagcaacaaaagaaagtgatggattccatcgatttatgcagtcagccaaatatttcaattatactgtgaaggtccttggtcaaggagaagaatggagaggtggtgatggaattaatagtattggagggggccagaaagtgagattaatgaaagaagtcatggaacactatgctgatcaagatgatctggttgtcatgtttactgaatgctttgatgtcatatttgctggtggtccagaagaagttctaaaaaaattccaaaaggcaaaccacaaagtggtctttgcagcagatggaattttgtggccagataaaagactagcagacaagtatcctgttgtgcacattgggaaacgctatctgaattcaggaggatttattggctatgctccatatgtcaaccgtatagttcaacaatggaatctccaggataatgatgatgatcagctcttttacactaaagtttacattgatccactgaaaagggaagctattaacatcacattggatcacaaatgcaaaattttccagaccttaaatggagctgtagatgaagttgttttaaaatttgaaaatggcaaagccagagctaagaatacattttatgaaacattaccagtggcaattaatggaaatggacccaccaagattctcctgaattattttggaaactatgtacccaattcatggacacaggataatggctgcactctttgtgaattcgatacagtcgacttgtctgcagtagatgtccatccaaacgtatcaataggtgtttttattgagcaaccaaccccttttctacctcggtttctggacatattgttgacactggattacccaaaagaagcacttaaactttttattcataacaaagaagtttatcatgaaaaggacatcaaggtattttttgataaagctaagcatgaaatcaaaactataaaaatagtaggaccagaagaaaatctaagtcaagcggaagccagaaacatgggaatggacttttgccgtcaggatgaaaagtgtgattattactttagtgtggatgcagatgttgttttgacaaatccaaggactttaaaaattttgattgaacaaaacagaaagatcattgctcctcttgtaactcgtcatggaaagctgtggtccaatttctggggagcattgagtcctgatggatactatgcacgatctgaagattatgtggatattgttcaagggaatagagtaggagtatggaatgtcccatatatggctaatgtgtacttaattaaaggaaagacactccgatcagagatgaatgaaaggaactattttgttcgtgataaactggatcctgatatggctctttgccgaaatgctagagaaatgggtgtatttatgtacatttctaatagacatgaatttggaaggctattatccactgctaattacaatacttcccattataacaatgacctctggcagatttttgaaaatcctgtggactggaaggaaaagtatataaaccgtgattattcaaagattttcactgaaaatatagttgaacagccctgtccagatgtcttttggttccccatattttctgaaaaagcctgtgatgaattggtagaagaaatggaacattacggcaaatggtctgggggaaaacatcatgatagccgtatatctggtggttatgaaaatgtcccaactgatgatatccacatgaagcaagttgatctggagaatgtatggcttcattttatccgggagttcattgcaccagttacactgaaggtctttgcaggctattatacgaagggatttgcactactgaattttgtagtaaaatactcccctgaacgacagcgttctcttcgtcctcatcatgatgcttctacatttaccataaacattgcacttaataacgtgggagaagactttcagggaggtggttgcaaatttctaaggtacaattgctctattgagtcaccacgaaaaggctggagcttcatgcatcctgggagactcacacatttgcatgaaggacttcctgttaaaaatggaacaagatacattgcagtgtcatttatagatccctaagttatttacttttcattgaattgaaatttattttggatgaatgactggcatgaacacgtctttgaagttgtggctgagaagatgagaggaatatttaaataacatcaacagaacaacttcactttgggccaaacatttgaaaaactttttataaaaaattgtttgatatttcttaatgtctgctctgagccttaaaacacagattgaagaagaaaagaaagaaaaaacttaaatatttatttctatgctttgttgcctctgagaataatgacaatttatgaatttgtgtttcaaattgataaaatatttaggtacaaataacaagactaataatattttcttatttaaaaaaagcatgggaagatttttatttatcaaaatatagaggaaatgtagacaaaatggatataaatgaaaattaccatgttgtaaaaccttgaaaatcagattctaactggatttgtatgcaactaagtatttttctgaacacctatgcaggtcttatttacagtagttactaagggaacacacaaagaattacacaacgttttcctcaagaaaatggtacaaaacacaaccgaggagcgtatacagttgaaaacatttttgttttgattggaaggcagattattttatattagtattaaaaatcaaaccctatgtttctttcagatgaatcttccaaagtggattatattaagcaggtattagatttaggaaaacctttccatttcttaaagtattatcaagtgtcaagatcagcaagtgtccttaagtcaaacaggttttttttgttgttgtttttgctttgtttccttttttagaaagttctagaaaataggaaaacgaaaaatttcattgagatgagtagtgcatttaattattttttaaaaaactttttaagtacttgaattttatatcaggaaaacaaagttgttgagccttgcttcttccgttttgccctttgtctcgctccttattctttttttggggggagggttatttgcttttttatcttcctggcataatttccattttattcttctgagtgtctatgttaacttccctctatcccgcttataaaaaaattctccaacaaaaatacttgttgacttgatgttttatcacttctctaagtaaggttgaaatatccttattgtagctactgtttttaatgtaaaggttaaacttgaaaagaaattcttaatcacggtgccaaaattcattttctaacaccatgtgttagaaaattataaaaaataaaataattttagaaaaaaaaaaaaaaa

SEQ ID NO: 580 - DNA, 2509 bp, Homo Sapiens
  NM_000941
gaaggcggtggtagcgcctcagtggtgtgggcctgagccctgcccaggtgcccgcagagagcagccgggctgccagcgtttcatgatcaacatgggagactcccacgtggacaccagctccaccgtgtccgaggcggtggccgaagaagtatctcttttcagcatgacggacatgattctgttttcgctcatcgtgggtctcctaacctactggttcctcttcagaaagaaaaaagaagaagtccccgagttcaccaaaattcagacattgacctcctctgtcagagagagcagctttgtggaaaagatgaagaaaacggggaggaacatcatcgtgttctacggctcccagacggggactgcagaggagtttgccaaccgcctgtccaaggacgcccaccgctacgggatgcgaggcatgtcagcggaccctgaggagtatgacctggccgacctgagcagcctgccagagatcgacaacgccctggtggttttctgcatggccacctacggtgagggagaccccaccgacaatgcccaggacttctacgactggctgcaggagacagacgtggatctctctggggtcaagttcgcggtgtttggtcttgggaacaagacctacgagcacttcaatgccatgggcaagtacgtggacaagcggctggagcagctcggcgcccagcgcatctttgagctggggttgggcgacgacgatgggaacttggaggaggacttcatcacctggcgagagcagttctggccggccgtgtgtgaacactttggggtggaagccactggcgaggagtccagcattcgccagtacgagcttgtggtccacaccgacatagatgcggccaaggtgtacatgggggagatgggccggctgaagagctacgagaaccagaagcccccctttgatgccaagaatccgttcctggctgcagtcaccaccaaccggaagctgaaccagggaaccgagcgccacctcatgcacctggaattggacatctcggactccaaaatcaggtatgaatctggggaccacgtggctgtgtacccagccaacgactctgctctcgtcaaccagctgggcaaaatcctgggtgccgacctggacgtcgtcatgtccctgaacaacctggatgaggagtccaacaagaagcacccattcccgtgccctacgtcctaccgcacggccctcacctactacctggacatcaccaacccgccgcgtaccaacgtgctgtacgagctggcgcagtacgcctcggagccctcggagcaggagctgctgcgcaagatggcctcctcctccggcgagggcaaggagctgtacctgagctgggtggtggaggcccggaggcacatcctggccatcctgcaggactgcccgtccctgcggccccccatcgaccacctgtgtgagctgctgccgcgcctgcaggcccgctactactccatcgcctcatcctccaaggtccaccccaactctgtgcacatctgtgcggtggttgtggagtacgagaccaaggctggccgcatcaacaagggcgtggccaccaactggctgcgggccaaggagcctgccggggagaacggcggccgtgcgctggtgcccatgttcgtgcgcaagtcccagttccgcctgcccttcaaggccaccacgcctgtcatcatggtgggccccggcaccggggtggcacccttcataggcttcatccaggagcgggcctggctgcgacagcagggcaaggaggtgggggagacgctgctgtactacggctgccgccgctcggatgaggactacctgtaccgggaggagctggcgcagttccacagggacggtgcgctcacccagctcaacgtggccttctcccgggagcagtcccacaaggtctacgtccagcacctgctaaagcaagaccgagagcacctgtggaagttgatcgaaggcggtgcccacatctacgtctgtggggatgcacggaacatggccagggatgtgcagaacaccttctacgacatcgtggctgagctcggggccatggagcacgcgcaggcggtggactacatcaagaaactgatgaccaagggccgctactccctggacgtgtggagctaggggcctgcctgccccacccaccccacagactccggcctgtaatcagctctcctggctccctcccgtagtctcctgggtgtgtttggcttggccttggcatgggcgcaggcccagtgacaaagactcctctgggcctggggtgcatcctcctcagcccccaggccaggtgaggtccaccggcccctggcagcacagcccagggcctgcatgggggcaccgggctccatgcctctggaggcctctggccctcggtggctgcacagaagggctctttctctctgctgagctgggcccagcccctccacgtgatttccagtgagtgtaaataattttaaataacctctggcccttggaataaagttctgttttctgtaaaaaaaaaaa

SEQ ID NO: 581 - DNA, 3111 bp, Homo Sapiens
  NM_000945
gcgggtcagcgcgagccgctgcagtgagtccgtcacggctccggcgcgagcgcgaggctgcagcccccgagtttcccggccgtcttcgccccctctccccctcctttcttcttctctgcctctcctgcctctcgccgctgctcctcccgcgctctccggctctgaatctcgaccttaatttatttccccctaccctgcccgctccctcgcgtgcccaatcgcccggccggcgcgggccccgcggcgccgcctcccctcccccacgcgcgccccctccccgccggcgacccgagggccgcagctgggccgccgccgccgtttcctgcgagccagcctgagcgcaacacttctccgagccagcgagccagcgagccgccgacccgccgagcaaaatgggaaatgaggcaagttatcctttggaaatgtgctcacactttgatgcggatgaaattaaaaggctaggaaagagatttaagaagcttgatttggacaattctggttctttgagtgtggaagagttcatgtctctgcctgagttacaacagaatcctttagtacagcgagtaatagatatattcgacacagatgggaatggagaagtagactttaaagaattcattgagggcgtctctcagttcagtgtcaaaggagataaggagcagaaattgaggtttgctttccgtatctatgacatggataaagatggctatatttccaatggggaactcttccaggtattgaagatgatggtggggaacaatctgaaagatacacagttacagcaaattgtagacaaaaccataataaatgcagataaggatggagatggaagaatatcctttgaagaattctgtgctgttgtaggtggcctagatatccacaaaaagatggtggtagatgtgtgactcttatcagagagtaccacccaacacttttgctttcttctccatctctgaagatctgctcaagacgtccagcaatgctctctgtgtatttaaatggaagtatttttctctgtgaagccacattttccaacatgagcctcatgaagccaactaagtgttattgaactgtaattctctcaataactcagtgtagcactttaaagtctgaaggacagcaacatgaaaagagcatatcaatgtggtggagaaagggaaggggttggctttttaatttatttttcttcatcttttataacaagaaagtatctatatatacatatgtaaatatttatatatagatatatgtagctttctatatatgtagtaggttggctttaatttaatatacttgattcagaaacaaaacaatagagtacaaaagtgccaagcagaacataaaacatccttacttttatttcacacagttttatatatagatagaagactgtacaatttgagccgggtgttaggccagctattttccttttcctgtgctttctcctttgagagattgacaaagcatttgttaacgtcctattatttaccttaattacatttttgtaacaaaggagtctgtaactttatttatacttatgaatatatccagggactacttctcattgctgagcagcttttaatacacctctgcttgaggagaaagtctagttcattgctactgccaagagctagttcttgtgttcatatagtaactgcacagggcttatagctgcttcattctgctactttgtaactaggagccattgcatttattaaatgtccctcagtaacgttaagtgctagttgtgattttatacataaaggccagaagctgtctgaggcaatcatgattgattgtatgtatcacttactgaagaatacctgaagtgatcatgtaactacttataagggatatccatttgtttgattacatgggtaaataatttgtcattaaacttgtgtttgaatcatgaattcccttgtttcaaaagacttgcagctaatctaaaaaactggtgatatttaatatgcatgtatgtatctaaacacccacatatatttgtggtttaagtgtgagaaatcttgctaatctatatgccacagaagagcaaaattgtatccaaatttatgccacttaaatttctttaccacgagggatagagcatgcatactggtttttttttcttgatttgcccatataattggtaatggataacttaataaatttgtgtgatataaaagtagtgtatcatgttctactgtttgatcttatcccttcccatttctgcaaaggtactgttagctggaagaaaaacattttggttagctttgtatgacagtagtctttccctttatagtttctctataaaaactggttttaaaatcagtggaaaagggcaggttgaatcaaggtgaatcaatctgaaattgagcacacctgcctgccatcgctgttccttcaactgagtgctgcacatcatgggctctgtctgtgagagaaaaatcccggtgcttggtgtccttgcatgacatggagttttgcatgtagatcaatttaaaatgtacctcttgtttacataatttgcataattttaaaagataatgttgccaaactttggaaatgttaatgttcagactgaaaatctccactacatgtaactttcttcctctggatcagtggcatggcttataatcccagccagtggtttgaactgttccagtgtcaactgccatgtgctctgcttcaagggggaactagccttttgtgaattttttgtacataagtatttgttacaaatattttagcaaatgctttctatttctcttgcttgtgcatatcttggctggcgttacagaaaaatagtgtaaacattatttccttaccggggaatgagggttttttctttttctttttttttttttttttttttagtttgtgtgtgggggtgggtaagggaggggatggtttatgttgaatgtttagtttttcttctgcatgatacgtcatgttgtgggatctttagaaaacttcatactgtatgaataagaaaataaaatatttgaaacttgaaaaaaaaaaaaaaaaaaaaaaaaaaaaaaaaaaaaaaaaaaaaaaaaaaaaaaaaaaaaaaaaaaaaaaaaaaaaaaaaaaaaaaaaaaaaaaaaaaaa

SEQ ID NO: 582 - DNA, 1471 bp, Homo Sapiens
  NM_000946
ccgccggccgtgctgttcccgccaattcctgtggtaatccttaccgtggcgagttccgcgctcaatggagacgtttgaccccaccgagctgcccgagctgcttaaactttattaccggaggctctttccctactctcagtactatcgctggctcaactacggtggagtgataaagaattactttcaacaccgtgaattttcattcacattgaaagatgatatttacattcgctaccaatccttcaacaaccagagtgatctggaaaaggagatgcagaaaatgaatccatacaagattgatataggcgcagtatattctcacagacccaatcaacacaatacagtgaagctgggagctttccaggctcaggaaaaagaactggtatttgacattgacatgacagactatgacgatgtgaggagatgttgtagttctgcagacatatgtcctaagtgctggaccctcatgacaatggccatacgcatcattgacagagcattgaaggaggactttggatttaagcatcgtctctgggtatattctggaaggagaggtgttcattgttgggtctgtgatgaatcagttagaaaactgtcttctgcagtacgttctgggatagttgagtatttgagccttgtaaagggtggtcaagacgttaaaaagaaagttcacctaagtgaaaaaattcacccttttatcagaaaatctataaacataataaaaaaatactttgaagaatatgccttggttaatcaagatattctcgaaaataaagaaagctgggataagattttagcccttgttcctgaaacaattcatgatgaacttcaacaaagcttccaaaagtctcacaattcacttcagcgttgggagcacttgaagaaagtagccagcagatatcagaataacatcaaaaatgacaaatatggaccctggctggagtgggagattatgctccagtactgttttccacggctggatatcaatgtcagcaaaggaatcaatcatctactgaagagcccttttagtgttcatcctaaaacaggtcgcatatctgtgcctattgatttgcagaaagtggaccagtttgatccatttactgttccgaccataagcttcatctgccgtgaattggatgccatttccactaatgaagaggaaaaagaggagaatgaagctgaatctgatgtcaaacatagaaccagagattataagaagaccagtctagcaccttatgtgaaagtttttgaacattttcttgaaaatctggataaatcccgaaaaggagaacttcttaagaagagtgatttacaaaaagatttctgaagacagagctcctcaaaccattgtggatatcttctgccttcaaccacagatcaaatacttcaagagccatttaataaatatggcagaactatatatgtgtcttaaacctcaaagtaaattttccttgagaaataaaaaaaaaaa

SEQ ID NO: 583 - DNA, 1359 bp, Homo Sapiens
  NM_000948
atccttattctatatctcttggtatttagtgtaaaaattttaaaatctttacctagcaatcttgaggaagaaacttgataactgataatacatgagattgttacctaagtgaaatataatcctatatattcaacaaactttagagaaataagataaattttaaagtaaatgacttctgtagttttatagatcctccaaaccaatctagtctcagatctcaccttcatcatttctctcatttccttttggcctaattaatcaaaatccttcctagaatgttcatttctggccagtatgtcttcctgaatatgaataagaaataaaataccatttgatgtttgaaattatgggggtaatctcaatgacggaaatagatgaccaggaaaagggaaacgaatgcctgattcattatattcatgaagatatcaaaggtttataaagccaatatctgggaaagagaaaaccgtgagacttccagatcttctctggtgaagtgtgtttcctgcaacgatcacgaacatgaacatcaaaggatcgccatggaaagggtccctcctgctgctgctggtgtcaaacctgctcctgtgccagagcgtggcccccttgcccatctgtcccggcggggctgcccgatgccaggtgacccttcgagacctgtttgaccgcgccgtcgtcctgtcccactacatccataacctctcctcagaaatgttcagcgaattcgataaacggtatacccatggccgggggttcattaccaaggccatcaacagctgccacacttcttcccttgccacccccgaagacaaggagcaagcccaacagatgaatcaaaaagactttctgagcctgatagtcagcatattgcgatcctggaatgagcctctgtatcatctggtcacggaagtacgtggtatgcaagaagccccggaggctatcctatccaaagctgtagagattgaggagcaaaccaaacggcttctagagggcatggagctgatagtcagccaggttcatcctgaaaccaaagaaaatgagatctaccctgtctggtcgggacttccatccctgcagatggctgatgaagagtctcgcctttctgcttattataacctgctccactgcctacgcagggattcacataaaatcgacaattatctcaagctcctgaagtgccgaatcatccacaacaacaactgctaagcccacatccatttcatctatttctgagaaggtccttaatgatccgttccattgcaagcttcttttagttgtatctcttttgaatccatgcttgggtgtaacaggtctcctcttaaaaaataaaaactgactccttagagacatcaaaatctaaaa

SEQ ID NO: 584 - DNA, 2966 bp, Homo Sapiens
  NM_000953
cgcccgagccgcgcgcggagctgccgggggctccttagcacccgggcgccggggccctcgcccttccgcagccttcactccagccctctgctcccgcacgccatgaagtcgccgttctaccgctgccagaacaccacctctgtggaaaaaggcaactcggcggtgatgggcggggtgctcttcagcaccggcctcctgggcaacctgctggccctggggctgctggcgcgctcggggctggggtggtgctcgcggcgtccactgcgcccgctgccctcggtcttctacatgctggtgtgtggcctgacggtcaccgacttgctgggcaagtgcctcctaagcccggtggtgctggctgcctacgctcagaaccggagtctgcgggtgcttgcgcccgcattggacaactcgttgtgccaagccttcgccttcttcatgtccttctttgggctctcctcgacactgcaactcctggccatggcactggagtgctggctctccctagggcaccctttcttctaccgacggcacatcaccctgcgcctgggcgcactggtggccccggtggtgagcgccttctccctggctttctgcgcgctacctttcatgggcttcgggaagttcgtgcagtactgccccggcacctggtgctttatccagatggtccacgaggagggctcgctgtcggtgctggggtactctgtgctctactccagcctcatggcgctgctggtcctcgccaccgtgctgtgcaacctcggcgccatgcgcaacctctatgcgatgcaccggcggctgcagcggcacccgcgctcctgcaccagggactgtgccgagccgcgcgcggacgggagggaagcgtcccctcagcccctggaggagctggatcacctcctgctgctggcgctgatgaccgtgctcttcactatgtgttctctgcccgtaatttatcgcgcttactatggagcatttaaggatgtcaaggagaaaaacaggacctctgaagaagcagaagacctccgagccttgcgatttctatctgtgatttcaattgtggacccttggatttttatcattttcagatctccagtatttcggatattttttcacaagattttcattagacctcttaggtacaggagccggtgcagcaattccactaacatggaatccagtctgtgacagtgtttttcactctgtggtaagctgaggaatatgtcacattttcagtcaaagaaccatgattaaaaaaaaaaagacaacttacaatttaaatccttaaaagttacctcccataacaaaagcatgtatatgtattttcaaaagtatttgatatcttaacaatgtgttaccattctatagtcatgaaccccttcagtgcattttcatttttttattaacagcaactaaaattttatatattgtaaccagtgttaaaagtcttaaaaaacaatggtattaattgtccctacatttgtgcttggtggccctattttttttttttagagaggccttgagacatacaggtcttttaaaatacagtagaaacaccactgtttacgattatacgatggacattcataaaaagcataatttcttaccctattcattttttggtgaaacctgattcattgattttatatcattgccgatgtttagttcatttctttgccaattgatctaagcatagcctgaattatgatgttcctcagagaagtgaggtgggaaatatgaccaggtcaggcagttggaggggcttccccagccaccatcggggagtacttgctgcctcaggtggagacctgaagctgtaactagatgcagagcaagatatgactatagcccacaacccaaagaagcaaaaattcgtttttatcttttgaaatccagtttcttttgtattgagtcaagggtgtcagtaggaatcaaaagttgggggtgggttgcaaaatgttctttcagtttttagaacctccattttataaaagaattatcctatcaatggattctttagtggaaggatttatgcttctttgaaaaccagtgtgtgactcactgtagagccatgtttactgtttgactgtgtggcacaggggggcatttggcacagcaaaaagcccacccaggacttagcctcagttgacgatagtaacaatggccttaacatctaccttaacagctacctattacagccgtattctgctgtccgtggagacggtaagatcttaggttccaagattttacttcaaattacaccttcaaaactggagcagcatatagccgaaaaggagcacaactgagcactttaatagtaatttaaaagttttcaagggtcagcaatatgatgactgaaagggaaaagtggaggaaacgcagctgcaactgaagcggagactctaaacccagcttgcaggtaagagctttcacctttggtaaaagaacagctggggaggttcaaggggtttcagcatctctggagttcctttgtatctgacaatctcaggactccaaggtgcaaagcctgctgcatttgcgtgatctcaagacctccagccagaagtcccttccaaatataagagtactcatgtttatttatttccaactgagcagcaacctcctttgtttcacttatgttttttccagtatctgagataatataaagctgggtaattttttatgtaattttttggtatagcaaaactgtgaaaaagccaaattaggcatacaaggagtatgatttaacagtatgacatgatgaaaaaaatacagttgtttttgaaatttaacttttgtttgtaccttcaatgtgtaagtacatgcatgttttattgtcagaggaagaacatgttttttgtattctttttttggagaggtgtgttaggataattgtccagttaatttgaaaaggccccagatgaatcaataaatataattttatagtaaaaaaaaaaaaaaaaaaaaaaaaa

SEQ ID NO: 585 - DNA, 837 bp, Homo Sapiens
  NM_000954
gctcctcctgcacacctccctcgctctcccacaccactggcaccaggccccggacacccgctctgctgcaggagaatggctactcatcacacgctgtggatgggactggccctgctgggggtgctgggcgacctgcaggcagcaccggaggcccaggtctccgtgcagcccaacttccagcaggacaagttcctggggcgctggttcagcgcgggcctcgcctccaactcgagctggctccgggagaagaaggcggcgttgtccatgtgcaagtctgtggtggcccctgccacggatggtggcctcaacctgacctccaccttcctcaggaaaaaccagtgtgagacccgaaccatgctgctgcagcccgcggggtccctcggctcctacagctaccggagtccccactggggcagcacctactccgtgtcagtggtggagaccgactacgaccagtacgcgctgctgtacagccagggcagcaagggccctggcgaggacttccgcatggccaccctctacagccgaacccagacccccagggctgagttaaaggagaaattcaccgccttctgcaaggcccagggcttcacagaggataccattgtcttcctgccccaaaccgataagtgcatgacggaacaataggactccccagggctgaagctgggatcccggccagccaggtgacccccacgctctggatgtctctgctctgttccttccccgagcccctgccccggctccccgccaaagcaaccctgcccactcaggcttcatcctgcacaataaactccggaagcaagtcagtaaaaaaaaaaaaaaaaaaaaaaaaaa

SEQ ID NO: 586 - DNA, 3432 bp, Homo Sapiens
  NM_000958
gcgagagcggagctccaagcccggcagcccgagaggaagatgaacagccccaggccagagcctctggcagagtggaccccgagccgcccccaggtagccaggagcggcctcagcggcagccgcaaactccagtagccgcccgtgctgcccgtggctggggcggagggcagccagagctggggaccaaggctccgcgccacctgcgcgcacagcctcacacctgaacgctgtcctcccgcagacgagaccggcgggcactgcaaagctgggactcgtctttgaaggaaaaaaaatagcgagtaagaaatccagcaccattcttcactgacccatcccgctgcacctcttgtttcccaagtttttgaaagctggcaactctgacctcggtgtccaaaaatcgacagccactgagaccggctttgagaagccgaagatttggcagtttccagactgagcaggacaaggtgaaagcaggttggaggcgggtccaggacatctgagggctgaccctgggggctcgtgaggctgccaccgctgctgccgctacagacccagccttgcactccaaggctgcgcaccgccagccactatcatgtccactcccggggtcaattcgtccgcctccttgagccccgaccggctgaacagcccagtgaccatcccggcggtgatgttcatcttcggggtggtgggcaacctggtggccatcgtggtgctgtgcaagtcgcgcaaggagcagaaggagacgaccttctacacgctggtatgtgggctggctgtcaccgacctgttgggcactttgttggtgagcccggtgaccatcgccacgtacatgaagggccaatggcccgggggccagccgctgtgcgagtacagcaccttcattctgctcttcttcagcctgtccggcctcagcatcatctgcgccatgagtgtcgagcgctacctggccatcaaccatgcctatttctacagccactacgtggacaagcgattggcgggcctcacgctctttgcagtctatgcgtccaacgtgctcttttgcgcgctgcccaacatgggtctcggtagctcgcggctgcagtacccagacacctggtgcttcatcgactggaccaccaacgtgacggcgcacgccgcctactcctacatgtacgcgggcttcagctccttcctcattctcgccaccgtcctctgcaacgtgcttgtgtgcggcgcgctgctccgcatgcaccgccagttcatgcgccgcacctcgctgggcaccgagcagcaccacgcggccgcggccgcctcggttgcctcccggggccaccccgctgcctccccagccttgccgcgcctcagcgactttcggcgccgccggagcttccgccgcatcgcgggcgccgagatccagatggtcatcttactcattgccacctccctggtggtgctcatctgctccatcccgctcgtggtgcgagtattcgtcaaccagttatatcagccaagtttggagcgagaagtcagtaaaaatccagatttgcaggccatccgaattgcttctgtgaaccccatcctagacccctggatatatatcctcctgagaaagacagtgctcagtaaagcaatagagaagatcaaatgcctcttctgccgcattggcgggtcccgcagggagcgctccggacagcactgctcagacagtcaaaggacatcttctgccatgtcaggccactctcgctccttcatctcccgggagctgaaggagatcagcagtacatctcagaccctcctgccagacctctcactgccagacctcagtgaaaatggccttggaggcaggaatttgcttccaggtgtgcctggcatgggcctggcccaggaagacaccacctcactgaggactttgcgaatatcagagacctcagactcttcacagggtcaggactcagagagtgtcttactggtggatgaggctggtgggagcggcagggctgggcctgcccctaaggggagctccctgcaagtcacatttcccagtgaaacactgaacttatcagaaaaatgtatataataggcaaggaaagaaatacagtactgtttctggacccttataaaatcctgtgcaatagacacatacatgtcacatttagctgtgctcagaagggctatcatcatcctacaactcacattagagaacatcctggcttttgagcacttttcaaacaatcaagttgactcacgtgggtcctgaggcctgcagcacgtcggatgctaccccactatgacagaggattgtggtcacaacttgatggctgcgaagacctaccctccgtttttctactagataggaggatggtagaagtttggctgctgtcataacatccagagctttgtcgtatttggcacacagcagaggcccagatattagaaaggctctattccaataaactatgaggactgccttatggatgatttaagtgtctcactaaagcatgaaatgtgaatttttattgttgtacatacgatttaaggtatttaaagtattttcttctctgtgagaaggtttattgttaatacaaggtataataaaattatcgcaacccctctccttccagtataaccagctgaagttgcagatgttagatatttttcataaacaagttcgagtcaaagttgaaaattcatagtaagattgatatctataaaatagatataaatttttaagagaaagaatttagtattatcaaagggataaagaaaaaaatactatttaagatgtgaaaattacagtccaaaatactgttctttccaggctatgtataaaatacatagtgaaaattgtttagtgatattacatttatttatccagaaaactgtgatttcaggagaacctaacatgctggtgaatattttcaactttttccctcactaattggtacttttaaaaacataacataaattttttgaagtctttaataaataacccataattgaagtgtataatataaaaaattttaaaaatctaagcagcttattgtttctctgaaagtgtgtgtagttttactttcctaaggaattaccaagaatatcctttaaaatttaaaaggatggcaagttgcatcagaaagctttattttgagatgtaaaaagattcccaaacgtggttacattagccattcatgtatgtcagaagtgcagaattggggcacttaatggtcaccttgtaacagttttgtgtaactcccagtgatgctgtacacatatttgaagggtctttctcaaagaaatattaagcatgttttgttgctcagtgtttttgtgaattgcttggttgtaattaaattctgagcctgatattgatatggttttaagaagcagttgtaccaagtgaaattattttggagattataataaatatatacattcaaaaaaaaaaaaaaaaaa

SEQ ID NO: 587 - DNA, 5360 bp, Homo Sapiens
  NM_000959
gccccgcagtttccgcgctaagggaacgagtgcgcggaggggacgagcggctggaccacagccggcgcccgatcaggatctccgcgctgggatcggtggaacttgaggcagcggcggcgcggggcgccatggcacaccgagcggctccgtcttctgctcctcagagagcccggctggcggcctgggatgacaagatgtctggactgcaatcctgcacagttttgagagggagatgacttgagtggttggcttttatctccacaacaatgtccatgaacaattccaaacagctagtgtctcctgcagctgcgcttctttcaaacacaacctgccagacggaaaaccggctttccgtatttttttcagtaatcttcatgacagtgggaatcttgtcaaacagccttgccatcgccattctcatgaaggcatatcagagatttagacagaagtccaaggcatcgtttctgcttttggccagtggcctggtaatcactgatttctttggccatctcatcaatggagccatagcagtatttgtatatgcttctgataaagaatggatccgctttgaccaatcaaatgtcctttgcagtatttttggtatctgcatggtgttttctggtctgtgcccacttcttctaggcagtgtgatggccattgagcggtgtattggagtcacaaaaccaatatttcattctacgaaaattacatccaaacatgtgaaaatgatgttaagtggtgtgtgcttgtttgctgttttcatagctttgctgcccatccttggacatcgagactataaaattcaggcgtcgaggacctggtgtttctacaacacagaagacatcaaagactgggaagatagattttatcttctacttttttcttttctggggctcttagcccttggtgtttcattgttgtgcaatgcaatcacaggaattacacttttaagagttaaatttaaaagtcagcagcacagacaaggcagatctcatcatttggaaatggtaatccagctcctggcgataatgtgtgtctcctgtatttgttggagcccatttctggttacaatggccaacattggaataaatggaaatcattctctggaaacctgtgaaacaacactttttgctctccgaatggcaacatggaatcaaatcttagatccttgggtatatattcttctacgaaaggctgtccttaagaatctctataagcttgccagtcaatgctgtggagtgcatgtcatcagcttacatatttgggagcttagttccattaaaaattccttaaaggttgctgctatttctgagtcaccagttgcagagaaatcagcaagcacctagcttaataggacagtaaatctgtgtggggctagaacaaaattaagacatgtttggcaatatttcagttagttaaatacctgtagcctaactggaaaattcaggcttcatcatgtagtttgaagatactattgtcagattcaggttttgaaatttgtcaaataaacaggataactgtacatttttcacttgtttttgccaatgggaggtagacacaataaaataatgccatgggagtcacactgaaagcaattttgagcttatctgtcttatttatgctttgagtgaatcatctgttgaggtctaatgcctttacttggcctatttgccagagaacatcttaatgcagcctgcatagtgaaatggttattttgagatcaccgctctgtagctaacccttataaactaggctcagtaaaataaagcactcttattttttgatctggcctattttgcccctcattgtgtagcctcaattaacacatgcatggtcatgacacccagaattcatgatggtttgttataacaacctctgcatattccaggtctggcagacaggttgcctgaccctgcaatcctatctagaatgggcccattcttgtcatatttgacaaataggactgcctacatttattattatgaaggtcgattgttgttggaagtgttttttcatgtcatagattagcaattttcaaataattattttttctctgaaaattttgtgtgtgattgcacaataaataatttttagagaaacaaaggctctttctcagcacattgatgggcaactagaattacagcagtttcaaaactctaccatggataatgcaaacaaaccgaagctacatgccaatgataggtgcaaagaatattggcaaaaggtgctttaccttgagccattatttgtgtcagagaacaaaagaaacagaatcaatatataaaattcaaagactatctgcagctagtgtgtttcttctttacacacatatacacacagacatcagaaaattctgttgagagcaggttcattaaatttgtaagatggcatattctaaagcctgtgctaccagtactaagaggggaagactggcaatttgccaagcacttggggattattataacaattaactaggagatcaagagataataatctctccccaaattttccaataataattgagactttttctttgcttgtttgtgtaattcaaccaaaagaatttcaatacccattcaaattgtcctaggtctatcagaaattagggaaggtagtcctgctttataataggaaaatgtatttctgtataagagttctttgctttcattaacttggattcatttaaaaattaatcttccctgttaggctgatttcagattctctaggaaatctgtgtaagtaaccagaagacctttcagatggtttatttgctttcagcagagaatttatttcatacagttacttaagagtgttgatgtcttgtgaacagagatataaggaaccattctccatccttccttatcatgctgggtacaatgcttctatgaatatttccatgtattttgactggggagaggcatggagaagaaactctcattcaggggctccaggatccttctccttgaggcttctaaataaatggcagaattcttgctgtattgccatgatgtcaccctggccatgtgtactgacttgaggagatcttgcaacatggccatgtgcaaggctttaaggagtgagagagatgtgtacatatcttaggagggttatctatgttatctgagtatatgtttgggtaaccaaattggtcttaaaaatgatgttaacccaagaagtagacatcaaaaattaaaaaaaaaaaaaggaatgtgttttcattgttttaagtttttcttctgagtaaaacaaaattatagaaaacaaatgcaacaatgtgcacatctgacttaagagtttcatttctgttattatatgtgttgcatgtagcttggcgatttactgtgtaatgaataatagactggaacatctaccaataactttcacataaatgttcaaaatagaagtgtattttttcaggtttctggaaataaatagtaaaataaatggcacaaatagtttcaataaatttaccaatttgagtgttttcagctctatttcaaaactcataactaatcttcagaattactgaatttccttttgaactgggtaaggcattatccaagcaacttcacatactatttaaacatgatttctcggtaattatatattctgggcaaataacataaacatgtcaggatttttacaggtgttagtgaatttttctaaaaagatgagacaaaagcaaaaatatcacacataggtttttatgactatgaatacaaagataatgctgattcacaattagctatgggtaagtccaaaacatcagaccttttactgatgggttaactaggtgaaagaaatgggcccttatttttttttttccctagaggcagaaagttacttctaatgatctatatagctaaaacgaaaaatacctgaaagttaatacatacatatgtagatatattttgttatgtgataaatgtttcttgtttgcacacttttggacttgagaaatctgcttttgttttgtgcctactctgagtttagaacccaaataagaggacttgttaaatatagagtgtactttttgttaaaactattgctagcttcacctgtataccatcattgttccaaattaaataactgttttgggtcagaatataaatgctgggaatatacattttattacttcttaatctgggtgtcaaagattttaccacctggtaaataatgttggacttcaacttgttactggcacattttaatagtagatgaaacatgtttttcttggttatgtgaataaatgtatgttgtgctcttcatacttgttggattgtatagagattaaatagtgatatgtatattttgttgtttgctttggtatgcaactcatgtaattttagtgctttgactagcttaaaacttcaaacaagtaattttataataaagttggactaatgtttttcaagagtgattatttttagaaggaccatataaaacttgaaacgcttgaacctaaactcccgttttatctgctactggatgagaagaatttcaacttaatttccattattaccttttgctctcccaccctgcccaatcttctgtgatatcttctctcttttacctgtgtctcaacttacctaggcaagtcataatttagatagaaatctgatttcccaaacctccaggtttagatatatcattcagaaaagcctcaatgtgtctgtaataagaaacaatctccaaattacagcgccataaacttcacaaaagtttgtatctcccacatggttcctgtccactctgaaggggagctctgctgttgtaatcactcagagaactcaggtgaaaaaacagccaccattatatgtggctgtttctcaaactacagagcatggtgaatcacacacaggctgttagaatatccatctggaggcaacacacatttgcatacacttctccagctaacataaataatgtggctttactaacttcccagggggcagctaagtgcaatactatatgttaggaaaacggaaactaatttgtagacagcactaatgatttccacattaggtaaaaaaaattttcattcttgtcttcctaatagcatttaaacagaaacgatttttaaaagttgttttaaacatttagaaacatcatggcatagaaacatttaggactcactctttgtaagtactgacaagcatggtcttgtaatctgtaaagataaggtagaataaatgaactaaaagaaattttagatgactaaaaggactatataatagaaagagggaaatcttggttcttaaaaattcaggcaattgaaacatttctgtataataccaagcattgttgcagtattgtctgaaatggttgcttttctaataaatgaaaatgactaaaatgta

SEQ ID NO: 588 - DNA, 3301 bp, Homo Sapiens
  NM_000964
gtgcctcttgcagcagcctaacccagaagcaggggggaatcctgaatcgagctgagagggcttccccggttctcctgggaaccccatcggccccctgccagcacacacctgagcagcatcacaggacatggccccctcagccacctagctggggcccatctaggagtggcatcttttttggtgccctgaaggccagctctggaccttcccaggaaaagtgccagctcacagaactgcttgaccaaaggaccggctcttgagacatcccccaacccacctggcccccagctagggtgggggctccaggagactgagattagcctgccctctttggacagcagctccaggacagggcgggtgggctgaccacccaaaccccatctgggcccaggccccatgccccgaggaggggtggtctgaagcccaccagagccccctgccagactgtctgcctcccttctgactgtggccgcttggcatggccagcaacagcagctcctgcccgacacctgggggcgggcacctcaatgggtacccggtgcctccctacgccttcttcttcccccctatgctgggtggactctccccgccaggcgctctgaccactctccagcaccagcttccagttagtggatatagcacaccatccccagccaccattgagacccagagcagcagttctgaagagatagtgcccagccctccctcgccaccccctctaccccgcatctacaagccttgctttgtctgtcaggacaagtcctcaggctaccactatggggtcagcgcctgtgagggctgcaagggcttcttccgccgcagcatccagaagaacatggtgtacacgtgtcaccgggacaagaactgcatcatcaacaaggtgacccggaaccgctgccagtactgccgactgcagaagtgctttgaagtgggcatgtccaaggagtctgtgagaaacgaccgaaacaagaagaagaaggaggtgcccaagcccgagtgctctgagagctacacgctgacgccggaggtgggggagctcattgagaaggtgcgcaaagcgcaccaggaaaccttccctgccctctgccagctgggcaaatacactacgaacaacagctcagaacaacgtgtctctctggacattgacctctgggacaagttcagtgaactctccaccaagtgcatcattaagactgtggagttcgccaagcagctgcccggcttcaccaccctcaccatcgccgaccagatcaccctcctcaaggctgcctgcctggacatcctgatcctgcggatctgcacgcggtacacgcccgagcaggacaccatgaccttctcggacgggctgaccctgaaccggacccagatgcacaacgctggcttcggccccctcaccgacctggtctttgccttcgccaaccagctgctgcccctggagatggatgatgcggagacggggctgctcagcgccatctgcctcatctgcggagaccgccaggacctggagcagccggaccgggtggacatgctgcaggagccgctgctggaggcgctaaaggtctacgtgcggaagcggaggcccagccgcccccacatgttccccaagatgctaatgaagattactgacctgcgaagcatcagcgccaagggggctgagcgggtgatcacgctgaagatggagatcccgggctccatgccgcctctcatccaggaaatgttggagaactcagagggcctggacactctgagcggacagccggggggtggggggcgggacgggggtggcctggcccccccgccaggcagctgtagccccagcctcagccccagctccaacagaagcagcccggccacccactccccgtgaccgcccacgccacatggacacagccctcgccctccgccccggcttttctctgcctttctaccgaccatgtgaccccgcaccagccctgcccccacctgccctcccgggcagtactggggaccttccctgggggacggggagggaggaggcagcgactccttggacagaggcctgggccctcagtggactgcctgctcccacagcctgggctgacgtcagaggccgaggccaggaactgagtgaggcccctggtcctgggtctcaggatgggtcctgggggcctcgtgttcatcaagacacccctctgcccagctcaccacatcttcatcaccagcaaacgccaggacttggctcccccatcctcagaactcacaagccattgctccccagctggggaacctcaacctcccccctgcctcggttggtgacagagggggtgggacaggggcggggggttccccctgtacataccctgccataccaaccccaggtattaattctcgctggttttgtttttattttaatttttttgttttgatttttttaataagaattttcattttaagcacatttatactgaaggaatttgtgctgtgtattggggggagctggatccagagctggagggggtgggtccgggggagggagtggctcggaaggggcccccactctcctttcatgtccctgtgccccccagttctcctcctcagccttttcctcctcagttttctctttaaaactgtgaagtactaactttccaaggcctgccttcccctccctcccactggagaagccgccagcccctttctccctctgcctgaccactgggtgtggacggtgtggggcagccctgaaaggacaggctcctggccttggcacttgcctgcacccaccatgaggcatggagcagggcagagcaagggccccgggacagagttttcccagacctggctcctcggcagagctgcctcccgtcagggcccacatcatctaggctccccagcccccactgtgaaggggctggccaggggcccgagctgcccccacccccggcctcagccaccagcacccccatagggcccccagacaccacacacatgcgcgtgcgcacacacacaaacacacacacactggacagtagatgggccgacacacacttggcccgagttcctccatttccctggcctgccccccacccccaacctgtcccacccccgtgccccctccttaccccgcaggacgggcctacaggggggtctcccctcacccctgcacccccagctgggggagctggctctgccccgacctccttcaccaggggttggggccccttcccctggagcccgtgggtgcacctgttactgttgggctttccactgagatctactggataaagaataaagttctatttattctaaaaaaaaaaaaaaaaaa

SEQ ID NO: 589 - DNA, 1449 bp, Homo Sapiens
  NM_000968
cttttcctgtggcagcagccgggctgagaggagcgtggctgtctcctctctccgccatggcgtgtgctcgcccactgatatcggtgtactccgaaaagggggagtcatctggcaaaaatgtcactttgcctgctgtattcaaggctcctattcgaccagatattgtgaactttgttcacaccaacttgcgcaaaaacaacagacagccctatgctgtcagtgaattagcaggtcatcagactagtgctgagtcttggggtactggcagagctgtggctcgaattcccagagttcgaggtggtgggactcaccgctctggccagggtgcttttggaaacatgtgtcgtggaggccgaatgtttgcaccaaccaaaacctggcgccgttggcatcgtagagtgaacacaacccaaaaacgatacgccatctgttctgccctggctgcctcagccctaccagcactggtcatgtctaaaggtcatcgtattgaggaagttcctgaacttcctttggtagttgaagataaagttgaaggctacaagaagaccaaggaagctgttttgctccttaagaaacttaaagcctggaatgatatcaaaaaggtctatgcctctcagcgaatgagagctggcaaaggcaaaatgagaaaccgtcgccgtatccagcgcaggggcccgtgcatcatctataatgaggataatggtatcatcaaggccttcagaaacatccctggaattactctgcttaatgtaagcaagctgaacattttgaagcttgctcctggtgggcatgtgggacgtttctgcatttggactgaaagtgctttccggaagttagatgaattgtacggcacttggcgtaaagccgcttccctcaagagtaactacaatcttcccatgcacaagatgattaatacagatcttagcagaatcttgaaaagcccagagatccaaagagcccttcgagcaccacgcaagaagatccatcgcagagtcctaaagaagaacccactgaaaaacttgagaatcatgttgaagctaaacccatatgcaaagaccatgcgccggaacaccattcttcgccaggccaggaatcacaagctccgggtggataaggcagctgctgcagcagcggcactacaagccaaatcagatgagaaggcggcggttgcaggcaagaagcctgtggtaggtaagaaaggaaagaaggctgctgttggtgttaagaagcagaagaagcctctggtgggaaaaaaggcagcagctaccaagaaaccagcccctgaaaagaagcctgcagagaagaaacctactacagaggagaagaagcctgctgcataaactcttaaatttgattattccataaaggtcaaatcattttggacagcttcttttgaataaagacctgattatacaggcagtgagaaacatgaaaaaaaaaaaaaaaaaa

SEQ ID NO: 590 - DNA, 1035 bp, Homo Sapiens
  NM_000969
ggcccttttcccaccccctagcgccgctgggcctgcaggtctctgtcgagcagcggacgccggtctctgttccgcaggatggggtttgttaaagttgttaagaataaggcctactttaagagataccaagtgaaatttagaagacgacgagagggtaaaactgattattatgctcggaaacgcttggtgatacaagataaaaataaatacaacacacccaaatacaggatgatagttcgtgtgacaaacagagatatcatttgtcagattgcttatgcccgtatagagggggatatgatagtctgcgcagcgtatgcacacgaactgccaaaatatggtgtgaaggttggcctgacaaattatgctgcagcatattgtactggcctgctgctggcccgcaggcttctcaataggtttggcatggacaagatctatgaaggccaagtggaggtgactggtgatgaatacaatgtggaaagcattgatggtcagccaggtgccttcacctgctatttggatgcaggccttgccagaactaccactggcaataaagtttttggtgccctgaagggagctgtggatggaggcttgtctatccctcacagtaccaaacgattccctggttatgattctgaaagcaaggaatttaatgcagaagtacatcggaagcacatcatgggccagaatgttgcagattacatgcgctacttaatggaagaagatgaagatgcttacaagaaacagttctctcaatacataaagaacagcgtaactccagacatgatggaggagatgtataagaaagctcatgctgctatacgagagaatccagtctatgaaaagaagcccaagaaagaagttaaaaagaagaggtggaaccgtcccaaaatgtcccttgctcagaagaaggatcgggtagctcaaaagaaggcaagcttcctcagagctcaggagcgggctgctgagagctaaacccagcaattttctatgattttttcagatatagataataaacttatgaacagcaactaaaaa

SEQ ID NO: 591 - DNA, 890 bp, Homo Sapiens
  NM_000972
tttcctttctctctcctcccgccgcccaagatgccgaaaggaaagaaggccaagggaaagaaggtggctccggccccagctgtcgtgaagaagcaggaggctaagaaagtggtgaatcccctgtttgagaaaaggcctaagaattttggcattggacaggacatccagcccaaaagagacctcacccgctttgtgaaatggccccgctatatcaggttgcagcggcagagagccatcctctataagcggctgaaagtgcctcctgcgattaaccagttcacccaggccctggaccgccaaacagctactcagctgcttaagctggcccacaagtacagaccagagacaaagcaagagaagaagcagagactgttggcccgggccgagaagaaggctgctggcaaaggggacgtcccaacgaagagaccacctgtccttcgagcaggagttaacaccgtcaccaccttggtggagaacaagaaagctcagctggtggtgattgcacacgacgtggatcccatcgagctggttgtcttcttgcctgccctgtgtcgtaaaatgggggtcccttactgcattatcaagggaaaggcaagactgggacgtctagtccacaggaagacctgcaccactgtcgccttcacacaggtgaactcggaagacaaaggcgctttggctaagctggtggaagctatcaggaccaattacaatgacagatacgatgagatccgccgtcactggggtggcaatgtcctgggtcctaagtctgtggctcgtatcgccaagctcgaaaaggcaaaggctaaagaacttgccactaaactgggttaaatgtacactgttgagttttctgtacataaaaataattgaaataatacaaattttccttc

SEQ ID NO: 592 - DNA, 632 bp, Homo Sapiens
  NM_000976
ctctcggctttcggctcggaggaggccaaggtgcaacttccttcggtcgtcccgaatccgggttcatccgacaccagccgcctccaccatgccgccgaagttcgaccccaacgagatcaaagtcgtatacctgaggtgcaccggaggtgaagtcggtgccacttctgccctggcccccaagatcggccccctgggtctgtctccaaaaaaagttggtgatgacattgccaaggcaacgggtgactggaagggcctgaggattacagtgaaactgaccattcagaacagacaggcccagattgaggtggtgccttctgcctctgccctgatcatcaaagccctcaaggaaccaccaagagacagaaagaaacagaaaaacattaaacacagtgggaatatcacttttgatgagattgtcaacattgctcgacagatgcggcaccgatccttagccagagaactctctggaaccattaaagagatcctggggactgcccagtcagtgggctgtaatgttgatggccgccatcctcatgacatcatcgatgacatcaacagtggtgctgtggaatgcccagccagttaagcacaaaggaaaacatttcaataaaggatcatttgacaactggtga

SEQ ID NO: 593 - DNA, 648 bp, Homo Sapiens
  NM_000979
ctttccggacctggccgagcaggaggcgccatcatgggagtggacatccgccataacaaggaccgaaaggttcggcgcaaggagcccaagagccaggatatctacctgaggctgttggtcaagttatacaggtttctggccagaagaaccaactccacattcaaccaggttgtgttgaagaggttgtttatgagtcgcaccaaccggccgcctctgtccctttcccggatgatccggaagatgaagcttcctggccgggaaaacaagacggccgtggttgtggggaccataactgatgatgtgcgggttcaggaggtacccaaactgaaggtatgtgcactgcgcgtgaccagccgggcccgcagccgcatcctcagggcagggggcaagatcctcactttcgaccagctggccctggactcccctaagggctgtggcactgtcctgctctccggtcctcgcaagggccgagaggtgtaccggcatttcggcaaggccccaggaaccccgcacagccacaccaaaccctacgtccgctccaagggccggaagttcgagcgtgccagaggccgacgggccagccgaggctacaaaaactaaccctggatcctactctcttattaaaaagatttttgctgacaaaaaaaa

SEQ ID NO: 594 - DNA, 618 bp, Homo Sapiens
  NM_000980
cttttgcgggtggcggcgaacgcggagagcacgccatgaaggcctcgggcacgctacgagagtacaaggtagtgggtcgctgcctgcccacccccaaatgccacacgccgcccctctaccgcatgcgaatctttgcgcctaatcatgtcgtcgccaagtcccgcttctggtactttgtatctcagttaaagaagatgaagaagtcttcaggggagattgtctactgtgggcaggtgtttgagaagtcccccctgcgggtgaagaacttcgggatctggctgcgctatgactcccggagcggcacccacaacatgtaccgggaataccgggacctgaccaccgcaggcgctgtcacccagtgctaccgagacatgggtgcccggcaccgcgcccgagcccactccattcagatcatgaaggtggaggagatcgcggccagcaagtgccgccggccggctgtcaagcagttccacgactccaagatcaagttcccgctgccccaccgggtcctgcgccgtcagcacaagccacgcttcaccaccaagaggcccaacaccttcttctaggtgcagggccctcgtccgggtgtgccccaaataaactcaggaacgccccggt

SEQ ID NO: 595 - DNA, 748 bp, Homo Sapiens
  NM_000981
gcagataatgggaggagccgggcccgagcgagctctttcctttcgctgctgcggccgcagccatgagtatgctcaggcttcagaagaggctcgcctctagtgtcctccgctgtggcaagaagaaggtctggttagaccccaatgagaccaatgaaatcgccaatgccaactcccgtcagcagatccggaagctcatcaaagatgggctgatcatccgcaagcctgtgacggtccattcccgggctcgatgccggaaaaacaccttggcccgccggaagggcaggcacatgggcataggtaagcggaagggtacagccaatgcccgaatgccagagaaggtcacatggatgaggagaatgaggattttgcgccggctgctcagaagataccgtgaatctaagaagatcgatcgccacatgtatcacagcctgtacctgaaggtgaaggggaatgtgttcaaaaacaagcggattctcatggaacacatccacaagctgaaggcagacaaggcccgcaagaagctcctggctgaccaggctgaggcccgcaggtctaagaccaaggaagcacgcaagcgccgtgaagagcgcctccaggccaagaaggaggagatcatcaagactttatccaaggaggaagagaccaagaaataaaacctcccactttgtctgtacatactggcctctgtgattacatagatcagccattaaaataaaacaagccttaatctgcaaaaaaaaaaaaaaaa

SEQ ID NO: 596 - DNA, 2099 bp, Homo Sapiens
  NM_000983
gcgtctgcgtagttcgctcacctccctttctaactccgctgccgccatggctcctgtgaaaaagcttgtggtgaaggggggcaaaaaaaagaagcaagttctgaagttcactcttgattgcacccaccctgtagaagatggaatcatggatgctgccaattttgagcagtttttgcaagaaaggatcaaagtgaacggaaaagctgggaaccttggtggaggggtggtgaccatcgaaaggagcaagagcaagatcaccgtgacatccgaggtgcctttctccaaaaggtatttgaaatatctcaccaaaaaatatttgaagaagaataatctacgtgactggttgcgcgtagttgctaacagcaaagagagttacgaattacgttacttccagattaaccaggacgaagaagaggaggaagacgaggattaaatttcatttatctggaaaattttgtatgagttcttgaataaaacttgggaaccaaaatggtggtttatccttgtatctctgcagtgtggattgaacagaaaattggaaatcatagtcaaagggcttcccttggttcgccactcatttatttgtaacttgacttctttttttttctgcttaaaaatttcaattctcgtggtaataccagagtagaaggagagggtgactttaccgaactgacagccattggggaggcagatgcgggtgtggaggtgtgggctgaaggtagtgactgtttgattttaaaaagtgtgactgtcagttgtatctgttgcttttctcaatgattcagggatacaaatgggcttctctcattcattaaaagaaaacgcgacatctttctaagattctctgtgggaaaatgactgtcaataaaatgcgggtttctgggccattcgtcttactttcattttttgattacaaatttctcttgacgcacacaattatgtctgctaatcctcttcttcctagagagagaaactgtgctccttcagtgttgctgccataaaggggtttggggaatcgattgtaaaagtcccaggttctaaattaactaaatgtgtacagaaatgaacgtgtaagtaatgtttctacaggtctttgcaacaaactgtcactttcgtctccagcagagggagctgtaggaatagtgcttccagatgtggtctcccgtgtggggcccagcaatgggggcccctgatgccaagagctctggaggttcttgaaagaggggacacgaaggaggagtgactgggaagcctcccatgccaaggaggtgggaggtgccctggaaatagctgcctcatgccacttaggccatgactggatttaatgtcagtggtgtgccacagtgcagaggctagacaactgaaaggggctaccaaggctgggaaaaaaatgcaattgttgctgtgagtgactttgaaagactctggtgccttgtggtgcccttctgaaattcaaacagtaatgcaaaagtgtctgcattagaatttacggtgtctaaaattcatgtttttaaaagagcttgcctacagatggtttccacacttgaaattgtgccctgcgagttgcatagctggaagttcaatgctcagtcctaccttggctcccattaaacatttggtgctctgtggattgagttgaacgtgttgaggctttgcaatttcacttgtgttaaaggctctggcatttttccatttctatgcaaatttctttgaagcagaattgcttgcatatttcttctctgccgtcacagaaagcagagtttctttcaaacttcactgaggcatcagttgctctttggcaatgtcccttaaccatgattattaactaagtttgtggcttgagtttacaaattctacttgttgcattgatgttcccatgtagtaagtcatttttagtttggttgtgaaaaaaccctgggctgaagttggcatttcagttaaaagaaaaaaagaaactagtcccagatttgaaaacttgtaataaaattgaaactcactggttttctatgtctttttgaactcttgtaatcgagttttgatcatattttctattaaagtggctaacacctggctactcttactgtaaaaaaaaaaaaaaa

SEQ ID NO: 597 - DNA, 979 bp, Homo Sapiens
  NM_000984
agcattggagacccttttcacaagatggcgccgaaagcgaagaaggaagctcctgcccctcctaaagctgaagccaaagcgaaggctttaaaggccaagaaggcagtgttgaaaggtgtccacagccacaaaaagaagaagatccgcacgtcacccaccttccggcggccgaagacactgcgactccggagacagcccaaatatcctcggaagagcgctcccaggagaaacaagcttgaccactatgctatcatcaagtttccgctgaccactgagtctgccatgaagaagatagaagacaacaacacacttgtgttcattgtggatgttaaagccaacaagcaccagattaaacaggctgtgaagaagctgtatgacattgatgtggccaaggtcaacaccctgattcggcctgatggagagaagaaggcatatgttcgactggctcctgattacgatgctttggatgttgccaacaaaattgggatcatctaaactgagtccagctgcctaattctgaatatatatatatatatatcttttcaccatatacatgcctgtctgtcaatttctggttgggctgggaggccacacacacacactgacatgacagggcttgggcaagactcctgttctacttatccttttgaaatacctcaccctgccactccaccatgtatgatcattccagagatctttgtgactagagttagtgtcctaggaaaaccagaactcagaacttgcctccatggttgagtaacaagctgtacaagaaccccttttatccctggaagaggctgtgtatgaaaccaatgcccagggtttgaagggtgttagcatccatttcaggggagtgtggattggctggctctctggtagcattttgtcctcacacacccatctactatgtccaaccggtctgtctgcttccctcaccccttgcccaataaaggacaaggacttcagaggaaaaaaaaaa

SEQ ID NO: 598 - DNA, 4245 bp, Homo Sapiens
  NM_000991
ctctttccgtctcaggtcgccgctgcgaagggagccgccgccatgtctgcgcatctgcaatggatggtcgtgcggaactgctccagtttcctgatcaagaggaataagcagacctacagcactgagcccaataacttgaaggcccgcaattccttccgctacaacggactgattcaccgcaagactgtgggcgtggagccggcagccgacggcaaaggtgtcgtggtggtcattaagcggagatccggccagcggaagcctgccacctcctatgtgcggaccaccatcaacaagaatgctcgcgccacgctcagcagcatcagacacatgatccgcaagaacaagtaccgccccgacctgcgcatggcagccatccgcagggccagcgccatcctgcgcagccagaagcctgtgatggtgaagaggaagcggacccgccccaccaagagctcctgagccccctgcccccagagcaataaagtcagctggctttctcacctgcctcgactgggcctccctttttgaaacgctctggggagctctggccctgtgtgttgtcattcaggccatgtcatcaaaactctgcatgtcaccttgtccatctggaggtgatgtcaatggctggccatgcaggaggggtggggtagctgccttgtccctggtgagggcaagggtcactgtcttcacagaaaaagtttgctgacttgtgattgagacctactgtcccattgtgaggtggcctgaagaatcccagctggggcagtggcttccattcagaagaagaaaggccttttctagcccagaagggtgcaggctgagggctgggccctgggccctggtgctgtagcacggtttggggacttggggtgttcccaagacctgggggacgacagacatcacgggaggaagatgagatgacttttgcatccagggagtgggtgcagccacatttggaggggatgggctttacttgatgcaacctcatctctgagatgggcaacttggtgggtggtggcttataactgtaagggagatggcagccccagggtacagccagcaggcattgagcagccttagcattgtccccctactcccgtcctccaggtgtccccatccctcccctgtctctttgagctggctcttgtcacttaggtctcatctcagtggccgctcctgggccaccctgtcacccaagctttcctgattgcccagccctcttgtttcctttggcctgtttgctccctagtgtttattacagcttgtgaggccaggagtttgagaccatcctaggcaacataatgagacaccgtctctaaaataaaattagctgggtgtggtggtgcaccgcctgtggtcccagctcctcagaggttgagtagaggctgaggtgagcggagcacttgagccaagagtatgaggctgcagtgagcccatgagccccaccactacactccagcctggaagacaccatgacacacagtgaggcctggatggggaaagagtcctgctgttgatcctcacatgtttcctgggcacctaactctgtcagccactgccagggaccaaggatccagcatccatggcacccctggttcctgccatcctggggtacccgattcaaagaaggactctgctccctgtctgagaccacccccggctctgactgagagtaaggggactgtcagggcctcgacttgccattggttggggtcgtacggggctgggagccctgcgttttgaggcagaccactgcccttccgacctcagtcctgtctgctccagtcttgcccagctcgaaggagagcagatctgaccacttgccagcccctgtctgctgtgaattaccatttcctttgtccttcccttagttgggtctattagctcagattgagaggtgttgccttaaaactgagttgggtgacttggtacctgctcaggaccccccgcactgtcccaatcccactcaggcccacctccagctggcctcactccgctggtgacttcgtacctgctcaggagcccccactgtcccagtcccactcaggcccatctctggctggcctcactgcgctgggactccgccttcataaggagagctcactgctcacgttagtagatggccccttctcgtgaggcctctcccctggcacctgcttcagttgtcctccacagcactgatttgcagcccacaagctggcaggtttatctgtctcatgtttgtcttgtgctggtgggcaaggggtttgtctagcacaccagcatataatgagatgcttgatgaatggtgcatattgaatgtataaagcccaccggtcctgagagtttgctcactggagactttctggagatggagtctcgctctgttgcccaggctggcgagtgcaatggcgcgatcttggctcactgcagcctccacctcctgggttcaagcgattctcctgcctcagcctcccgagtagctgggattacaggtgggtgtcaccacacccagctcagtattgtatttttagcagagatggggtttcaccattttgcccaggctggtttggaactcctgacttcaaattacccacctgcctcagcctcccaaagtgctggcattacaggcgctcgaggctttctgatgtggctgctgctgctcagaaggccttgtccttaaccacctccttgcctgccctggaggcttgtgcctctaggccccaccccctgtggagtcctgctggctttctccatccctatctgaatcctccctgctgtgtggcctcccctggtctcatccgtaacacagcccagcttagtgggcctctgttcctgcgggtggccagcctgtctgtgtggctgggctggggaggccacgtctggtatctgaatgctatcggtgggttggggtggaggaaccaggagagggctggagggagggagatggtctcagccccacagagtttggagtcctcagtgtgctgagcaaacgtggagacaccatttccctcctctagacctcatcttggagagagagatgttggatggggccatctattccagctttattcacacaaatcatgtctgttggcctggaaattggaaaaccagttaaaccaaaaacatgatattaagaaaacaggcaggctcaccatagtaaaaatgctgaaagccaaagacaaaattgggagaacaaaagaaaagcgtcttgtcacatacagaaggtccctgataaagttagtagctgccctcatcagaaaccaggcccaggcagtggggacacatccagagtgctgaaagaacctcccccaggtcatcctatccccaagagtgatgcccggcagcattcccagctcagggctaatggttcacggaagccaggaatcaaactgcctgggttccagtcccagctctgccagttatgcccagctgtggggacttgggcagctcgtttagtagcaccgtgcctcagtttcccatatgtaaaaggccattttgagtgcctttcacagccctgcataaggcaggtgtctcagtgttcactgctgtctctccagctcttagtccagtagctgcatggtgagtgagcgtagggcgcaccctggaaggctgccaagcccaaagttgtgcagagcgctggggactccagactccccacagcagcagagactcgggactgaggcatcctctgttcacaggacatgctggcatctactgggtcagggctctgctgctcggtggctgtgcaaccttgggcaagttcctcaacctctctgtgtcttcgtaccctcatctgtaacatgcgtgtcgatagaccctactactcagggttgatgagaagattaaatgtgcaaaacctgcttgactgtgcccacaaatcctgattgtaggaataaattaatgactttttataaatattttgatcagatggactcatgatcacagatgtcttcacatgcctatgactaatttgtacacaaactaatgctcgtgtttcccaagcacctggaagacatgccagatccatgtgcagtaatgcctggtggctccaggtctgccccgccgtcctgtggggctgtgagctttcccagcctcctgcccgtgtttgtgaatatcattctgtcctcagctgcatttccagcccaggctgtttggcgctgcccaggaatggtatcaattcccctgtttctcttgtagccagttactagaataaaatcatctactttaaaaaaaaaaaaaaaaaaaaaaaaaaaaaaaaaaaaaaaa

SEQ ID NO: 599 - DNA, 524 bp, Homo Sapiens
  NM_000993
tggcgacccggaagttgtacttgcaactgcggctttccttctcccacaatccttcgcgctcttcctttccaacttggacgctgcagaatggctcccgcaaagaagggtggcgagaagaaaaagggccgttctgccatcaacgaagtggtaacccgagaatacaccatcaacattcacaagcgcatccatggagtgggcttcaagaagcgtgcacctcgggcactcaaagagattcggaaatttgccatgaaggagatgggaactccagatgtgcgcattgacaccaggctcaacaaagctgtctgggccaaaggaataaggaatgtgccataccgaatccgtgtgcggctgtccagaaaacgtaatgaggatgaagattcaccaaataagctatatactttggttacctatgtacctgttaccactttcaaaaatctacagacagtcaatgtggatgagaactaatcgctgatcgtcagatcaaataaagttataaaattgccttcaaaaaaaaaaaaaaaaaa

SEQ ID NO: 600 - DNA, 1586 bp, Homo Sapiens
  NM_000997
gcgccccgcaggaagtgcttccctgggcggaagcttctgagcgtgatatagcggaagtgccttctcttccggtctttctggtctcggccgcagaagcgagatgacgaagggaacgtcatcgtttggaaagcgtcgcaataagacgcacacgttgtgccgccgctgtggctctaaggcctaccaccttcagaagtcgacctgtggcaaatgtggctaccctgccaagcgcaagagaaagtataactggagtgccaaggctaaaagacgaaataccaccggaactggtcgaatgaggcacctaaaaattgtataccgcagattcaggcatggattccgtgaaggaacaacacctaaacccaagagggcagctgttgcagcatccagttcatcttaagaatgtcaacgattagtcatgcaataaatgttctggttttaaaaaatacatatctggttttggtaaggtatttttaatcaattaggcttgtagtatcagtgaaatactgtaggtttagggactgggctagcttcatatcagatttacttgttaagtgactgttttggaatgtttacttttggactgggtttgtaacacggttaaaggcaatgagaaacaagcagaattccaggagtccttgaagcagagggcactggaagacaatatagcagattaaaatagcacagctcatgtggcataggtgggtattttagatgtttgagtaaatttgaaagagtatgatgtttaaattacctttagcaacatgttcatctgctatgctgtcatgactagggggatgattattagtcacatagagcttgggagtaccactggaaacgtatgggtaggagtttaggtggcttctgtttttcaaaagatgatcttatcctagtatctgtaatgctcacttggcacacctgacttgtgggctgtgtgtaaggtggctagctaagtgaaaaaagcctgctaggtgtgagtcaacttaagaatatgtaaataggtttgagaaaaagtagggcttgggtgcaagtaaagattgagcaggaaataaaggaaaatcaagtataatccctgagatttgtagactaaaggcaatgatgtgggactacttggtcgaatttttttagccctcaacttggtaattgggtgtttctgtgttaaagcactgaaacttgctgtcgtgccttcctagttttcgtggtttattgacagggttgggggttttttttgtttttttaaaatgaagggacaaagtcaactggactgctgagtgagagggcaggggcagttgaagggaacatgaattgctggaacagctacataaaatagtgatgtagccaagtcatgctatttaaattataattctccactgtgtttagaataacatctgaggttcttaacctggccttggaagggtatcacttttacttgtaacctggaatggctttataatgtgctagctaattgctactctcatcttgtattttaactcctaatttacccttcaggtctcagcttcagaacattcacttataaagaaaccctgctgattaaatctctcttgggcttcctcccaaaaaaaaaaaaaaaa

SEQ ID NO: 601 - DNA, 434 bp, Homo Sapiens
  NM_000998
acttccgctcgtccgcctaataccgcgcctgcgcaccgcgtctcttcctttctgggctcggacctaggtcgcggcgacatggccaaacgtaccaagaaagtcgggatcgtcggtaaatacgggacccgctatggggcctccctccggaaaatggtgaagaaaattgaaatcagccagcacgccaagtacacttgctctttctgtggcaaaaccaagatgaagagacgagctgtggggatctggcactgtggttcctgcatgaagacagtggctggcggtgcctggacgtacaataccacttccgctgtcacggtaaagtccgccatcagaagactgaaggagttgaaagaccagtagacgctcctctactctttgagacatcactggcctataataaatgggttaatttatgtaacaaaaaaaaaaaaaaaaaa

SEQ ID NO: 602 - DNA, 5879 bp, Homo Sapiens
  NM_001001188
caaccaccccatgtgtctctagaaccccagtgtagcgagctggagagaggactgtcctgagggcagcaggcctggttgcagctggcgtgggggtctcagaatggagccctcagccctgaggaaagctggctcggagcaggaggagggctttgaggggctgcccagaagggtcactgacctggggatggtctccaatctccggcgcagcaacagcagcctcttcaagagctggaggctacagtgccccttcggcaacaatgacaagcaagaaagcctcagttcgtggattcctgaaaacatcaagaagaaagaatgcgtgtattttgtggaaagttccaaactgtctgatgctgggaaggtggtgtgtcagtgtggctacacgcatgagcagcacttggaggaggctaccaagccccacaccttccagggcacacagtgggacccaaagaaacatgtccaggagatgccaaccgatgcctttggcgacatcgtcttcacgggcctgagccagaaggtgaaaaagtacgtccgagtctcccaggacacgccctccagcgtgatctaccacctcatgacccagcactgggggctggacgtccccaatctcttgatctcggtgaccgggggggccaagaacttcaacatgaagccgcggctgaagagcattttccgcagaggcctggtcaaggtggctcagaccacaggggcctggatcatcacaggggggtcccacaccggcgtcatgaagcaggtaggcgaggcggtgcgggacttcagcctgagcagcagctacaaggaaggcgagctcatcaccatcggagtcgccacctggggcactgtccaccgccgcgagggcctgatccatcccacgggcagcttccccgccgagtacatactggatgaggatggccaagggaacctgacctgcctagacagcaaccactctcacttcatcctcgtggacgacgggacccacggccagtacggggtggagattcctctgaggaccaggctggagaagttcatatcggagcagaccaaggaaagaggaggtgtggccatcaagatccccatcgtgtgcgtggtgctggagggcggcccgggcacgttgcacaccatcgacaacgccaccaccaacggcaccccctgtgtggttgtggagggctcgggccgcgtggccgacgtcattgcccaggtggccaacctgcctgtctcggacatcactatctccctgatccagcagaaactgagcgtgttcttccaggagatgtttgagaccttcacggaaagcaggattgtcgagtggaccaaaaagatccaagatatcgtccggaggcggcagctgctgactgtcttccgggaaggcaaggatggtcagcaggacgtggatgtggccatcttgcaggccttgctgaaagcctcacggagccaagaccactttggccacgagaactgggaccaccagctgaaactggcagtggcatggaatcgcgtggacattgcccgcagtgagatcttcatggatgagtggcagtggaagccttcagatctgcaccccacgatgacagctgcactcatctccaacaagcctgagtttgtgaagctcttcctggagaacggggtgcagctgaaggagtttgtcacctgggacaccttgctctacctgtacgagaacctggacccctcctgcctgttccacagcaagctgcagaaggtgctggtggaggatcccgagcgcccggcttgcgcgcccgcggcgccccgcctgcagatgcaccacgtggcccaggtgctgcgggagctgctgggggacttcacgcagccgctttatccccggccccggcacaacgaccggctgcggctcctgctgcccgttccccacgtcaagctcaacgtgcagggagtgagcctccggtccctctacaagcgttcctcaggccatgtgaccttcaccatggaccccatccgtgaccttctcatttgggccattgtccagaaccgtcgggagctggcaggaatcatctgggctcagagccaggactgcatcgcagcggccttggcctgcagcaagatcctgaaggaactgtccaaggaggaggaggacacggacagctcggaggagatgctggcgctggcggaggagtatgagcacagagccatcggggtcttcaccgagtgctaccggaaggacgaagagagagcccagaaactgctcacccgcgtgtccgaggcctgggggaagaccacctgcctgcagctcgccctggaggccaaggacatgaagtttgtgtctcacgggggcatccaggccttcctgaccaaggtgtggtggggccagctctccgtggacaatgggctgtggcgtgtgaccctgtgcatgctggccttcccgctgctcctcaccggcctcatctccttcagggagaagaggctgcaggatgtgggcacccccgcggcccgcgcccgtgccttcttcaccgcacccgtggtggtcttccacctgaacatcctctcctacttcgccttcctctgcctgttcgcctacgtgctcatggtggacttccagcctgtgccctcctggtgcgagtgtgccatctacctctggctcttctccttggtgtgcgaggagatgcggcagtagctcttctatgaccctgacgagtgcgggctgatgaagaaggcagccttgtacttcagtgacttctggaataagctggacgtcggcgcaatcttgctcttcgtggcagggctgacctgcaggctcatcccggcgacgctgtaccccgggcgcgtcatcctctctctggacttcatcctgttctgcctccggctcatgcacatttttaccatcagtaagacgctggggcccaagatcatcattgtgaagcggatgatgaaggacgtcttcttcttcctcttcctgctggctgtgtgggtggtgtccttcggggtggccaagcaggccatcctcatccacaacgagcgccgggtggactggctgttccgaggggccgtctaccactcctacctcaccatcttcgggcagatcccgggctacatcgacggtgtgaacttcaacccggagcactgcagccccaatggcaccgacccctacaagcctaagtgccccgagagcgacgcgacgcagcagaggccggccttccctgagtggctgacggtcctcctactctgcctctacctgctcttcaccaacatcctgctgctcaacctcctcatcgccatgttcaactacaccttccagcaggtgcaggagcacacggaccagatttggaagttccagcgccatgacctgatcgaggagtaccacggccgccccgccgcgccgccccccttcatcctcctcagccacctgcagctcttcatcaagagggtggtcctgaagactccggccaagaggcacaagcagctcaagaacaagctggagaagaacgaggaggcggccctgctatcctgggagatctacctgaaggagaactacctccagaaccgacagttccagcaaaagcagcggcccgagcagaagatcgaggacatcagcaataaggttgacgccatggtggacctgctggacctggacccactgaagaggtcgggctccatggagcagaggttggcctccctggaggagcaggtggcccagacagcccgagccctgcactggatcgtgaggacgctgcgggccagcggcttcagctcggaggcggacgtccccactctggcctcccagaaggccgcggaggagccggatgctgagccgggaggcaggaagaagacggaggagccgggcgacagctaccacgtgaatgcccggcacctcctctaccccaactgccctgtcacgcgcttccccgtgcccaacgagaaggtgccctgggagacggagttcctgatctatgacccacccttttacacggcagagaggaaggacgcggccgccatggaccccatgggagacaccctggagccactgtccacgatccagtacaacgtggtggatggcctgagggaccgccggagcttccacgggccgtacacagtgcaggccgggttgcccctgaaccccatgggccgcacaggactgcgtgggcgcgggagcctcagctgcttcggacccaaccacacgctgtaccccatggtcacgcggtggaggcggaacgaggatggagccatctgcaggaagagcataaagaagatgctggaagtgctggtggtgaagctccctctctccgagcactgggccctgcctgggggctcccgggagccaggggagatgctacctcggaagctgaagcggatcctccggcaggagcactggccgtcttttgaaaacttgctgaagtgcggcatggaggtgtacaaaggctacatggatgacccgaggaacacggacaatgcctggatcgagacggtggccgtcagcgtccacttccaggaccagaatgacgtggagctgaacaggctgaactctaacctgcacgcctgcgactcgggggcctccatccgatggcaggtggtggacaggcgcatcccactctatgcgaaccacaagaccctcctccagaaggcagccgctgagttcggggctcactactgactgtgccctcaggctgggcggctccagtccatagacgttccccccagaaaccagggcttctctctcctgagcctggccaggactcaggctgttcctgggccctgcacatgatggggtttggtggacccagtgcccctcacggctgccgcaagtctgctgcagatgacctcatgaactggaaggggtcaaggtgacccgggaggagagctcaagacagggcacaggctactcagagctgaggggcccctgggacccttggccatcaggcgaggggctgggcctgtgcagctgggcccttggccagagtccactcccttcctggctgtgtcaccccgagcagctcatccaccatggaggtcattggcctgaggcaagttccccggagagtcggggtcccctgtggccccctcaggcctatgtctgtgaggaaggggccctgccactctccccaagagggcctccatgtttcgaggtgcctcaacatggagccttgcctggcctgggctaggggcactgtctgaactcctgactgtcaggataaactccgtgggggtacaggagcccagacaaagcccaggcctgtcaagagacgcagagggcccctgccagggttggccccagggaccctgggacgaggctgcagaagctctccctccctactccctgggagccacgtgctggccatgtggccagggacggcatgagcaggaggcggggacgtgggggccttctggtttggtgtcaacagctcacaggagcgtgaaccatgagggccctcaggaggggaacgtggtaaaacccaagacattaaatctgccatctcaggcctggctggctcttctgtgctttccacaaataaagttcctgacacgtccagggccaggggctgtgtgacggctgcctgaagttctcctcgatcccccggtgagcttcctgcagcctgtggatgtcctgcagcccctcagccctacccccaagtttctcctctgacccatcagctccctgtcttcattttcctaaacctgggctccagcatcgtccccaagcccaccaggccaggatgcaggcatccacatgccctcctccttggcttcccctgcgtggtggtgccaatgtgccctggcacccctgcagaggctccggatggagcctggggctgcctggccactgagcactggccgaggtgatgcccacccttccctggacaggcctctgtcttccacctgacccaaagctctctagccacccccttgtccccaggtat

SEQ ID NO: 603 - DNA, 1885 bp, Homo Sapiens
  NM_001001290
gttggctctagggctggcaccaggcactggaattaaacattctggactccagaggggcatgaaaactcttcctgaaggagatgcagaggaagattcgaactggaggaaaaccctaaaataaacaataacaacaaaagttcaaaacctgaaaagtgaaccatgaagctcagtaaaaaggaccgaggagaagatgaagaaagtgattcagcgaaaaagaaattggactggtcctgctcgctcctcgtggcctccctcgcgggcgccttcggctcctccttcctctacggctacaacctgtcggtggtgaatgcccccaccccgtacatcaaggccttttacaatgagtcatgggaaagaaggcatggacgtccaatagacccagacactctgactttgctctggtctgtgactgtgtccatattcgccatcggtggacttgtggggacgttaattgtgaagatgattggaaaggttcttgggaggaagcacactttgctggccaataatgggtttgcaatttctgctgcattgctgatggcctgctcgctccaggcaggagcctttgaaatgctcatcgtgggacgcttcatcatgggcatagatggaggcgtcgccctcagtgtgctccccatgtaccttagtgagatctcacccaaggagatccgtggctctctggggcaggtgactgccatctttatctgcattggcgtgttcactgggcagcttctgggcctgcccgagctgctgggaaaggagagtacctggccatacctgtttggagtgattgtggtccctgccgttgtccagctgctgagccttccctttctcccggacagcccacgctacctgctcttggagaagcacaacgaggcaagagctgtgaaagccttccaaacgttcttgggtaaagcagacgtttcccaagaggtagaggaggtcctggctgagagccgcgtgcagaggagcatccgcctggtgtccgtgctggagctgctgagagctccctacgtccgctggcaggtggtcaccgtgattgtcaccatggcctgctaccagctctgtggcctcaatgcaatttggttctataccaacagcatctttggaaaagctgggatccctccggcaaagatcccatacgtcaccttgagtacagggggcatcgagactttggctgccgtcttctctggtttggtcattgagcacctgggacggagacccctcctcattggtggctttgggctcatgggcctcttctttgggaccctcaccatcacgctgaccctgcaggaccacgccccctgggtcccctacctgagtatcgtgggcattctggccatcatcgcctctttctgcagtgggccaggtggcatcccgttcatcttgactggtgagttcttccagcaatctcagcggccggctgccttcatcattgcaggcaccgtcaactggctctccaactttgctgttgggctcctcttcccattcattcagaaaagtctggacacctactgtttcctagtctttgctacaatttgtatcacaggtgctatctacctgtattttgtgctgcctgagaccaaaaacagaacctatgcagaaatcagccaggcattttccaaaaggaacaaagcatacccaccagaagagaaaatcgactcagctgtcactgatggtaagataaatggaaggccttaacaagtttcctcctccacgttggacaattatgtcaaaaacaggattgtctacatggatgatctcacttttcaggaaacttaaaatttacccattattgggaagcttaaatgaattgaagctatgcaagtcttttatattattaaatatttaaaagtaaacctgtactaatctaaaaaaaaaaaaaaaaaaa

SEQ ID NO: 604 - DNA, 6950 bp, Homo Sapiens
  NM_001001323
ggccaaaggtcaagatacttctctgggaaatgttgctgctgatgctgctttacaaagtcatacaatgagtgtttggtttaagaaagattttcatacttaaaagattttcatcttggaaatacatcaagtgaaaattaaattcttttgggaaacattttccttctgatatattatacttgtaatgggcgacatggcaaacaactcagttgcttacagtggtgtgaaaaactctttgaaggaagctaatcatgatggagactttggaattacgctcgcagagctgcgggctctcatggagctcaggtccacagatgcattacgaaaaatacaggaaagctatggagatgtctatggaatttgcaccaaattgaaaacatctcccaatgaaggtttaagtggaaaccctgcagatttagaaagaagagaagcagtgtttggaaagaattttatacctcctaaaaagccaaaaacctttcttcaattagtatgggaagcattacaagatgtcactttaattatattagaaattgcagccatagtatcattgggcctttctttttatcagcctccagaaggggataatgcactttgtggagaagtttctgttggggaggaagaaggtgaaggtgaaactggttggattgaaggagctgcaatcctcttgtctgtagtgtgtgtggtgttagtaacagctttcaatgactggagtaaggaaaaacagtttagaggtttgcagagccgaattgaacaagaacagaagttcactgtcatcaggggtggtcaggtcattcagatacctgtagctgacattactgttggagatattgctcaagtgaaatatggtgatcttcttccagctgacggcatacttattcaaggcaacgatcttaaaattgatgaaagctcattgactggtgaatcagatcatgttaaaaagtctttagataaggatcccttacttctatcaggtactcatgtaatggaaggctctggaagaatggtagttacagctgtaggtgtaaattctcaaactggaattatctttaccttacttggagctggaggtgaagaggaagagaagaaagatgagaagaaaaaggaaaagaaaaataagaaacaagatggagctattgagaatcgcaacaaagcaaaagcccaggatggtgcagccatggaaatgcagccattgaagagtgaagaaggtggagatggtgatgaaaaagataaaaagaaagcaaatttgccaaaaaaggaaaaatctgttttacaagggaaacttacaaaactggctgttcagattggcaaagcaggtctgttgatgtctgccatcacagttatcattctagtattatattttgtcattgacaccttctgggttcagaaaagaccatggcttgctgagtgcacaccaatttatatacaatactttgtgaagttcttcattattggagttacagttttagtggtcgcagtgccagaaggtcttccacttgcagtcacgatctcactggcttattcagtcaaaaaaatgatgaaagataataacttagtaaggcatctggatgcttgtgaaaccatgggaaatgctacagctatttgttcagataaaacaggaactttgacaatgaacagaatgacagtcgttcaagcttacataaatgaaaaacattataaaaaggttcctgaaccagaagctattccaccaaatattttgtcctatcttgtaacaggaatttctgtgaattgtgcttatacatcaaaaatattgccaccagagaaagagggtggattacctcgtcacgttggtaataaaactgaatgtgccttgttgggacttcttttggatttaaaacgggattatcaggatgttagaaatgaaataccagaagaagcactgtacaaagtctacaccttcaattctgttaggaagtccatgagtactgtcctgaaaaattcagatggaagttatcgaatattcagcaagggtgcatctgagataattctgaaaaagtgtttcaaaatcttgagtgctaatggtgaggcaaaagtattcagaccaagggaccgtgatgatattgtaaaaactgtgattgaaccgatggcatcagaaggcttgagaaccatatgtcttgcattcagagattttccagcaggagaaccagaaccagagtgggataatgaaaatgatattgtcaccggccttacatgcattgctgttgtggggattgaagatcctgtgagacctgaggtgccagatgcaattaaaaagtgtcagagggctggaattactgtgcggatggtcactggtgataatattaatactgctcgggccattgctaccaaatgtggtattttacatcctggggaagattttctgtgcctagaaggtaaagattttaacagaagaatacgaaatgaaaaaggagagattgagcaagagaggatagacaagatttggccaaaacttcgagtacttgcaagatcatctcctactgataagcatacactggttaaaggtataattgacagcactgtctcagaccaacgccaggttgtagctgtaactggtgatggtacaaatgatggcccagcactaaagaaagcagatgttggatttgcaatgggtattgctggaactgatgtagctaaagaagcatccgatattattctcacagatgacaactttacaagcattgttaaagcagttatgtggggacgaaatgtctatgacagcatctcaaaattccttcagttccaacttactgttaatgtagtagcagtgattgttgcttttacgggcgcctgcattactcaagactcaccgcttaaggctgtgcagatgctgtgggtaaacctcataatggatacactcgcttccctggctctggcaacggaaccacccactgagtctctcttgcttcggaaaccttatggtagaaataagcctctcatctcacgtacaatgatgaagaatattttgggtcatgcattctatcaacttgtagtagtctttacactcttatttgctggagaaaagttttttgacattgatagtggaagaaatgctcctttgcatgctcctccttcagaacattatactattgtttttaatacctttgtgctgatgcaacttttcaacgaaataaatgcccggaaaattcatggtgaaagaaatgtattcgaaggaatctttaacaatgccatcttctgcacaattgttttaggcacttttgtggtacagataataattgtgcagtttggtggaaaacctttcagttgttcagaactttcaatagaacagtggctatggtcaatattcctaggaatgggaacattactctggggccagcttatttcaacaattccaactagccgtttaaaattcctcaaagaagctggtcatggaacacaaaaggaagaaatacctgaggaggaattagcagaggatgttgaagagattgatcacgctgaaagggagttgcggcgtggccaaatcttgtggtttagaggtctgaacagaatccaaacacagatggatgtagtgaatgctttccagagtggaagttccattcagggggctctaaggcggcaaccctccatcgccagccagcatcatgatgtaacaaatatttctacccctacacatgtagtgttttcctcttctactgcttctactactgtggggtattcgagtggtgaatgcatttcgtagttctttatatgaagggttagaaaaaccggaatcaagaagttcgattcacaactttatgacacatcctgagtttaggatagaagattcagagcctcatatcccccttattgatgacactgatgccgaagatgatgctcctacaaaacgtaactccagtcctccaccctctcccaacaaaaataacaatgctgttgacagtggaattcaccttacaatagaaatgaacaagtctgctacctcttcatccccaggaagcccactacatagtttggaaacatcactctgattgtaagctgaatgttaacacactagctgcattgtaaagaaacaaattgaaactgggtcttttcacatattgtgatggacaagctagtattcttgtctttggacttcaacagaagacacacttgtacgaatgtagatttatttttttaaaaaaaaaaaagcaaagctttctgccagactgagggtgctttttggggggtgggagaaatgaactgacagataaacagtaactcagcgtaagtgacctgtggatcatcagtagtacccaagcatggtcctgaacagtgtattagcagagctttagtttatctcagtcctggatgggagagagagggaggagtaaaactgggcaagacaaagagccctggatcgttgaattgatagtttaatttctgctgttggctgttaataatttggattatttatgtttataaatgatacagatctgtttacaaggtttgtagatactttttttgttcctgttcatagatgggaagcttccttataactgatgcagagaaaaattagtccttcaaatactgctgtattttcaggaaaaaaaaaaaaaggggtgtttctattgaaactgtactaaatttttgcctacaatttaccttgttaaatattgtagataaattgctaatactaatagccaaatagataacactaatgctttgtttaaaaaaacgaaaaaaacaaaacaaaacaaaaaaacatgagcagtggtgttctaatgaagttatgacatctgtcctaattagtttcttaaatacatttactacttaatggttttgaagcaactgtttaatttttaaaatttttgaaaacttgctaataaccttttgttcagaatttagtagattgtttaatgcaggacatcaactacataatgaaagatgcttgaaatgcttttgttatttcaggcaaatcaaattaaatcagactatcaaactacaagagaaccttagtcttttttgtttttgtctaaacatgttagtttagtgatgtcttggtgaactgtgagtgaactgtattgatttttctaatctttagagaccttcacacagcatgagggctgttggcattttgaaaaaggttaataagtagaagcatacatgttttccttttgtttttgaaacttgtttgtaaacataaataaatatgcccttttattaaataaattcatggcaatgtttttttaaaagacatttcagcttctttactcagttctgcatatacagtgcatcagtctgttctctttgaccacaattggaatacatttcaagatggtaacagccccatgaagtaccgctttaattccttgctggtaatctaatagaatcagattaagaaaattaacacaattttaccatttgacatactcttcattgaatttagtttgtctaaaatagtctcacaggtaaaaaacataacaacaatgaccaccattgtctttgatacatttattttaattcttaagtggccaaataacagattaggtaaaatgagattacatgaaaaggttctaaaatgatatatttagatgcaataattaaccatatgctagaatgcccacctctaagccaattggattctttagctctctttttctttccttcatctaccttcttctcttttttgcctctgtctttaccctttagaaactggcatgtgttagggcccagatttcaccagatacacaatcctcaggctgacataaagtttacgaggactgctactataactgagagtgctgaccaagcaaagaaacatttagttgatggtgcttgatatttttggtgggtgggggaaatctttttctcaccatcaaatctttgcagtaatcctctgcaggtcttagaaacacattggctctgtcagcatttgtaattgtacatttattcatcaggtatttatagtgaatcatactgtaaaaaagaggtagcatgatatgctggaaagcatattagactaggagtcaagacctggtttctagtcttggttttgccattaatgtgctgcatgatcttgggaaaatcatttaccctaaataagggtggtggactatcttgaagaaccctttcaactctaaaaattgaccctatcaactggagagcccacaaggcatagggaatagagaaaagggaaatgttttcagttttcttttttattttggttatgcttaaatatgaatgtaattaccaaaagatttagaagtgcatgtgctttggaggatttgtattgagcttttacagtattcatttttcaactcaaggcaatggctttctacaccaactctaatccataaacgggtcttatgacatctatgaagtagtagcaagacatgcttagtgtgtatttctctctttgagacactgtaatttctaccagaaatttccagagcattatgtaggtagaaaaaaatgcaagcaagctgttaaagatcttggatcccattatatagtatgtatagctgaaatctgtaattcaatcactttttctcttttatcctctaaccaaaaaattgtttaattttgcatcccaaatgtttttaatctttgtatattttttaaaaatccttttctcctcatcattgccttttttgtggttgtaaatagacttacttgcactttgaagatgagttactccttgtcatcttacaaatatgtgatatggtaattttcataacagatgtcagttttgaaccaagaattggtgatttgtttataagaaaaaaactggcttcatttctgtgaaattgctctttgaaaatttctttttacacgtgtaagccaactgagataccgtgatggtgttgatttctttcaatgatgcttaccatctattttagccactgagccttttattatttgtctatttgtaaagtttatttgtcttaactcatttaataaatatactgtttatctgtttctgaaaaaaaaaaaaaaaaaaa

SEQ ID NO: 605 - DNA, 4605 bp, Homo Sapiens
  NM_001001391
gagaagaaagccagtgcgtctctgggcgcaggggccagtggggctcggaggcacaggcaccccgcgacactccaggttccccgacccacgtccctggcagccccgattatttacagcctcagcagagcacggggcgggggcagaggggcccgcccgggagggctgctacttcttaaaacctctgcgggctgcttagtcacagccccccttgcttgggtgtgtccttcgctcgctccctccctccgtcttaggtcactgttttcaacctcgaataaaaactgcagccaacttccgaggcagcctcattgcccagcggaccccagcctctgccaggttcggtccgccatcctcgtcccgtcctccgccggcccctgccccgcgcccagggatcctccagctcctttcgcccgcgccctccgttcgctccggacaccatggacaagttttggtggcacgcagcctggggactctgcctcgtgccgctgagcctggcgcagatcgatttgaatataacctgccgctttgcaggtgtattccacgtggagaaaaatggtcgctacagcatctctcggacggaggccgctgacctctgcaaggctttcaatagcaccttgcccacaatggcccagatggagaaagctctgagcatcggatttgagacctgcaggtatgggttcatagaagggcacgtggtgattccccggatccaccccaactccatctgtgcagcaaacaacacaggggtgtacatcctcacatccaacacctcccagtatgacacatattgcttcaatgcttcagctccacctgaagaagattgtacatcagtcacagacctgcccaatgcctttgatggaccaattaccataactattgttaaccgtgatggcacccgctatgtccagaaaggagaatacagaacgaatcctgaagacatctaccccagcaaccctactgatgatgacgtgagcagcggctcctccagtgaaaggagcagcacttcaggaggttacatcttttacaccttttctactgtacaccccatcccagacgaagacagtccctggatcaccgacagcacagacagaatccctgctaccagagaccaagacacattccaccccagtggggggtcccataccactcatggatctgaatcagatggacactcacatgggagtcaagaaggtggagcaaacacaacctctggtcctataaggacaccccaaattccagaatggctgatcatcttggcatccctcttggccttggctttgattcttgcagtttgcattgcagtcaacagtcgaagaaggtgtgggcagaagaaaaagctagtgatcaacagtggcaatggagctgtggaggacagaaagccaagtggactcaacggagaggccagcaagtctcaggaaatggtgcatttggtgaacaaggagtcgtcagaaactccagaccagtttatgacagctgatgagacaaggaacctgcagaatgtggacatgaagattggggtgtaacacctacaccattatcttggaaagaaacaaccgttggaaacataaccattacagggagctgggacacttaacagatgcaatgtgctactgattgtttcattgcgaatcttttttagcataaaattttctactctttttgttttttgtgttttgttctttaaagtcaggtccaatttgtaaaaacagcattgctttctgaaattagggcccaattaataatcagcaagaatttgatcgttccagttcccacttggaggcctttcatccctcgggtgtgctatggatggcttctaacaaaaactacacatatgtattcctgatcgccaacctttcccccaccagctaaggacatttcccagggttaatagggcctggtccctgggaggaaatttgaatgggtccattttgcccttccatagcctaatccctgggcattgctttccactgaggttgggggttggggtgtactagttacacatcttcaacagaccccctctagaaatttttcagatgcttctgggagacacccaaagggtgaagctatttatctgtagtaaactatttatctgtgtttttgaaatattaaaccctggatcagtcctttgatcagtataattttttaaagttactttgtcagaggcacaaaagggtttaaactgattcataataaatatctgtacttcttcgatcttcaccttttgtgctgtgattcttcagtttctaaaccagcactgtctgggtccctacaatgtatcaggaagagctgagaatggtaaggagactcttctaagtcttcatctcagagaccctgagttcccactcagacccactcagccaaatctcatggaagaccaaggagggcagcactgtttttgttttttgttttttgttttttttttttgacactgtccaaaggttttccatcctgtcctggaatcagagttggaagctgaggagcttcagcctcttttatggtttaatggccacctgttctctcctgtgaaaggctttgcaaagtcacattaagtttgcatgacctgttatccctggggccctatttcatagaggctggccctattagtgatttccaaaaacaatatggaagtgccttttgatgtcttacaataagagaagaagccaatggaaatgaaagagattggcaaaggggaaggatgatgccatgtagatcctgtttgacatttttatggctgtatttgtaaacttaaacacaccagtgtctgttcttgatgcagttgctatttaggatgagttaagtgcctggggagtccctcaaaaggttaaagggattcccatcattggaatcttatcaccagataggcaagtttatgaccaaacaagagagtactggctttatcctctaacctcatattttctcccacttggcaagtcctttgtggcatttattcatcagtcagggtgtccgattggtcctagaacttccaaaggctgcttgtcatagaagccattgcatctataaagcaacggctcctgttaaatggtatctcctttctgaggctcctactaaaagtcatttgttacctaaacttatgtgcttaacaggcaatgcttctcagaccacaaagcagaaagaagaagaaaagctcctgactaaatcagggctgggcttagacagagttgatctgtagaatatctttaaaggagagatgtcaactttctgcactattcccagcctctgctcctccctgtctaccctctcccctccctctctccctccacttcaccccacaatcttgaaaaacttcctttctcttctgtgaacatcattggccagatccattttcagtggtctggatttctttttattttcttttcaacttgaaagaaactggacattaggccactatgtgttgttactgccactagtgttcaagtgcctcttgttttcccagagatttcctgggtctgccagaggcccagacaggctcactcaagctctttaactgaaaagcaacaagccactccaggacaaggttcaaaatggttacaacagcctctacctgtcgccccagggagaaaggggtagtgatacaagtctcatagccagagatggttttccactccttctagatattcccaaaaagaggctgagacaggaggttattttcaattttattttggaattaaatacttttttccctttattactgttgtagtccctcacttggatatacctctgttttcacgatagaaataagggaggtctagagcttctattccttggccattgtcaacggagagctggccaagtcttcacaaacccttgcaacattgcctgaagtttatggaataagatgtattctcactcccttgatctcaagggcgtaactctggaagcacagcttgactacacgtcatttttaccaatgattttcaggtgacctgggctaagtcatttaaactgggtctttataaaagtaaaaggccaacatttaattattttgcaaagcaacctaagagctaaagatgtaatttttcttgcaattgtaaatcttttgtgtctcctgaagacttcccttaaaattagctctgagtgaaaaatcaaaagagacaaaagacatcttcgaatccatatttcaagcctggtagaattggcttttctagcagaacctttccaaaagttttatattgagattcataacaacaccaagaattgattttgtagccaacattcattcaatactgttatatcagaggagtaggagagaggaaacatttgacttatctggaaaagcaaaatgtacttaagaataagaataacatggtccattcacctttatgttatagatatgtctttgtgtaaatcatttgttttgagttttcaaagaatagcccattgttcattcttgtgctgtacaatgaccactgttattgttactttgacttttcagagcacacccttcctctggtttttgtatatttattgatggatcaataataatgaggaaagcatgatatgtatattgctgagttgaaagcacttattggaaaatattaaaaggctaacattaaaagactaaaggaaacagaaaaaaaaaaaaaaaaa

SEQ ID NO: 606 - DNA, 3985 bp, Homo Sapiens
  NM_001001392
gagaagaaagccagtgcgtctctgggcgcaggggccagtggggctcggaggcacaggcaccccgcgacactccaggttccccgacccacgtccctggcagccccgattatttacagcctcagcagagcacggggcgggggcagaggggcccgcccgggagggctgctacttcttaaaacctctgcgggctgcttagtcacagccccccttgcttgggtgtgtccttcgctcgctccctccctccgtcttaggtcactgttttcaacctcgaataaaaactgcagccaacttccgaggcagcctcattgcccagcggaccccagcctctgccaggttcggtccgccatcctcgtcccgtcctccgccggcccctgccccgcgcccagggatcctccagctcctttcgcccgcgccctccgttcgctccggacaccatggacaagttttggtggcacgcagcctggggactctgcctcgtgccgctgagcctggcgcagatcgatttgaatataacctgccgctttgcaggtgtattccacgtggagaaaaatggtcgctacagcatctctcggacggaggccgctgacctctgcaaggctttcaatagcaccttgcccacaatggcccagatggagaaagctctgagcatcggatttgagacctgcagtttgcattgcagtcaacagtcgaagaaggtgtgggcagaagaaaaagctagtgatcaacagtggcaatggagctgtggaggacagaaagccaagtggactcaacggagaggccagcaagtctcaggaaatggtgcatttggtgaacaaggagtcgtcagaaactccagaccagtttatgacagctgatgagacaaggaacctgcagaatgtggacatgaagattggggtgtaacacctacaccattatcttggaaagaaacaaccgttggaaacataaccattacagggagctgggacacttaacagatgcaatgtgctactgattgtttcattgcgaatcttttttagcataaaattttctactctttttgttttttgtgttttgttctttaaagtcaggtccaatttgtaaaaacagcattgctttctgaaattagggcccaattaataatcagcaagaatttgatcgttccagttcccacttggaggcctttcatccctcgggtgtgctatggatggcttctaacaaaaactacacatatgtattcctgatcgccaacctttcccccaccagctaaggacatttcccagggttaatagggcctggtccctgggaggaaatttgaatgggtccattttgcccttccatagcctaatccctgggcattgctttccactgaggttgggggttggggtgtactagttacacatcttcaacagaccccctctagaaatttttcagatgcttctgggagacacccaaagggtgaagctatttatctgtagtaaactatttatctgtgtttttgaaatattaaaccctggatcagtcctttgatcagtataattttttaaagttactttgtcagaggcacaaaagggtttaaactgattcataataaatatctgtacttcttcgatcttcaccttttgtgctgtgattcttcagtttctaaaccagcactgtctgggtccctacaatgtatcaggaagagctgagaatggtaaggagactcttctaagtcttcatctcagagaccctgagttcccactcagacccactcagccaaatctcatggaagaccaaggagggcagcactgtttttgttttttgttttttgttttttttttttgacactgtccaaaggttttccatcctgtcctggaatcagagttggaagctgaggagcttcagcctcttttatggtttaatggccacctgttctctcctgtgaaaggctttgcaaagtcacattaagtttgcatgacctgttatccctggggccctatttcatagaggctggccctattagtgatttccaaaaacaatatggaagtgccttttgatgtcttacaataagagaagaagccaatggaaatgaaagagattggcaaaggggaaggatgatgccatgtagatcctgtttgacatttttatggctgtatttgtaaacttaaacacaccagtgtctgttcttgatgcagttgctatttaggatgagttaagtgcctggggagtccctcaaaaggttaaagggattcccatcattggaatcttatcaccagataggcaagtttatgaccaaacaagagagtactggctttatcctctaacctcatattttctcccacttggcaagtcctttgtggcatttattcatcagtcagggtgtccgattggtcctagaacttccaaaggctgcttgtcatagaagccattgcatctataaagcaacggctcctgttaaatggtatctcctttctgaggctcctactaaaagtcatttgttacctaaacttatgtgcttaacaggcaatgcttctcagaccacaaagcagaaagaagaagaaaagctcctgactaaatcagggctgggcttagacagagttgatctgtagaatatctttaaaggagagatgtcaactttctgcactattcccagcctctgctcctccctgtctaccctctcccctccctctctccctccacttcaccccacaatcttgaaaaacttcctttctcttctgtgaacatcattggccagatccattttcagtggtctggatttctttttattttcttttcaacttgaaagaaactggacattaggccactatgtgttgttactgccactagtgttcaagtgcctcttgttttcccagagatttcctgggtctgccagaggcccagacaggctcactcaagctctttaactgaaaagcaacaagccactccaggacaaggttcaaaatggttacaacagcctctacctgtcgccccagggagaaaggggtagtgatacaagtctcatagccagagatggttttccactccttctagatattcccaaaaagaggctgagacaggaggttattttcaattttattttggaattaaatacttttttccctttattactgttgtagtccctcacttggatatacctctgttttcacgatagaaataagggaggtctagagcttctattccttggccattgtcaacggagagctggccaagtcttcacaaacccttgcaacattgcctgaagtttatggaataagatgtattctcactcccttgatctcaagggcgtaactctggaagcacagcttgactacacgtcatttttaccaatgattttcaggtgacctgggctaagtcatttaaactgggtctttataaaagtaaaaggccaacatttaattattttgcaaagcaacctaagagctaaagatgtaatttttcttgcaattgtaaatcttttgtgtctcctgaagacttcccttaaaattagctctgagtgaaaaatcaaaagagacaaaagacatcttcgaatccatatttcaagcctggtagaattggcttttctagcagaacctttccaaaagttttatattgagattcataacaacaccaagaattgattttgtagccaacattcattcaatactgttatatcagaggagtaggagagaggaaacatttgacttatctggaaaagcaaaatgtacttaagaataagaataacatggtccattcacctttatgttatagatatgtctttgtgtaaatcatttgttttgagttttcaaagaatagcccattgttcattcttgtgctgtacaatgaccactgttattgttactttgacttttcagagcacacccttcctctggtttttgtatatttattgatggatcaataataatgaggaaagcatgatatgtatattgctgagttgaaagcacttattggaaaatattaaaaggctaacattaaaagactaaaggaaacagaaaaaaaaaaaaaaaaa

SEQ ID NO: 607 - DNA, 674 bp, Homo Sapiens
  NM_001001435
acaggacacagctaggttctgaagcttctgagttctgcagcctcacctctgagaaaacctctttgccaccaataccatgaagctctgcgtgactgtcctgtctctcctcgtgctagtagctgccttctgctctctagcactctcagcaccaatgggctcagaccctcccaccgcctgctgcttttcttacaccgcgaggaagcttcctcgcaactttgtggtagattactatgagaccagcagcctctgctcccagccagctgtggtattccaaaccaaaagaggcaagcaagtctgcgctgaccccagtgagtcctgggtccaggagtacgtgtatgacctggaactgaactgagctgctcagagacaggaagtcttcagggaaggtcacctgagcctggatgcttctccatgagccgcatctcctccatactcaggactcctctccgcagttcctgtctcttctcttaatgtaatctcttttatgtgctgtattattgtattaggtgttatttccattatttatattagtttagccaaaggataagtgtcccctatggggatggtccactctcactctttctctgctgttgcaaatacatggataacaccgttaattccatgtgttttcataataaaactttaaaataaaatgcaaaaaaaaaaaaaaaaaa

SEQ ID NO: 608 - DNA, 2302 bp, Homo Sapiens
  NM_001001483
gggcgccagcaggaagtgggagaagaggcgacccaaggcgggctggcgggctggcggcagtcgctacttgcctagtagcctcagccgctgtgggctcctggggagatggaggggccggggctgggctcgcagatacggaatttttgaacgatgtaaagagttggtagaagcaggatatgatgtcaggcaaccagataaagaaaatgtgtcgcttcttcattgggctgctattaacaacagactggatcttgtaaagttttatatttcaaaaggtgctgttgtagatcagttgggtggagatttaaattcaactcctcttcactgggccatccgacaaggacatttacctatggtcatattattactccagcatggtgcagaccccactcttattgatggagagggattcagcagcatccacctggcagtattgtttcaacacatgcctattatagcatatctcatctcaaagggacagagtgtgaatatgacagatgtaaatgggcagacacctctcatgttatcagctcacaaagtaattgggccagaaccaactggatttcttttaaagtttaatccttctctcaatgtggttgataaaatacaccaaaacactccacttcactgggcagttgcagcaggaaatgttaatgcagttgataagcttttggaagctggttctagcctggatatccagaatgttaagggagaaacacctcttgatatggctctacaaaacaaaaatcagctcattattcatatgctaaaaacagaagccaaaatgagagccaaccaaaagttcagactttggaggtggctgcagaaatgcgagctcttcctgctgctgatgctttctgtgattaccatgtgggctattggatacatattggacttcaattcagattcttggcttttaaaaggatgtcttctagtaacactgttttttctgacatctttgtttccaaggttcttggttgggtataagaaccttgtatacttaccaacagcctttctgctaagttctgttttttggatatttatgacttggttcatcttattttttcctgatttagcaggagcccctttctatttcagtttcattttcagcatagtagcctttctatactttttctataagacttgggcaactgatccaggcttcactaaggcttctgaagaagaaaagaaagtgaatatcatcacccttgcagaaactggctctctggacttcagaacattttgtacatcatgtcttataaggaagccattaaggtcactccactgccatgtatgcaactgctgtgtggctcgatatgatcaacactgcctgtggactggacggtgcataggttttggcaaccatcactattacatattcttcttgtttttcctttccatggtatgtggctggattatatatggatctttcatctatttgtccagtcattgtgccacaacattcaaagaagatggattatggacttacctcaatcagattgtggcctgttccccttgggttttatatatcttgatgctagcaactttccatttctcatggtcaacatttttattattaaatcaactctttcagattgcctttctgggcctgacctcccatgagagaatcagcctgcagaagcagagcaagcatatgaaacagacgttgtccctcaggaagacaccatacaatcttggattcatgcagaacctggcagatttctttcagtgtggctgctttggcttggtgaagccctgtgtggtagattggacatcacagtacaccatggtctttcacccagccagggagaaggttcttcgctcagtatgaagaaaagcaacccaaaactctcaatctgatttgtttttgtttatgtcgatgccctgtagtttgaaagtgaagtaaagatttagaattcacctaagtccaaaggaaaacacgtggtttttaaagccattaggtaaaaaaagttctcaataaaggcattacaattttttaggtttagaaagatggacttttctgataaatcttggcagacatctaaaaaaaaaaccatatttttcacaagaaaatgcaagttactttttttggaaataatactcactgattatggataaaatggaatattttcagatactatattggctgtttcaaaatagtactattctttaaacttgtaatttttgctaagttatttgtctttgttgtatctataaatatgtaaaaaatatttaaatagatgtacctgttttgctttcacacttaataaaaaatttttttttgtagttgaaaaaaaaaaaaaaa

SEQ ID NO: 609 - DNA, 3054 bp, Homo Sapiens
  NM_001001523
agagagctaggtgcagagcttcaggctgaggcgctgctgagagggcctcgccccgcctctgccgccagctgcaccccactcctggaccaccccctgctgagaaggacagggagccaaggccggcagagccaaggctcagtcatgagaacacaaattgaagtgatcccttgcaaaatctgtggggacaagtcgtctgggatccactacggggttatcacctgtgaggggtgcaagggcttcttccgccggagccagcgctgtaacgcggcctactcctgcacccgtcagcagaactgccccatcgaccgcaccagccgaaaccgatgccagcactgccgcctgcagaaatgcctggcgctgggcatgtcccgagatgctgtcaagttcggccgcatgtccaagaagcagagggacagcctgcatgcagaagtgcagaaacagctgcagcagcggcaacagcagcaacaggaaccagtggtcaagacccctccagcaggggcccaaggagcagataccctcacctacaccttggggctcccagacgggcagctgcccctgggctcctcgcctgacctgcctgaggcttctgcctgtccccctggcctcctgaaagcctcaggctctgggccctcatattccaacaacttggccaaggcagggctcaatggggcctcatgccaccttgaatacagccctgagcggggcaaggctgagggcagagagagcttctatagcacaggcagccagctgacccctgaccgatgtggacttcgttttgaggaacacaggcatcctgggcttggggaactgggacagggcccagacagctacggcagccccagtttccgcagcacaccggaggcaccctatgcctccctgacagagatagagcacctggtgcagagcgtctgcaagtcctacagggagacatgccagctgcggctggaggacctgctgcggcagcgctccaacatcttctcccgggaggaagtgactggctaccagaggaagtccatgtgggagatgtgggaacggtgtgcccaccacctcaccgaggccattcagtacgtggtggagttcgccaagaggctctcaggctttatggagctctgccagaatgaccagattgtgcttctcaaagcaggagcaatggaagtggtgctggttaggatgtgccgggcctacaatgctgacaaccgcacggtcttttttgaaggcaaatacggtggcatggagctgttccgagccttgggctgcagcgagctcatcagctccatctttgacttctcccactccctaagtgccttgcacttttccgaggatgagattgccctctacacagcccttgttctcatcaatgcccatcggccagggctccaagagaaaaggaaagtagaacagctgcagtacaatctggagctggcctttcatcatcatctctgcaagactcatcgccaaagcatcctggcaaagctgccacccaaggggaagcttcggagcctgtgtagccagcatgtggaaaggctgcagatcttccagcacctccaccccatcgtggtccaagccgctttccctccactctacaaggagctcttcagcactgaaaccgagtcacctgtggggctgtccaagtgacctggaagagggactccttgcctctccctatggcctgctggcccacctccctggaccccgttccaccctcacccttttcctttcccatgaaccctggagggtggtccccaccagctctttggaagtgagcagatgctgcggctggctttctgtcagcaggccggcctggcagtgggacaatcgccagagggtggggctggcagaacaccatctccagcctcagctttgacctgtctcatttcccatattccttcacacccagcttctggaaggcatggggtggctgggatttaaggacttctgggggaccaagacatcctcaagaaaacaggggcatccagggctccctggatgaatagaatgcaattcattcagaagctcagaagctaagaataagcctttgaaatacctcattgcatttccctttgggcttcggcttggggagatggatcaagctcagagactggcagtgagagcccagaaggacctgtataaaatgaatctggagctttacattttctgcctctgccttcctcccagctcagcaaggaagtatttgggcaccctaccctttacctggggtctaaccaaaaatggatgggatgaggatgagaggctggagataattgttttatgggatttgggtgtgggactagggtacaatgaaggccaagagcatctcagacatagagttaaaactcaaacctcttatgtgcactttaaagatagactttaggggctggcacaaatctgatcagagacacatatccatacacaggtgaaacacatacagactcaacagcaatcatgcagttccagagacacatgaacctgacacaatctctcttatccttgaggccacagcttggaggagcctagaggcctcaggggaaagtcccaatcctgagggaccctcccaaacatttccatggtgctccagtccactgatcttgggtctggggtgatccaaataccaccccagctccagctgtcttctaccactagaagacccaagagaagcagaagtcgctcgcactggtcagtcggaaggcaagatcagatcctggaggactttcctggcctgcccgccagccctgctcttgttgtggagaaggaagcagatgtgatcacatcaccccgtcattgggcaccgctgactccagcatggaggacaccagggagcagggcctgggcctgtttccccagctgtgatcttgcccagaacctctcttggcttcataaacagctgtgaaccctcccctgagggattaacagcaatgatgggcagtcgtggagttgggggggttgggggtgggattgtgtcctctaaggggacgggttcatctgagtaaacataaaccccaacttgtgccattctttataaaatgattttaaaggcaaaaaaaaaaaaaaaaaaaa

SEQ ID NO: 610 - DNA, 977 bp, Homo Sapiens
  NM_001001551
taggccggggccggcggggcccggaaggcgacgggaaggagccgagcttgggttatggcggcgccgggcgcgctgctggtgatgggcgtgagcggctcggggaaatccaccgtgggcgccctgctggcatctgagctgggatggaaattctatgatgctgatgattatcacccggaggaaaatcgaaggaagatgggaaaaggcataccgctcaatgaccaggaccggattccatggctctgtaacttgcatgacattttactaagagatgtagcctcgggacagcgtgtggttctagcctgttcagccctgaagaaaacgtacagagacatattaacacaaggaaaagatggtgtagctctgaagtgtgaggagtcgggaaaggaagcaaagcaggctgagatgcagctcctggtggtccatctgagcgggtcgtttgaggtcatctctggacgcttactcaaaagagagggacattttatgccccctgaattattgcagtcccagtttgagactctggagcccccagcagctccagaaaactttatccaaataagtgtggacaaaaatgtttcagagataattgctacaattatggaaaccctaaaaatgaaatgacaatgattttgtatcagtggtccaaacagaactaagcataaatcattgtgccatcccaaacctcgttccagccgccttgcccatactagattctaaatgtttctaaaggcaaaccccaatgtgtcaagacagacttgtttaggtgtaattttaggaattatgctggttcatcaggaagcagagggggagttttaaaagtcaagcttaaattgaagtttaaattcatctataaccaaatcaaatgatcagaggaaattctgtaatcaatgctggaaatcgttacattgtttagaacattcttgctcatgcctgtatttgcacaaataaatgaaacttcgctgtccttggcaaaaaaaaaa

SEQ ID NO: 611 - DNA, 5040 bp, Homo Sapiens
  NM_001001555
ggggaggtcgggaggaggcagagagggaagcgagctgcggccgggcgggctcggcgctcggagacccggtggagcccaaagtttccgcgcagcccctgggtggcggcagcgccggcggcgcggggcgcccgggacagtcttgagcgccggcctcgccccgcggggacccgcgcccgccgccggccacgccgagtgtcgcccgcagccacgcggaggcggcggggagccgcgcgcggcagctttggcgctgaccacaatgctgagcaggaagcagcagctgcaggcccagtgactggtagctcagtgaccagcagcccagtgaccggcagccaggtcctcacctgggtcctctcagtgaagccagggtggccgccccagcagacagtgctacagagccaactcctgacaggacaaggtggagcagacacctcgcagtcaacaagacccggcaggaccaggactccccgcacagtctgaccgacttgcgaatcaccaggaggatgatgtggacctggaagccctggtgaacgatatgaatgcatccctggagagcctgtactcggcctgcagcatgcagtcagacacggtgcccctcctgcagaatggccagcatgcccgcagccagcctcgggcttcaggccctcctcggtccatccagccacaggtgtccccgaggcagagggtgcagcgctcccagcctgtgcacatcctcgctgtcaggcgccttcaggaggaagaccagcagtttagaacctcatctctgccggccatccccaatccttttcctgaactctgtggccctgggagcccccctgtgctcacgccgggttctttacctccgagccaggccgccgcaaagcaggatgttaaagtctttagtgaagatgggacaagcaaagtggtggagattctagcagacatgacagccagagacctgtgccaattgctggtttacaaaagtcactgtgtggatgacaacagctggacactagtggagcaccacccgcacctaggattagagaggtgcttggaagaccatgagctggtggtccaggtggagagtaccatggccagtgagagtaaatttctattcaggaagaattacgcaaaatacgagttctttaaaaatcccatgaatttcttcccagaacagatggttacttggtgccagcagtcaaatggcagtcaaacccagcttttgcagaattttctgaactccagtagttgtcctgaaattcaagggtttttgcatgtgaaagagctgggaaagaaatcatggaaaaagctgtatgtgtgtttgcggagatctggcctttattgctccaccaagggaacttcaaaggaacccagacacctgcagctgctggccgacctggaggacagcaacatcttctccctgatcgctggcaggaagcagtacaacgcccctacagaccacgggctctgcataaagccaaacaaagtcaggaatgaaactaaagagctgaggttgctctgtgcagaggacgagcaaaccaggacgtgctggatgacagcgttcagactcctcaagtatggaatgctcctttaccagaattaccgaatccctcagcagaggaaggccttgctgtccccgttctcgacgccagtgcgcagtgtctccgagaactccctcgtggcaatggatttttctgggcaaacaggacgcgtgatagagaatccggcggaggcccagagcgcagccctggaggagggccacgcctggaggaagcgaagcacacggatgaacatcctaggtagccaaagtcccctccacccttctaccctaagtacagtgattcacaggacacagcactggtttcacgggaggatctccagggaggaatcccacaggatcattaaacagcaagggctcgtggatgggctttttctcctccgtgacagccagagtaatccaaaggcatttgtactcacactgtgtcatcaccagaaaattaaaaatttccagatcttaccttgcgaggacgacgggcagacgttcttcagcctagatgacgggaacaccaaattctctgacctgatccagctggttgacttttaccagctgaacaaaggagtcctgccttgcaaactcaagcaccactgcatccgagtggccttatgaccgcagatgtcctctcggctgaagactggaggaagtgaacactggagtgaagaagcggtctgtgcgttggtgaagaacacacatcgattctgcacctggggacccagagcgagatgggtttgttcggtgccagccgaccaagattgactagtttgttggacttaaacgacgatttgctgctgtgaacccagcagggtcgcctccctctgcgtcggccaaattggggagggcatggaagatccagcggaaagttgaaaataaactggaatgatcatcttggcttgggccgcttaggaacaagaaccggagagaagtgattggaaatgaactcttgccctggaataatcttgacaattaaaactgatatgtttactttttttgtattgatcacttttttgcactccttctttgttttcaatattgtattcagcctattgtaggagggggatgtggcgtttcaactcatataatacagaaagagttttgaatgggcagatttcaaactgaatatgggtccccaaatgttcccagagggtcctccacaccctctgccgactaccacggtgtggattcagctcccaaatgacaaacccagcccttcccagtatacttgaaaagctttcttgttaaaataaaaggtgtcactgtggtaggcatttggcatattttgtggactcagtcaagcaaccacagtctgttaatcatttctctatgctcagatgtcagatcctcttgttattagtgtgtcttgttctgcacagtgcaggagactttattcctttggaaaattcactgttccacaaacagcaggctgaatggcctcgcctctagattgacgtgggccagcctccttgagacacacctggcacccgtcatcggccagcggtggatgctgcataatccacctgggtacttcagccttgcgtttccacagccttcagcctgttctagaacgatcactgccttacccctgctgctgcagtggtgtgagtcgtttcacggctgatgtccctcgggggattaaaggatctaaagagaaaatggcacctggttgtcttcgtgctgtgtctcatgggtttccatagtgataaagacaaggaaacgctgcaggggccacaggcacaggctgatatttaaagatctttgcttgcagccctccgtcctgctgaaaacccccataagccagtgaacacagagcagctagaggctcctcctctgctggcttagggtcagaagtacctcacagtggttgtggacatggaagagttttgtcaacacaacactttgtccccgctccgggagatgagtcagatggtggcttgagttgtcacttggtcccctccgcccctcgggtggccccctttgccacgtccccttagcttagtgatcaggtgtgagagtggccatttccttacctttgatccctgtaaagcagaaaggactcctttgacaggcgacaaactactgtggtgagcagaatgatttcctttttcaagacaacacctgcctggcttctattaatgtgtgctggccatgatattgccccaaatccgccccactgaagtgttccctaaggaacagcatttctctgctcctcagtcaacccccgtagcctagagcagtgtcacaagcttcagtaaggccagtcagctggaagtcagtctaccgtatagtaacactgtatttcagtctacagaccacactctagttgttttccatgaaaggtatacaaatgaagaattttctagcaaaacatgtttttaaccatcagtgctcaattgcattttcttcctttcgcagccagtcagtctttcaaactattgacagtaagataattctcacgttcacacctggtggcaggcttcactgtagggacggacattgcagttacaccacgattccttcctcttcactggctcgaggtaaacccttttcaaggaaaaacaactctaggatttcttttttctgtgtacgtagaccagtcccatcagtgtataatctctctctcacacgcctctctccaatagacagcttgtatttgcagtatttcatatttataaatatgcgtttatttaaaaggagaacaaaagcttgactctgattcacagttttgtatgtagctggtttgacgtagtcttttgtattttccctgccgaagtgaattgttggagaatgtaaaccgcctccacgtggcggcagacttcctaaggccccagctcgctggcctcgcgctgggcggctgggaattccacctgagaacaagtcccgcaaaccggggacggaaggacatttgacttttatttttgtatttaattgacatgaatgtaaaggggacagctcagggttgttttggagcctgttgactttgtatctctgcctgtgattttcttttctaaatgaaactccatgtagcaaccaggacgaagttgagaaggaaaacgccaaatgctttggttattagagtttaataggtaagctctgttacactaggtgttagagttccagaatgttcttttgtttgctaaaccttgaagaaacatgtgcctcagcctagatgttttgtcttctcttttctgcacttaatacctgacagtatgaccgatctctgcgcctttctgggggcgggcaagctggcggtagatttgtgatgtcacagtgcaaactgcagtgactgtaaattggcctggcgtgtataaacgttttcagggaatgcagaaggtattaatgaagagacaaaacctttattccatgtgctttgcttcattctgtacatagctctttggctcgtgaacctaattgtaaactttcaggtatttttgtacaaataagggactgatgttctgtttcttgtaattagaaataaacattaatacagtgttcttcattttcaaaaaaaa

SEQ ID NO: 612 - DNA, 3208 bp, Homo Sapiens
  NM_001001556
ggttggtgccttagcaactaaagctggcaactgggacatcgtccggtgctgcaggtctcagccgaagggcgtcggaaactgcgctcgcatcgagcagtttccagcctcctgggtaaaggagcagtctcctcccttgcttgggactctggacgcatctcattccggtgaaagtaagggacagcttaggaccagaagcctttcgcggagaaaaggctgacatgcccgtcctatatgacaggttactgaagctaaaggagatgtttaactccaagtttggatctattcccaagttttatgttcgagcaccaggaagagtcaacataataggagagcatatagattattgtggatattctgttcttcctatggctgtagaacaagatgtgctaatagctgtagaacctgtgaaaacgtacgctctccaactggccaatacaaatcccttgtatccggacttcagtactagtgctaataacatccagattgataaaaccaagcctttgtggcacaactatttcttatgtggacttaaaggaattcaggaacactttggtcttagtaacctgactggaatgaactgcctggtagatggaaatatcccaccaagttctggcctctccagctccagtgctttggtctgttgtgctggcttggtgacgctcacagtgctgggaaggaatctatccaaggtggaacttgcagaaatctgtgccaagagtgagcgttacattggcactgaaggaggaggcatggaccagtctatatcatttcttgcagaagaaggaactgccaagttgatagaatttagtcctctgagggcaaccgatgtaaaactcccaagtggagcagtgtttgtgattgccaacagttgtgtggagatgaataaggcagcaacttcccatttcaatatcagggtgatggagtgtcggctggctgcgaagctcctggctaaatacaaaagcttgcaatgggacaaagtactgaggctggaggaggtgcaggctaaactagggattagtctagaagaaatgctgttggtcacagaagatgcccttcatcctgaaccctataaccctgaggagatctgcaggtgtctgggaattagcctggaggaactccgaacccaaatcctgagtccaaacactcaagatgtgctcatcttcaaactctatcagcgggcaaagcatgtgtacagcgaggctgcgcgagtgctccagtttaagaagatatgtgaagaagcacctgaaaacatggtccagctgctgggagagttgatgaaccagagccacatgagctgccgggacatgtatgagtgcagctgccccgagctggatcagctggtggacatctgtcggaagtttggggctcaagggtcacgacttactggagcaggatggggaggctgcacagtatcaatggtacctgcggacaagctgcccagctttctagcaaatgtgcacaaagcttattaccagaggagtgatggaagcttagcaccggagaagcaaagtttgtttgctaccaaacctggaggtggggctttggttttgcttgaggcctgaaaaaatgtaaaaagtctgagagaaactacttagggcacttaggaattggcaggactttctgtgccacagtaaattaatcttccttctgttttgtattatgatgaacggttgctattatatcaagatatattttcaaagaaatggttgaaagctctctatgcttcataatgattctttttccatcttaaaatatggttttactattaagagccaagatcatgcttggacagatcttttaagaataacttactgagatttattgatttgaagattttaaagatgaatggtaaaacacactcttaatactgattacatggattggacttgaattaaatatattgttacaattaaactgataccactgaattgtatgcattattcttgaatagagttcatttctggtttctcttagtattcttcttcctcaaagttgtagttgtctgttgatgatggtgatgatgatgatgatgacgatagtgatgccacacattctctctcaatttcagcttcggaacgctatgaaaataatacatgattaaagtttcacagatcttcttggacattgtataattgaatttgaatgtgagatttctccagttatcaagagactaaggatttttttttttttttgacaaaaggaggatacaggaagaaaattcagactcatttgaatatttgtaaaccatgtaatatataaataaccactttcaattcttttggccctgagctatctccattacttaatagaaaaacttagataaaaaacactttaagactcttctattcacattgaaataaagaattatctagatgataattcagataattcagtttgttcatagaattactttcttatcactctttttctactactttttctcaaatacctctctaatccaagaggcacttccaagaaattccacacattccttatatcccttttttgcttgtctagcaaagcttgtttgtatatatgcaccccattgtaaagcaggtatgcaggtatgtgggtgaaagtgactatgaaaagacttaatgaattctgggatttgtaatggtattgatgggtatctctgtatgtatatcaagagtgggcagaaatgtttggctggtgatggcaaatgactggctttctcttgtggatggactataggaagcactttctgaattatgtaatgatttggaccaaaaagtattttgctgaaatactcaggtaattgagatagcaatggttttatggcatgaattatccaaaaaaatatcagaattacttattattctgtgatttcattagctcattaatgtttaactcacagattgggcatcaccatctagaatttcagtttaagggaggcctgcgcaaagctagttttatttcttaaaggataacagtcatacatagaatactaggaaagccaatattctatttaaaaataaacttctgatgcattttcattcttagcagaaaggtaaatgcttgagaaagcttgagtcaaatttgttaaaagaattttgagttctataaatccaaaaatctgaaacctgaatttatttaaatttataatcctttattttttaataccgtgccattttccacaaaggatttgtggttggtatataattctttaaagatacctggatcagtg

SEQ ID NO: 613 - DNA, 2924 bp, Homo Sapiens
  NM_001001560
ggaagtggcctcagagcccctcagcaacatgcccgcagagaattcttccggaggcggtcacagacatctccgtgacgcagaacgagttagagcgtcccttggggtttccatggtgctgcccttagcctgcagtatctccacttcctctcccgcctgagcgccgggaacggaaaagcaggcggccggtcccagctgcgacgtagacgccgcgtgggggtggggttgggcgagtaggtgacgctctaggcgagctcgttggcctctctatggtgccgagcgcgcccgttcggacgttgcccctttaatcggcagagggcggtgcccaggaggtcccgcgagagctgcggggggcgggggggcggtgccgaggctgggggccggtggcggatggagcccgcgatggagccggagactctggaggcgcgaatcaatagagccacgaaccccctgaacaaggagctcgactgggccagcatcaacggcttctgcgagcagctcaacgaggactttgaggggcctccactcgccacccggctgctggcccacaagatccagtccccacaggagtgggaggcgatccaggccttgacggtgctggaaacatgcatgaagagctgcggcaagcggttccacgacgaagtgggcaagttccgctttctcaacgagctcatcaaggtcgtgtctcccaagtatctgggctctcggacatcggagaaggtgaagaacaagatcttggagctcctctacagctggacagtgggcctgcccgaggaggtgaaaatcgcagaggcctaccagatgctaaagaagcaggggattgtaaagtccgaccccaagcttccagatgacactacctttccccttcctcctccacggccgaagaatgtgatctttgaagatgaggagaaatccaagatgctggcccgcctgctgaagagctcccatcccgaagacctccgcgcagccaataagctcatcaaagagatggtgcaggaggaccagaagcggatggagaagatctcgaagagggtgaatgccatcgaggaggtgaacaacaatgtgaaactgctcacggagatggtgatgagccacagccagggcggcgcagcagctggcagcagcgaggacctcatgaaggaactgtaccagcgctgtgagcggatgcggcccacgctcttccgactggcgagtgacacagaggacaatgatgaggccttaggcctcagtgaccccacacccccttcaggcccaagcctggatggtaccggatggaacagcttccagtcgtcggatgccactgagcccccagcccctgctctggcccaggcccccagtatggaaagccgacccccagcgcagacatccctgccagcaagcagcggtctggacgacctagacctcctggggaagaccctcctgcagcagtcgctgcccccggaatcccagcaagtgcggtgggagaagcagcagccaaccccccggctcacactccgggacctgcagaataagagcagcagctgcagctcccccagctccagcgccaccagccttctccacaccgtgtccccagagccccccaggcctccgcagcagcccgtaccaaccgagctctcactggccagcatcactgtgcccctggagtccatcaaacccagcaacatcctgcccgtgactgtgtatgaccagcacggcttccgcatcctcttccattttgcccgggacccactgccagggcgctccgacgtgctggtggtggtggtttccatgctgagcaccgccccccagcccatccgcaacatcgtgttccagtcagctgtccccaaggttatgaaggtgaagctgcagccaccctcgggcacggagctgccagcttttaaccccatcgtccacccctcagcaatcacccaggtcctgctgcttgccaacccccagaaggagaaggttcgcctccgctacaagctcaccttcaccatgggtgaccagacctacaacgagatgggggatgtggaccagttccccccacctgaaacctggggtagcctctagaacagaggggctggggagaggaaggggcagagggaccggtcactgtccagcctggagggaggcattggtggccaaggacaccctttgttgcccatggccattcacccccaggcctggtgcttctccccacacccctgtaggcctcaagtgactcttccccctcctgctccggccccgcccctgctgagccaaacccagtaggaggctgggcctgggtttgtgccgctggggtctccatcaccgggacctggagagggaggggctgtgtagccttggaagaacttgggtcatggggaggaagcacagctgttggggaagggccaggacctcaggcccagccccaaccccagctggggtggggtcttccccacctgtctcttatgccttatgggaaggcccagccataactcgggggccatgctggagctggggaccagcttaggcctcctccataggaacccagtgactggggggtgacgcctacacccccagctatttgcactctggtgtgtggtttgactctgcttttcttccggattggccctgtggtcacagcctcagggggccaggctgggggaacctcacctggcccgtactcctgggggtttccctttgccattgggccccctgagggactgtgggggctcaagggtaatgccagaggcccatggccccagcgaggggctgtggggcacctagagttctcggtgtgtctccttcattcattggcctctgctggggcctcctatgggtgtcttacgtctgtccatccatctgtccgtggtcagaagtggggtcagtgtgtgagtgagagcaggagtatttatgaaaataaaacgtcgtttttcctggaaaaaaaaaaaaaaaaaaaaaaaaaa

SEQ ID NO: 614 - DNA, 1923 bp, Homo Sapiens
  NM_001001567
tcccgcggcggctggcgtcgggaaagtacagtaaaaagtccgagtgcagccgccgggcgcaggatgggatccggctcctccagctaccggcccaaggccatctacctggacatcgatggacgcattcagaaggtaatcttcagcaagtactgcaactccagcgacatcatggacctgttctgcatcgccaccggcctgcctcggaacacgaccatctccctgctgaccaccgacgacgccatggtctccatcgaccccaccatgcccgcgaattcagaacgcactccgtacaaagtgagacctgtggccatcaagcaactctccgagagagaagaattaatccagagcgtgctggcgcaggttgcagagcagttctcaagagcattcaaaatcaatgaactgaaagctgaagttgcaaatcacttggctgtcctagagaaacgcgtggaattggaaggactaaaagtggtggagattgagaaatgcaagagtgacattaagaagatgagggaggagctggcggccagaagcagcaggaccaactgcccctgtaagtacagttttttggataaccacaagaagttgactcctcgacgcgatgttcccacttaccccaagtacctgctctctccagagaccatcgaggccctgcggaagccgacctttgacgtctggctttgggagcccaatgagatgctgagctgcctggagcacatgtaccacgacctcgggctggtcagggacttcagcatcaaccctgtcaccctcaggaggtggctgttctgcgtccacgacaactacagaaacaaccccttccacaacttccggcactgcttctgcgtggcccagatgatgtacagcatggtctggctctgcagtctccaggagaagttctcacaaacggatatcctgatcctaatgacagcggccatctgccacgatctggaccatcccggctacaacaacacgtaccagatcaatgcccgcacagagctggcggtccgctacaatgacatctcaccgctggagaaccaccactgcgccgtggccttccagatcctcgccgagcctgagtgcaacatcttctccaacatcccacctgatgggttcaagcagatccgacagggaatgatcacattaatcttggccactgacatggcaagacatgcagaaattatggattctttcaaagagaaaatggagaattttgactacagcaacgaggagcacatgaccctgctgaagatgattttgataaaatgctgtgatatctctaacgaggtccgtccaatggaagtcgcagagccttgggtggactgtttattagaggaatattttatgcagagcgaccgtgagaagtcagaaggccttcctgtggcaccgttcatggaccgagacaaagtgaccaaggccacagcccagattgggttcatcaagtttgtcctgatcccaatgtttgaaacagtgaccaagctcttccccatggttgaggagatcatgctgcagccactttgggaatcccgagatcgctacgaggagctgaagcggatagatgacgccatgaaagagttacagaagaagactgacagcttgacgtctggggccaccgagaagtccagagagagaagcagagatgtgaaaaacagtgaaggagactgtgcctgaggaaagcggggggcgtggctgcagttctggacgggctggccgagctgcgcgggatccttgtgcagggaagagctgccctgggcacctggcaccacaagaccatgttttctaagaaccattttgttcactgatacaaaaaaaaaaaaaggaattcatgatgctgtacagaattttatttttaaactgtcttttaaataatatattcttatacggaaaaaaaaaaaaaaaaaaaaaaaaaaaaaaaaaaaaaaaaaaaaa

SEQ ID NO: 615 - DNA, 1193 bp, Homo Sapiens
  NM_001001654
gactggaaaaccggaagtgaaatcgtggcagccgcctcggccgccgcaatgcagagagaggagaagcagcttgaggcatcattagatgcactgctgagtcaagtggctgatctgaagaactctctggggagtttcatttgcaagttggagaacgagtatggccggctgacctggccatctgtcctggacagctttgccttgctttctggacagctgaacactctgaacaaggtcttgaagcatgaaaaaacaccgctgttccgtaaccaggtcatcattcctctggtgttgtctccagaccgagatgaagatctcatgcggcagactgaaggacgggtgcctgttttcagccatgaggtagtccctgaccatctgagaaccaagcctgaccctgaagtggaagaacaggagaagcaactgacgacagatgctgcccgcattggtgcagatgcagcccagaagcagatccagagcttgaataaaatgtgttcaaaccttctggagaaaatcagcaaagaggagcgagaatcagagagtggaggtctccggccgaacaagcagacctttaaccctacagacactaatgccttggtggcagctgttgcctttgggaaaggactatctaattggagaccttcaggcagcagtggtcctggccaggcaggccagccaggagctgggacgatccttgcaggaacctcaggattacagcaggtgcagatggcaggagctccaagccagcagcagccaatgctcagtggggtacaaatggctcaggcaggtcaaccagggaaaatgccaagtggaataaaaaccaacatcaagtcggcttccatgcatccctaccagcggtgagtgtggctggcaacctcgactccctggtgctctttgcagagttgggcagtgaaattaccttttgctcaaggctcacctagatgggtacaataaaaagaacatgggctttcagcagcagacaaatcccacttccaccactgactagctgtgtgaccttggacaagtgacctaatttttctgagcctgtttctcatttgtaaatggtgataatacctacctcatagggttgttgtgaggattaaaatgaggaaatgaatgtaaagcacttagtacagtatatgaaataatgggtattcaataaatgatagtttctacaaaaaaaaaaaaaaaaaaaaaaa

SEQ ID NO: 616 - DNA, 1056 bp, Homo Sapiens
  NM_001001655
cgattcgctggggcgcgtctttcccaccacgaggccaccagggtgactgcgggattccgatctgcgccggagctgcgatgctagagcactcttgccacccccaccccacggacgtgttgcagtgatatcagaattttgcgtgcggtttacccgtgtttaacctctttgcgtctcgcttctgaatcgtatccacttgagcatcactagactgatctattttaacactggtggggggcagcgaggatggacagattcctggtgaaaggggctcaagggggccttttgaggaagcaggaggagcaagagccaactggagaagagccagctgtgttgggaggagacaaagaaagcacaaggaagaggcccaggagagaggccccagggaatggaggccactcagcaggccctagctggcggcacattcgggctgagggcctggactgcagttacacagtcctgtttggcaaagctgaggcagatgagattttccaagagttggagaaagaagtagaatattttacaggagcactggccagagtccaggtattcgggaagtggcacagtgtgcccaggaagcaggcaacgtatggcgacgctgggctgacctacacattttcaggcctcacgctgtctccaaagccctggatcccagttctagagcgcatccgggatcacgtctctggggtgactggacagaccttcaactttgtgctcatcaacaggtataaagatggctgtgaccacatcggggagcaccgagatgatgaaagagaactggcccctgggagccccattgcctctgtctccttcggtgcctgcagagactttgtcttccggcataaggattcccgtgggaaaagcccctccaggagggtggcggtggtcaggctgccgctggcccacgggagcttactaatgatgaaccacccgaccaacacgcactggtaccacagtcttcccgtgagaaagaaggttctggctccacgggtgaatctgacttttcgtaaaattttgcttactaaaaaataaaaacatttttaacagtttaaaaaaaaa

SEQ ID NO: 617 - DNA, 7149 bp, Homo Sapiens
  NM_001001668
gagaagggaggtctgggcggggcagcggccgaggctggactggggcgcggcgggggcggtgtcctggttcctgtgtgggcggcgggcgtgagcgtgcgcgtgtggcctggtggctgtgagtgcccatacgtggtgagcgtgcggtgctgtgctgaggaggggcgagcgcgcgcggggatggcggcccggtgtgtgactgtccggtgcgtggccgcgaatctgcgcctgcgtgcatggcccggcggcgtgcggaaggcggtgtgtgttggaatgagtgaagcactttaagtggccaagagcaggaaacccggccggaggaggcttaccccgttctcccctgtatcgactgcgtagagcccagtgtgggcaaagtcctagagcccggggaagttgcccgggcggggcagcctcggctgaagcatttcctgtcagccctatctggaaggggcagagcccaggacagggctccatgtccacaggacggcgaggagcgaagaccatggggactgagtacacagatgaagacacagaagcatagagaggataagtaatcactagcaagtggaagaaccgggattcagatccagaacaggctgactccagagtcactggctgtcatgtagtttcctcaactactgcctcagctctacaatcccagagtaaagctcttctccaaatgaagagccaggaagaggtagaggtggcaggaattaaactttgtaaagccatgtccctgggttcagtgactttcacagatgtggccatagacttttcccaagatgaatgggagtggctgaatcttgctcagagaagtttgtacaagaaggtgatgttagaaaactacaggaacctagtttcagtgggtctttgcatttctaaaccagatgtgatctccttactggagcaagagaaagacccttgggtgataaaaggagggatgaacagaggcctgtgcccagacttggagtgtgtgtgggtgaccaaatcattatctttaaaccaggatatttatgaagaaaaattacccccggcaatcataatggaaagacttaaaagctatgaccttgaatgttcaacattagggaaaaactggaaatgtgaagacttgtttgagagggagcttgtaaaccagaagacacattttaggcaagagaccatcactcatatagatactcttattgaaaaaagagatcactctaacaaatctgggacagtttttcatctgaatacattatcttatataaaacagatttttcccatggaagagagaatatttaattttcatacagataagaaaagcttaaaaacacattcagttgtgaaaaaacacaagcaagaccgtggagaaaagaaacttttaaaatgtaatgactgtgagaaaatattcagcaaaatctcaacccttactcttcaccaaagaattcatacaggagagaaaccctatgaatgtattgaatgtggaaaggcctttagccagagtgcccaccttgctcaacatcagagaatacacacaggagaaaaaccttttgaatgtactgaatgtgggaaagccttcagccagaatgctcatcttgttcaacaccagagagttcatactggagagaaaccttatcagtgtaagcagtgtaataaagcattcagccagcttgcacaccttgctcaacatcagagggtccacactggagagaaaccctatgaatgtattgaatgtgggaaggcttttagtgattgctcatccctagctcatcatcgaaggattcacactgggaaaagaccttatgaatgtattgactgtgggaaagctttcaggcagaatgcttctcttatacgtcatcggcgatattatcatactggagagaaaccctttgactgtattgattgtgggaaggctttcactgatcacataggacttattcagcataagagaactcatactggagagagaccttacaaatgtaatgtgtgtgggaaggcttttagccatggctcatctctgacagtacatcagagaattcatacaggagagaaaccttatgaatgcaatatctgtgagaaagccttcagccatcgtgggtctcttactcttcatcagagagttcatactggagagaaaccctatgaatgtaaagaatgtgggaaagctttccggcagagcacgcatctggctcatcatcagagaattcatactggagagaaaccttatgaatgtaaggaatgcagcaaaaccttcagccagaatgcacacctcgcgcaacatcagaaaatacacactggggagaaaccttatgaatgtaaggaatgtggtaaggccttcagtcagattgcacaccttgttcagcaccagagagttcatactggtgagaagccttacgaatgtattgaatgtgggaaggcctttagtgatggctcatatcttgttcaacatcagagactccacagtggcaaaagaccgtatgaatgtcttgaatgtgggaaggcattcaggcagagggcatccttgatttgtcatcagagatgtcatactggtgagaaaccttatgaatgtaatgtttgtgggaaagcctttagccatcgtaaatcccttactctgcatcagagaattcatacaggagagaaaccttatgagtgtaaggaatgtagcaaagccttcagccaggttgcccatcttactctacataagagaattcatactggagaaaggccctatgagtgtaaagaatgtggaaaagccttcaggcagagtgtacatcttgctcatcatcagcgaattcataccggagagtcatcagttattctctcctctgccctcccataccaccaagtcctatagattcaatctcgtaaatgcttctagcatccatctgcttttttccagcacatgtcccatcatcatagtccaagacgcaaccatctcatctggatttctgcagtagcataactgttgccccttttgcttctatcaactacatgtttaacactgtaggcagcctaaccttttaaaaataaaaatacataatttatgttattttcccatttaaaacacttgatttgaaaaatatattaactaatccatttcaaggatttagcacacactggcatatagttattgctaaataaatgctagccattaaggtaaaggtttccttacaaactatcatattaagcagcaagtaaaccaaacagtaagtctaagactaagattttagagcagacagaagactactctcctggtagagaggaaagatgaacaaactcagaattgaaagatttatggtacacaaggtaacatggtggcttatcactccctctgtgacattgttgatgagcaactctcactttacctgacactgagaagtgagaatcagccaattagaacaaaagcttttagctgggtgcggtggctcatgcctgtagtcccagcactttgggaggctgaggcaggcagattgcttgagctcaggagttcgagaccaacctgagcaacatggtgaaaccctgtctctacaaaaaatacagaaattagccaggcgtggtggtgcacacctgtagtcctagctactcaggaggctgaagcaggaggattgcttgagcccaggaggtagaggttgcagtgagtcatgatcacaccactgcaattccagctgggcagcagagccagacactgtctcaaggaaaaacaaagaacaaaagcatttggtagaatgtaggactaaccagggtaggtagtagtaaaccaaaagtaacaagccaaaaaaacttgaatagattaatagccatgaaacactgaaaagggtagttcaatactttggcctttataaaagtaccacagacaattcgtgtggtatttaaattgttctagcataaaataaaatgcaataagaccttccatcttgttccatgagattgacaagacatgccaaaacataaaaatatgtacactgcaattagtttctgaatgtagatgttacaacttaaacttatttttaaaatatttaaaaataggaaggctagacatgcctctgtatagaaaatctgataaaaatatttctccctaaattgtaaattcattgatattccagtaaaaatttccatatttttttagttgagaagctgattctgatcatctgtagaattttgattttaacgaggaatgtagtttacattaggaatgtagtactaatactaattgaacatttgctaatgtttcacacactattttaggtgctgggggatacagtaaggtacaagatggacaaaaatacgtgctcttacagatctagtagaacagaaaaaattaaatgcatgctatgtgataagtatatgatatgtcccataaagagaaatgatataaaaaagaagctagggagtgctggatcaggcaccttactatccccagaacatgttggtattagaggatgagggaagaactagaggtaactgtgagacacaaaaggcataatgaaaatagtcatgatagtcccaaggcagatattgtttatgatgctttgagtgttggaggaagggaggattgatggtttaacagagatcatggcagttatgttcactcatataaatgttgatttagaagctggtggaagggtattttttgagtgacagctttattgagacaaagcaattctggagaacacccatatccttctctctgtatccatcagcagaagtgaagagggagccccaaagttccacttaaagtgtacaacttatggcttttagttcattcacggagttgtgcaaccatcaccaccatcaattttagaacattttcatcacctcaaagaggaatcccttgtccttttgtagttatggccatccctggaagagtacttttttttttttttcaactgaagcacccagagctcttgggttccctcttaactgctttctgtggaagtatagagggccatgtgagggaagccgttatccagagtacatgactgctagaaaatggagtttggggctccctcttcacttctgctgatagaagcataatggctaggggatgggtagtctcaccagagaatgtggagctttcagactctccttatatatgataaaaaggatttttcattgtagtggggaaaaggtggtttgatcaaatggcattgggaaacttagctcactggaaaaacagatctgtacctttcacactaatgaaatgcctgagatattaaaggtctaaatgtaaaattaaagtacatgaaaaacagaataatatatatgtaccctcggtttgaaatagactttaagcactaatgcataaccccaaagctgacattaggcttttatatggtggaaaacatcatagtcaatagataaatgagagactgacacaaagtgtttgcaacagatataataaaggactgtaattcgtgatattcaaagtactattacaaaccaataataatctgcaacttagaaaaatggactaatgtcccattcacaaaagatgcaataaaagcagttaatgaaaattatccaatatcactagaaatcaagaaatgcaaattaaagtgattatctactttttccccaaaagactgactaatcgagtgataacattcagtattggtgaatgtgtggaaacaagggaattccattgttgattacatatctattgctttatgtatataccctttgaattaatattccttggaaaccaacatatacaaaggtagataaatgtattagtggcaaaaaaattaatggtaaactattaaaacaacaagtgtccatcagggtaataaataaattaattatggtatatatccattcaataggaattatgcagctgttgaaaaaaaatcaatgtgtgtagtcatagaaagatagctgtgctatactaaatgaaaaattgcagacctgtattgtagtataggcccataattgtgatatcaaaaataaaaatcaaaatatatattatagtaggcatttgtttttctctgcccagtttcccttgcctcctccttttggctgcactatctcatcttttccttttgagtaactggccataccctaccatatgtttttgatggacgtggccaataaaattgtctctgaatttcaaaaggcatttggatctgtgtcatccaatggcaactccctaaaagctgatgcagttattcttttgattggtccttggaaccaccctggtttttgtactttccaagtctgtgattcctcaaactacccattgtctttccggtacttgatttttgcctcctgttggtcagttgcttgcaagtaaagaaacaatcatacagaatttggtacgaagattgggtaatgggcattagaatctttggaaaaatcaggtattgggagttgctttttggatgagatggggcgaataagacttatattctagactggaaagcatctcatggtgtgcgatgagcaaacgcctgattattcattatagtcacctgggatgaatagaggtctagggttctggataatgataatttaaggaggatggagaatgctgaatccaaaaggtatatgtaatactggtatctaactgcttggaataacttaaagtttagctcttgaatttctagcattaaggcaaaaaaaattcacctaagggattttgtatgatattgttgaaagatgtcttacattgtttaaagtcatagggttaagatggctcataaccaaatttagagactatttttatgcattgttaaagtggaatgctggttaaattttatactttattcacaagagtcactgtgaattgaattgtgaattcagttctgaattgtgttcccaccagcaccaccaaatgctggcctctaccaccaccaaatttacttgttgaagtcctaaaccccaacatgactgtatttggacataaggcctttaagaaactaaggttaagttaggccataagagtgaggccctaatcccataggactagtgtccttataagaggaagagacaccagaggtttgtctctccacatgtgcacagaggaaatgctgtgtaaggacacaacaagaatgctgccatctgcaagccaggaggagagacctcaccaggaaccagccctgccagcaccttgatcttggacttttaatctccaggactgtgagaaaataaatgttggttgtttaagccaaaaaaaaa

SEQ ID NO: 618 - DNA, 2854 bp, Homo Sapiens
  NM_001001701
tatctgcctgggacgccgcgaggcagaagtaggcgggcccattgacttagtgtcaaggcggaggccgcgcttcatgccagcggtcacggaggcagcggaaagccgagccaggcgcctgcgcgctgggaagagtaggttcagagtgcattccggaacccggggcgcggcgcactgcgcaggcggccggactccgctcagtttccggtgcggcgaacaccaaagtccgggaacttaagcattttcggtttctagggttgttacgaagctgcaggagcgagatggaggtggacgcaccgggtgttgatggtcgagatggtctccgggagcggcgaggctttagcgagggagggaggcagaacttcgatgtgaggcctcagtctggggcaaatgggcttcccaaacactcctactggttggacctctggcttttcatccttttcgatgtggtggtgtttctctttgtgtattttttgccatgacttgttcgctgatatctaaattaagaagttggttcttgagtgaattctgaaaatggctacaaacttcttgaataaagaagacaggactctcaatagaagaatttcacatctccaagggacccttcctttcattttacactttgttactaatttgcagaactctattaattgggtaggatttcacccattcctagctaagttcttaaaattaaaccctttggttcgtgtttaaaaactttcaaacatctgatggctttacaggggctgaatataaaagcatttgtacttaaaggtcttgtgtattcattaagaaatatagtaatgtcttttaatgttttaagagttgatcagggtttactatgatgcaagtaataggatgattaataagggaaggtttttatgaattcaaaagtcaattattcaaaagcagggaaagattttgagagagggaacaaagtattcttagattgcgtagaagctgctaggttccagttttaatttttaggtttagttggactctgttatgaaaagataggttatgggtgggcgacaggttgatacagtcttagaaaaagcaggtaatatcaaagtattggaaagctagcatgcatgccctcttacctgggtatcttcccccttttttccttttaaactcttgagcctcctataacgaaggattatgtgtttcaaacctattttttttttactgtttcattaagtgtgcttgtgcccaaaatatttacttgtataatatctgtaacttgcttaaatacttcagcaaagtcagcatatttactcattcaacaaatatttgagccaggcattattttagacacagcagtgaacaaaacaaaaaggcattcttgccttcatggagcttacattcttattgttatttaaatctaaatgttataaaacaagaatttatattctagggttgatcagctagtatttaatcaaaaaggccacactcccatagcagctactctaagctgtagtagctaataaaaaatattaatgttggccgggcacagtggctcacgcctataatcccagcactttgggaggccaagggtggtagatcacttgaggtcaagagttgtgacaccagcctggccaacctggtgaaaccctatctctattaaaaaatacaaaaaaatacaaaaaaattagctgggcatgttggcatgcacctgtagtcccagctatttgggaggctgaggcacgagaattgcttgaatccgggaggtggaggttgcagtgagccaagatggggccactgcactctaacgtgggcaacagagaccctgtctcaaaaagaaaatattcctgttagccctaaaggctttacatgaggaatggtagaagtggtcttttgtttaaattagttgcattcagcatatatgaattgtcttaaatattttggggatactcccccgccttttaaacagggcataagatctggtaaactctctgtatatcttcctacctttcaaaatcgttcttagggttagtcaagtctggaatataattgctgactataaagttagcaattatgcttttaaggtgttgtcacatcaacctaaagagaaccatctatggaaggtatggttgaaacatctgtaggaacacagaactgggatttcactgagtttaccaaatcaactgtgtgaactgtttctgcactgcttgctaatggtttcatctaataaatgtttacttatatagctgagtttggttttattctaacaaattacctggtggtgtgattgtgaggtgattaacagttctcacatagtttactgttaggtcacacacagacttccgatcataatccatactgcctttttgagcctaaaatcagcctactaccacaattaccaaatattctgaaaatttctagtatggtgaagatggagagatcttggtgtgaaggttaattttatatgtcatcttgattatgctaggagatgcccagatttctgggtttgtccatgagggtgtttccagaagagattagcatttgaatcagtagactgaataaaaaagagccacccactccactgcgggtgggccaaccccttgagggcctagctggaataaaaaggcagaggaagggcaaattctgtcttctctctgcttgaacagggacatccatgttctatccttggacattggttctcctgattctctggctttcagacatggaccagggcccctggttctcagacctttgggtttggactggaactacaccattggctttcctgggcttactgtctgcggaaagcagattgtgggacttctcagcctccataatcacaagagccaatccctcataataaatttatttctatataaaaaaaaaaaaaaaa

SEQ ID NO: 619 - DNA, 1854 bp, Homo Sapiens
  NM_001001732
attcctttttaaacaatatccattctcttgatgtctacaatatcacctttcttatagattcgcatatacatggccaaaggaacaactccatgttttctaaaaggcctagagaacatacatcagctcaccaggacatgattatagcttctcaagcttatctaaaataaaagataacatatatatcaacatttttgatgaaatgatgactgaaaaacatgaggatcactgtctcaagagctgtagtggtcactcatatataagaaagaattggcttggatgcattgtcttccctttttctgctcttctgcaacaatctgagtttttagatcaaacagaggtcttgcagagagcacagatttttaaaaagaattgtaaggcaatgtttcccaaccgaagaatcgtaactactgtttttaatgatgaagggatacagttcttagtcacaagatatatcaaggcattaaatccacctcagcaacttctggatatatttcttcacaattctaatgcaacatttgacctcattgctcgatttgtatctttgattccttttgtgcctaatacaccagatgaaaatgatggctctgatatatggatgacatcagagcactgcatcagtttagctatcggaaataaggaggagcatgccatccttctctgtaatttctttctgtattttggaaagaaggcactggtcctcttgggaacgtcagtgttagaagggcatgtggcttatgtagtaactcaagaaactaatgaatatttgctttggaatccatcaactggccaatgttataagcagtttgacccgttttgtcccttaaaaagtgtagattgtttgtttgatgatagaaatgtctggtttaatattcaacaaaataatacaccaatggctgtattttttgactattcaaaggaaagtttctggaagcagttgcttccaaaaaacgttcaaggaacaaaaatacaaagcatacaggtcacgggatttcccatccagatgccatacattgatgtacagtcaattattgatgctgtttatcaaactggaattcactctgctgaatttccccagacagaatttgctttagctgtatacattcacccatacccaaacaacatattatctgtgtgggtctatttggcttccttagttcaacatcaatgaaaaggaagcagagcaaagtaaaagattgtactatagtcctctagtaccaacaaaaacttttctggtaccttgagattttgctgtttattctcaagtccagctaagtgctgggcccaatttttgattcacttacagagctgggcactatggagactcgcacccctgagtgagtctttgaggaggagtctagatgagcttctcaccagagacctctccaggaaggacctttggatagtctggctttcttgggtcactgtctgcagtaggtcttattctgggaaagaagcaattttggcctcttctcctaagaccaatgtttctcaaattgtagaattcacaccacctccatttgaatcatctggagagccttgttgaaaatgcagattactagatcctcctcaagacccactgaatcagcacctctgggagtgaagctacagactctgcattattttcaacaagctccccagataattctgatgcactgttatgagggagagcccagccttatagaatgttgtcactactaaactaaggctggtacgtttgatgctgggtctgatacaatttcagatggaagctgctcgagtggaaaactaaggtcattgcctctcatggataaaatgttatttcactggtaaagaaaaataaaataaaatctaccatgttgggctgaaaaaaaaaaa

SEQ ID NO: 620 - DNA, 2029 bp, Homo Sapiens
  NM_001001794
gactgttctgaggagcggcccggacgcgcgccgcccccgcccgcgtttccccggcaacccgcggccgccgccatggacgcgctgttgggcacagggcctcgccgggctcgcggctgcctgggcgcggctggacccacgtcttcaggtcgcgcggcgcggaccccggcggcgccctgggcgcgcttctccgcctggctggagtgtgtgtgcgtggtcaccttcgacctggagctgggccaggcgctggagctggtgtatccgaacgacttccggctcacagacaaggagaaaagcagcatctgctacctgtcttttcccgactcgcactcaggctgccttggagacactcagttcagcttccgcatgcgccagtgtggagggcagaggagcccctggcatgccgacgacaggcactacaacagcagggcccctgtggcactgcagagggagccggcacactacttcggctacgtgtacttcaggcaggtgaaggacagctctgtgaagaggggctacttccagaagtctttggtgctggtgtcccgcttgccctttgtccggctgttccaagcgctgctaagcctcatcgcccccgagtactttgacaagctggcgccctgcctggaagcagtgtgcagtgagatcgaccagtggccggcgcctgcacctgggcagaccctgaacctacctgtcatgggcgttgttgtccaggtgcgcatcccatccagggtggacaagtccgagtccagtcctccgaagcagtttgaccaagagaacctgctgccagccccagtggttcttgctagcgtccacgagctggacctgttcaggtgcttccggcctgtgctgactcatatgcagacactgtgggagctcatgctcctcggggagcccctgctagtcctggcaccctcgcccgacgtgtcctcggagatggtgctggccttgaccagctgcctgcagcccctcaggttctgctgcgacttccgtccctacttcaccatccatgacagcgagttcaaggagttcaccacacgcacgcaggccccaccaaacgtggtcctgggagtcacaaaccctttctttatcaaaacactccagcactggccccacatcctccgagtcggggagcccaagatgtcaggagacctgcctaagcaagtcaagctgaaaaagccttcaaggttgaagaccctggacaccaagccaggcctctacaccgcttacacggcccacctccaccgcgacaaggcgctgctcaaacggctgctcaagggcgtgcagaagaagcggccgtcagatgtgcagagcgccctgctgcggcggcacctcctggagctcacccagagcttcatcatccccctggagcactacatggccagcctcatgcccctgcagaagagcatcacgccctggaagactcccccccagatccagcccttcagccaggatgacttcctgcgtagcctggagcatgctgggccccagctcacctgcatcctcaagggcgactggctgggtctctacaggcggtttttcaagtccccccattttgatggctggtaccggcagcggcacaaggagatggccctgaagctggaggccctgcacctggaggctatctgtgaggcgaacatcgagacctggatgaaagacaagtccgaggtggaggtcgtggacctggtcctgaaacttcgtgagaagctggtgcgggctcagggccaccagctccctgtgaaggaggctacgctgcagcgggcacagctgtacatcgagacggtcatcggctccctgcccaaagacctgcaggctgtcttgtgccctccctagaacaaagccaagggccacggtcccagggccctaggtctgcctgagcctcccactccccagtggtggcggcactgggccaagcacacgctccccttccttggccccccgcccagactgcaggctccccttcctgcaccaccattgtctcagcagtaaaggcgacatttggaaccacaaaaaaaaaaaaaaaaaaaaaaaa

SEQ ID NO: 621 - DNA, 1979 bp, Homo Sapiens
  NM_001001795
gagcccccgaggcccgagggagagggaagagcgccgggcccgggtcgcggaggcgggcgccgccggaacgcgaagcgcggggctactgcgggcaggcgcgagttcgcgcagcaccgcccccggcgtgacctgctggtcgcttccggcgcgggaggagaatgtggccgccttgcgggacgctccggaccctggccttggcgcggtcgcggggagcccgggcctgcagcggggatgggggcgtttcctacacgcagggccagagtccggagccgcggacccgcgagtatttctactacgtggaccaccagggccagcttttcctggatgattccaaaatgaagaatttcatcacctgcttcaaagacccgcagttcctggtcaccttcttctcccgcctgagacccaaccgcagcgggcgctacgaggccgctttccccttcctctcgccctgcggcagagagcgcaacttcctgcgctgcgaggaccggccggtggtcttcacgcacctgctgaccgcggaccacgggcctccgcgcctctcctactgcggcggtggcgaggccctggccgtgcccttcgagccggcgcgcctgctgcccctggccgccaacgggcgcctgtaccacccggcgccggagcgtgcgggcggcgtgggcctggtgcgctccgccctggccttcgagctcagcgcctgcttcgagtacgggcccggcgcgcctgcgctgccctcgcacgtgcgctggcagggccgccgcctcgccctcaccatggacctggccccgctgctgctcgcggctcggtcgccctgagcggggccaagggaaaggcgggaggccgcgggcgcctctcgccccgctcccccgggactccacgccccggaaagcccgcgccacccgcgctcgcggcagcctagtgcgcctgcgcgctcggccccgcccccacccggcgctgtccttggtgctgccgcggcccggccctcccggacaccccgctccccacggcgcgcgccccccgcgcacccgactccggcgccctccggattggcctgcgctcgagacgtcaggcactggcggcgggcgcggggctctggtgcgcgtgcgcgagcgtcccccgccccctcccagcccggcgactgctcgggcccggccgccacctgcacggcgggggagccgctcgccgcgggagcgtcaggtgaggggacgcccgacccaaggtcaccaggcgtgggggcgctgggggatcggggaccatcccggctctgaccctggtgcgctccgagaagggcgtgggtcctggagggggatggggaacgcggaggccacgccctccctgagcccggccgaaaatcaaccggctctcgtgggtagcagaggaggccgtgggggatacaggcaccaggtcgcagcgctgcagaggtgcgcaagggccgcccaaagaccagcttgggcctcgcactgcgcccgaggcagacacagggcgttccatcctcttccctccccgctcccgcacagaggggcgcccaggaggcagtgacagtcgtcgcggaatcctgcgtgtgacaccccgcccctgcccagcggattagggagttgtcctctggtaaaaggatttctgggctgcttccagcttggggccctcatccctgccctggcaggcctttctacaccgatctgcatctagtggggggtcagcgtgagcagcagcgccgtgagttctgaggccaagaaccttctccacttgagaagccttcctgggggaggctgagtgggccaggcctggagccacgtaccaacactttatacccaggggaatggatcccaagggcccagataacgcccccaacttcttggggttcacacgcgtcctgagacatctgggaactgcctctgcctgggccaaagctattccattaaaactttattgctgtgcttaaaaaaaaaaaaaaaaaaaaaaaaaaaaaaaaaaaaaaaaaaaaaaaa

SEQ ID NO: 622 - DNA, 2410 bp, Homo Sapiens
  NM_001001852
gagagcgtgagcgcggagagcggaccgacgcgacacgccgtgcgcctccgcggctgcgctacgaaaacgagtcccggagcggccccgcgcccgccgcacccggccctcgcccgcccgaagacaggcgccaagctgccccgccgtctccccagctagcgcccggccgccgccgcctcgcgggccccgggcggaagggggcggggtcccgattcgccccgcccccgcggagggatacgcggcgccgcggcccaaaacccccgggcgaggcggccggggcgggtgaggcgctccgcctgctgcgcgtctacgcggtccccgcgggccttccgggcccactgcgccgcgcggaccgcctcgggctcggacggccggtgtccccggcgcgccgctcgcccggatcggccgcggcttcggcgcctggggctcggggctccggggaggccgtcgcccgcgatgctgctctccaagttcggctccctggcgcacctctgcgggcccggcggcgtggaccacctcccggtgaagatcctgcagccagccaaggcggacaaggagagcttcgagaaggcgtaccaggtgggcgccgtgctgggtagcggcggcttcggcacggtctacgcgggtagccgcatcgccgacgggctcccggtggctgtgaagcacgtggtgaaggagcgggtgaccgagtggggcagcctgggcggcgcgaccgtgcccctggaggtggtgctgctgcgcaaggtgggcgcggcgggcggcgcgcgcggcgtcatccgcctgctggactggttcgagcggcccgacggcttcctgctggtgctggagcggcccgagccggcgcaggacctcttcgactttatcacggagcgcggcgccctggacgagccgctggcgcgccgcttcttcgcgcaggtgctggccgccgtgcgccactgccacagctgcggggtcgtgcaccgcgacattaaggacgaaaatctgcttgtggacctgcgctccggagagctcaagctcatcgacttcggttcgggtgcgctgctcaaggacacggtctacaccgacttcgacggcacccgagtgtacagccccccggagtggatccgctaccaccgctaccacgggcgctcggccaccgtgtggtcgctgggcgtgcttctctacgatatggtgtgtggggacatccccttcgagcaggacgaggagatcctccgaggccgcctgctcttccggaggagggtctctccagagtgccagcagctgatccggtggtgcctgtccctgcggccctcagagcggccgtcgctggatcagattgcggcccatccctggatgctgggggctgacgggggcgtcccggagagctgtgacctgcggctgtgcaccctcgaccctgatgacgtggccagcaccacgtccagcagcgagagcttgtgaggagctgcacctgactgggagctaggggaccacctgccttggccagacctgggacgcccccagaccctgactttctcctgcgtgggccgtctcctcctgcggaagcagtgacctctgacccctggtgaccttcgctttgagtgccttttgaacgctggtcccgcgggacttggttttctcaagctctgtctgtccaaagacgctccggtcgaggtcccgcctgccctgggtggatacttgaaccccagacgcccctctgtgctgctgtgtccggaggcggccttcccatctgcctgcccacccggagctctttccgccggcgcagggtcccaagcccacctcccgccctcagtcctgcggtgtgcgtctgggcacgtcctgcacacacaatgcaagtcctggcctccgcgcccgcccgcccacgcgagccgtacccgccgccaactctgttatttatggtgtgaccccctggaggtgccctcggcccaccggggctatttattgtttaatttatttgttgaggttatttcctctgagcagtctgcctctcccaagccccaggggacagtggggaggcaggggagggggtggctgtggtccagggaccccaggccctgattcctgtgcctggcgtctgtcccggccccgcctgtcagaagatgaacatgtatagtggctaacttaaggggagtgggtgaccctgacacttccaggcactgtgcccagggtttgggttttaaattattgactttgtacagtctgcttgtgggctctgaaagctggggtggggccagagcctgagcgtttaatttattcagtacctgtgtttgtgtgaatgcggtgtgtgcaggcatcgcagatgggggttctttcagttcaaaagtgagatgtctggagatcatatttttttatacaggtatttcaattaaaatgtttttgtacataaaaaaaaaaaaaaaaaaaaaaaaaaaaaaaa

SEQ ID NO: 623 - DNA, 1303 bp, Homo Sapiens
  NM_001001870
gaagagacagcgccgccggccgtggggagcggacgcagtgatttgctccccctcgtgcagcaacccccacacccagcaccaggagcctgttcctctcacgccctcacctggctgagccgcagtagttcttcagtggcaagctttatgtcctgacccagctaaagctgccagttgaagaactgttgccctctgcccctggcttcgaggaggaggaggagctgctttccccatcatctggaaggtgacagaaatgggctgggaaggtccgaacagcagggtggatgatacgttttgggcaagttggagagcctttgcccagattggcccagcaaggagcggttttagattagagacactggctggattgaggagtagaaggctcaaacaacccaaggctttctgcctccgagatgtggcaccatagtgcggtgccctgtggcttcaccgccctacttccacctccgcccagcctgtaatgtttatataagcagcctcaaggaccaagaaccatctgcgaaaggacacacacaggaaattcataaaagaaatctgaatggataaaaccatgaaaaaaagtatgcttcattagtaattaaagaaaggcaaatagagctggaagcatttttcccttagcaaaccataacagaaaaaaataagacccaatattggcaaagagactactgaaaaaacattcccatacattgcgtgtgggagtatacatcggtgcaggcttcctggatgacagttgggtgatatgtgtcatgtggcctaaaagcctccatgtcatttgacctacgaattctatctttgggaatttatcctaagaaaatacttaaggatttagttagtgataagatgttcatcccagcattgcaatggagaaaaatgggaagcaatggtttggttgggaatttattccttttctgctgtaacgaaagtttgcaataggggattgcttaagtaaattattgtatctccatccagatggtggagtaccgcgcagacattaaaagtcatgtaaaagaacatctgactgaaagaaaaatgctccttgaatattaaaaggttgtaaaaatagtgcatgttatgtgatttcaattttgttttttaaaatatgggtgtatgcttgtatacgtagagcagataaaaaagacggaaggcatactaaaaaatgttgagtggttatctttgtatggtggaacaaagtcactgtaattttcatctttggtttttctgtaatttccaaattttccacattttgtatttcatataatataatttaagaaaaaaaaaaaaaaaaaaa

SEQ ID NO: 624 - DNA, 3902 bp, Homo Sapiens
  NM_001001873
ttttaaggagagaggggaatgtatgtgggaggcaaggatcagatgcaatcgtggagactgggagcttcgggcgagtggcactcgggtgtggggagcgggagggcaagagatgagtgccgggcaagatgggcaggggcccgtgccctctgcacacatatataaatataaagaacacctagataaagtctatatatctctatatctatatgaagtcatagtttgctttatttttgtacctgtgcttagagatgttttgagcagtgctaccttcccaggcagtctgggatactagctcatgccttgacgccacctccttccctgctcttcctttggtattctctctgttcagagttgcttgggtctttctgatggaaatgtgtatatatgaaaagtttgtaaaataacaaaacaaataacccacctgcaggaaggacaagtgagctgaaggttgtgtggagctgcaggatctgatagccctaaagaaccaggaccaatgtgtctcttgccacttgggagggatgttgacttgaacttctttgcagaggggcttaacagggcaaggctgaggagatgaaaactgtgactccatccccacgtggctgtggaaaggtaaccagttcctcagagaaaacctggcttcacagcattagaaagggggtggttgagactacctagggacctacggtgacacctgtcttggtttgtagcactgtagctcagacagctcagaccgctcatagagggcatggcaatgggagagtttgtgaggctggctgcctgggcttggtcttggagaacacatggcctgtttagtgttgctgcagattcttagagccagtgtgaatgtggtatgtagtataaatatgtcatctatgtttttttcagttatttttaattggaaataaagtgccattgcaaataggatgctccaatcctgggacactgagtggaggatgaggagggagagatgaactgtgggccggcctgggagagggggtcttagtggaaccttccttctggcctccagccggggacttacaaaactgaacaatgtattggcagaactggacccacaatgggagattctggggagcaggagttcacttgtatctgagcaggaagcagtgtgccctgaagaatacctctctgagcaaattccagacctcacacatatgcaagggctctgccttgcagcctcagcaagcgtctcctggtgctagctccttcctgacttgcccggagctcggagtgatgtatttgaagctggtgctgggccagatggtgcaggcagtgaggagagactcaggactgcaacctttcggctccttattcctgctcatcactcagaaaagggcagtactaacccctttcctaaccaagacatggcactccctaagagctcttgtctatagagtttggtccttagaggaaagcagataccttcagcgtgagaagggcttggttgacagttttggggtattatgggaagagtaggttggggtaaagcttgagtctaactcttgatccttacatggacctatgaggccctgccattcagtcaggcactgtccttgggtcctcaaattaactgctgagaacactccccactttccgaggacgctgatgggaaatgggctctgtccatgcagctggaaggatccagtgctggtgccactgtcagtggcaccatccttgccttgaatgatctttcttgcaggctcctgcagctgagtgtttcttgtaagatttttcagggggattgggcaagaagaagaggtgcaaattctgttcccttcctaccttgaagccttcccagaccaccacggtctctgcacaagggaggctcccattactgttctgttggcttctagacccaccatcccctctctttctgtggactctgcccgacttctggccacatgcaaccagcagagtaaactgctccaacacctcgggcatgtcctagggcttgccctcccaccagggccagcccaagattaggtcctcagcagcatcaaggtctgggagagccactggcccacatgtcaccattctattcctcagcctccaacaggactcttcattttggggagggaaagggaagatggggccatagcccctaccttgaaattgtacagtgtggaggggatgttagtgcctacctgtgacctttctgctccactgctcagcaagatgaggtaaggttgggtgtcagaggggacctccagcttctctgaagagccagcccttaaggcacttggagcaaaggtcattgagatcagctttatgtggagtaaggaggaggcctgggaaccgcttgtggcatcagttggggcgacaggtggatgagtgtgctctgatggagcttttacggcccacagccactgccaggagcctgagctcttccccatgcttgggacacgttccttggtccccacagcagaatggacattgaattttggtgcttttccctttggtagaaggtggaggtatctgaggagttgtttctgtcttgctacctctgtctactatatagagcaagagtcgggaatagggagatgtgtgagaatcactctcccatggatcagtgtgggccctgtccctcttccctactgtcaccaaccagcagcttggggaaaaggctctgtcgtggatttttgctgcctgcttcccgcttccactcttcttggcggtagatgttcatggtgatccactttgggcggtctgaaagtaggaggtgggggaagaggcaagcctgcacacacacttcctgtccacagggggttgcctgtggcattggagggtggagtctcagagtccagggactgggaggaaggtacttgatgggatggtcttgattctggaactttagactgaggtgttagaaaggggaattgttggctaggggagaagagcagtttaacgctccacttgctaagtcgtctgtatcagtgtcagaaggtcttgacctcccattcagatttaatttcctaactgccaggtgtggggctggggatagagggcccagaagggggcgcagtcactgacgtgaagggaccacatcccgcttcatgtcagtgactcctgccccttggtcttcagtgtttttctcttccccaggagggactttgatcatgcaggatagaattctcccatcgcacacctgggggcaagttttagatgagcttctttcctccatttcacctggtggtctgaggacacacagagggtgggggtgagcaggcagtgtgggtggggaggggctacctcccccagaccccttacaaactctgtacctctcggtgcgcggcagcctcttgctgtagttcttcttttctggatatgactgtcagtttcgtcatgagatttcttgctctcatttcgaactctttctttcttccactttctttgggggcgacccccgatccatgccaggtcttcctgtgaagaccgttccaacctcgtttccatttcttgaatgttgagtattacaacatcactgcgctagggtgcttcatggtgctgttctcgaagaggccagttgggctgaatctccttcctcccactggctcctgatatcttgctgtattttgtcttctttctgatttttccctaggggtttggggtgggtgacttaggggcggcttttgtgttctccctctctctctctttcttttctgtatgtatgtatggactggttaaagtgagtttgggcagctgactttatggtatgggttggctgacttttgttcaacattaaagacaaaccaacaaattgtacagctgcacacagaacacctttgagtgtgaacttgaatggcaactagaggcttactttttgaacttcaggtatgtaactcaaaagtaaataaaaacactattttttcaaaaaaaaaaaaaaa

SEQ ID NO: 625 - DNA, 1183 bp, Homo Sapiens
  NM_001001888
atgtggatgctgggagaagtatgtgagatggaaaagttgtttcatggcatccaagaagtgaatgatcctcaaggtgtagcagaggaatttgtaggagagagggatgattgacatcttcgtgtagccctccatccatcccagttagcatggagggattttagggctaccattggctgggtagtggagtgttgaccaatcacagctcaggggcgtgattgtctcgtcctgggatcgcgagaggtgtatatacagggaggccaggcagcctggagttagtcgaccgttgcgagacgttgagctgcggaagatgagtccaaagccgagagcctcgggacctccggccaaggccaaggaggcaggaaagaggaagtcctcctctcagccgagccccagtgacccgaagaagaagactaccaaggtggccaagaagggaaaagcagttcgtagagggagacgcgggaagaaaggggctgcgacaaagatggcggccgtgacggcacctgaggcggagagcgggccagcggcacccggccccagcgaccagcccagccaggagctccctcagcacgagctgccgccggaggagccagtgagcgaggggacccagcacgaccccctgagtcaggagagcgagctggaggaaccactgagtcaggagagcgaggtggaagaaccactgagtcaggagagccaggtggaggaaccactgagtcaggagagcgaggtggaagaaccactgagtcaggagagccaggtggaggaaccactgagtcaggagagcgaggtggaggaaccactgagtcaggagagcgaggtggaagaaccactgagtcaggagagccaggtggaggaaccactgagtcaggagagcgaggtggaagaaccactgagtcaggagagccaggtggaggaaccactgagtcaggagagcgagatggaagaaccactgagtcaggagagccaggtggaggaaccactgagtcaggagagcgagatggaagaaccactgagtcaggagagcgagatggaagaactaccgagtgtgtagacggccaagtactcccctatctccgagagcagcgactaagttcaggcccagccgccagacctcagagatctcaccagcggggtgcttgccattctgatgataataaaatgaatgtgttgcaaattgaaaaaaaaa

SEQ ID NO: 626 - DNA, 2378 bp, Homo Sapiens
  NM_001001895
gtgcaggcgagcttcttggcctaagggcaggaagagatggcagcgggggagacgcagctctacgccaaggtctccaacaagctcaagagccgcagcagcccctcgctcctggagcccctcctggccatgggcttcccggtgcacaccgcgctgaaagcgttggcagccacggggaggaagacggcggaggaggccttggcctggctgcatgatcattgcaatgacccttccctagacgaccccatcccccaggagtatgcccttttcctctgtccaacggggcccctgctggaaaaacttcaagagttctggagagagagcaagcgccagtgtgcaaagaacagagctcatgaggtcttcccacacgtgacactctgtgacttcttcacgtgtgaagaccagaaggtggaatgcctgtacgaggcgctgaagagagctggagacaggctcctgggctccttccccacggccgtgcctctggctctccactcctccatcagctacctcggcttcttcgtcagtggcagccccgcagacgtcatccgggaattcgccatgaccttcgccacggaagcatctctcttagcagactgctccgtgaagccttgcaccaaacagctgcatctgaccttggcccacaagttctacccccaccaccagaggacgctggagcagctggccagagccatccccctgggccacagctgccagtggaccgcagcactctactcccgagacatgcgctttgtgcactaccagaccctgagagccctattccagtacaaaccccagaacgtggatgagctgacgctaagtcctggtgactacatctttgtggaccccacgcagcaggacgaagccagcgagggctgggtgattgggatctcacagcggacgggctgccggggcttcctgccggaaaactacacggatcgagccagtgagtctgacacgtgggtgaagcacaggatgtacaccttcagtctagccacagacctgaactccagaaaggatggtgaagccagcagcagatgcagcggggaatttcttccacaaacggcaaggagtcttagcagcttacaggccttgcaggctaccgttgcaaggaagagcgtgctggtggttcgccacggggagagagtggatcagatcttcgggaaggcatggctgcagcaatgctccactcctgatgggaaatactacaggccagacctgaatttcccctgcagtctgccaagacggagtcgtgggatcaaagactttgaaaacgatcccccattatcatcgtgtggcattttccagtccagaattgcaggggacgcgctactggacagtggtatcagaatcagctctgtgtttgcctccccagccctccgctgtgtgcagacggccaaactcatcctggaagaactcaaactggagaaaaaaatcaagatacgagtggaacctggaatctttgaatggacaaaatgggaagctggcaaaaccaccccaaccctcatgagcctggaagagctgaaagaggcaaatttcaacattgacactgattacaggcccgcgtttcccctgtccgccctcatgccggccgagagctaccaggagtacatggacaggtgcacggcgagcatggtgcaaatcgtcaacacctgtccacaggacacgggtgtcatcctaattgtgagtcacggctccactctggactcctgcacgcggccactgctcgggctgccgccccgggaatgtggggattttgcccaactcgtgagaaagatcccttccctgggcatgtgcttctgtgaagaaaataaagaggaaggaaaatgggagttggtgaacccaccggtgaagaccctgacccacggggcgaacgcagcatttaactggaggaactggatctcaggcaactgagagccacggtgatgttgtcataacctcagagtggagaggcagaaaccatgtgcagaggctgggagatgctgctgtttccagaggcgtcttagtctcacccaatgtgatttgtagaagcacgagacgcacttttatatcccggaatatttccctccggctttcgcctttgtaactcccatctgtggacccatcgtccaccagcccagctgcggggagcacagggcaggtggctgggtgaggatgccgccctgcagcatgtacaccgagtgtctgcagctggggacacaactgcccgggactctaacttccaggaattaaagactcaccacacacgaaggatctaaccacttcattttccatggtctaatcattaaattcccaatcgttttttctttttctgggtccatcactctttagccatatccacatgggctaaaacaggtgtaatagtcaataaaatggtcccagaa

SEQ ID NO: 627 - DNA, 3891 bp, Homo Sapiens
  NM_001001974
gaaactcggcccgccacgccgcagggacccgcgcggggcctgccgggactcgtagtctctgcgggctgggagcgcccgctccggaatctcagccgccgtctgagggctgaggcagcgtggggacgcgtgcgcagtgcgcgggctggccgtcgcggacgccgctccgggcagccgagcctctgtgggagccggggccgcggcggcgcgggtgctccgggccgaggccgcgtgtaatgttcaagctcagaaatgccttatgtggatcgtcagaatcgcatttgtggttttctagacattgaagaaaatgaaaacagtgggaaatttcttcgaaggtacttcatactggataccagagaagatagtttcgtgtggtacatggataatccacagaacctaccttctggatcatcacgtgttggagccattaagcttacctacatttcaaaggttagcgatgctactaagctaaggccaaaggcggagttctgttttgttatgaatgcaggaatgaggaagtacttcctacaagccaatgatcagcaggacctagtggaatgggtaaatgtgttaaacaaagctataaaaattacagtaccaaagcagtcagactcacagcctaattctgataacctaagtcgccatggtgaatgtgggaaaaagcaagtgtcttacagaactgatattgttggtggcgtacccatcattactcccactcagaaagaagaagtaaatgaatgtggtgaaagtattgacagaaataatctgaaacggtcacaaagccatcttccttactttactcctaaaccacctcaagatagtgcggttatcaaagctggatattgtgtaaaacaaggagcagtgatgaaaaactggaagagaagatattttcaattggatgaaaacacaataggctacttcaaatctgaactggaaaaggaacctcttcgtgtaataccacttaaagaggttcataaagtccaggaatgtaagcaaagcgacataatgatgagggacaacctctttgaaattgtaacaacgtctcgaactttctatgtgcaggctgatagccctgaagagatgcacagttggattaaagcagtctctggcgccattgtagcacagcggggtcccggcagatctgcgtcttctgagcatccccccggtccttcagaatccaaacacgctttccgtcctaccaacgcagccaccgccacctcacattccacagcctctcgcagcaactctttggtctcaacctttaccatggagaagcgaggattttacgagtctcttgccaaggtcaagccagggaacttcaaggtccagactgtctctccaagagaaccagcttccaaagtgactgaacaagctctgttaagacctcaaagtaaaaatggccctcaggaaaaagattgtgacctagtagacttggacgatgcgagccttccggtcagtgacgtgtgaggcagaagcgcacggagcctgcctgcctctgccgtcctcagtttcctttcatgaggcttctagccaaagatgataaagggggaaatggtttttagtgcgtatattatactgcctcttaggtgtactctttataagctggtaaaccaagaatctagggagtggccaaactaaatataatttctttaaaaaagaaagaaaaaggaaaaatccaaaatatctcagtatcatctgtctgaagcattgtgtgttctcattcgggtggtaacaatgtatgtgtaatatttttttcttagtgattttgacagtttaaatgtttaacaacttaaagcattaaaaatgcttattaataactttggtcatttaaaaaatgctacaatgacttcctattaaaggttcaatatttacacattcttattggttgatattaccacatgaaatattgccagaccaagatacctaaactcatgatgtctgtggtgctgtaaaatttatactaaaatgtggactattttgaaattataaccatttttgatgccctgaatcttgaggtgacttattttgcatagaggatatggatagaccaacagtaagggttgtgggttataccggcatagagaaaagaagaaaactagaattgaaacaactgtgtcttagacatttgtttgaaaaagcttcatcaggccttggagcagtcactgctttattccgcaaaaattatttggtaggaaatttttgggagatctgattttcttatccaagttttgtaaatagttgttatttctatatttggattggtgaaagacctcaagtttatatgtaaagacataactgcccttagtcatgaaattgttgtgacctctactttttgtcactaatagcctacattcaagtgcctgtgttttttcatcttgtttaggaatgttttgagattaatgtgcttaaaagtcctacgtgactgattttaaacattgtgataaaattaattttcagtagaatagttgaatgtgttaagataggattttatgttagagataccagaatgctggtattctactacttgtgcaatatatatgttttaaaaaacaaatttgagaatacatttaatcatagggatatagatataagcacctctctaaagaatctttagtttccgacgttgaattatagaccagtttgagtaagtactgctttttttttttggagacgggctctcgctctgttgctcaggctggagtgcagtggcgtgatctcagctcactacagcctccacctcgtgggttcaaacagttgtgctgcctcagcttcccgagtagctaggattacaggtgcatgccaccacacctggctaatttttgtattttagtagagatggggtttcaccatgttggccaggctcgtctcgaactcctgacttcaggtgatccacccatctcagcctcccaaagtgctgggattacaggcgtgagccaccatgcccggcccataagtaccgtttttgaggttcagtcttaaacatttgctttaagaaaacagtcttgaatttcacatgctgctatttttatattttgccattttacagtactgttttgttttgaattcatgcatatcattgaaaatttctcgttttcattttcttagatgacttcttgtctgagacagaaaaatttcctactacagcagtgcagtccagaggttaagatgtattagaattatacaatatcagtttaaaaatctgtatgcataaagaatgcaccactcaacttttttattcataagctaatatttttttaaagttacattaagattttttctcttttgcagctacatttgaaagtgatagaataaagagattttaatgagttatcactttttcagctgatatattcattttaatggcttttttgaaagttcctttttcatgaacacacccgagaaatcttaaatagacactttgcaatatttaagaacctaatgctgtttaattttggtacagcttccacattgcatgttcactttagtatttgcaatttgatatatttcatggtggcaaaatattagctctgttttgggacattttaaaatagaactatccttgttcgatagcataggaaaatgttctggtgattgtcagggtctcctaatatttatctcaattcttttataagtctatggaaattatttaattattttaaaacgtacacacttttcttgtaaatatgtcacatctgagttcaaaaaaattactttgaataccttaatatttgctgcatttttttccgtatatataacatgtcttctttcagaatgggaatatatgtgtgcctcccaacatttactgttaaagtgtgttatctttatatgtcaaactggttgaacactgtaatgagaataaactgcacagagtttattctgacttaaaaaaaaaaa

SEQ ID NO: 628 - DNA, 3219 bp, Homo Sapiens
  NM_001001995
actgtaggcaccaccgggcgccgaatggctgttttctaactgggatcctcggtgacgtatggctgcctgccccttggcagctgtctttatggaccagtaggcagagcgaaattgacgctgacaagacttttgcatcttggaagggactgtaatctactgtagtgaagaacagagcctctcaatcagacgggtgtaaataagagacggaggggagtccaaaagaaaaggaagaggaggaaaaacaagtgtgtgttggggggaacagggggaaaagcatttttggtggatggtatgaagccagccatggaaactgcagccgaggaaaatactgaacaaagccaagagagaaaagtgaacagcagagctgaaatggaaattggcaggtaccactggatgtacccaggctcaaagaaccaccagtaccatcccgtgccaaccctgggggacagggctagccccttgagcagtccaggctgctttgaatgctgcatcaagtgtctgggaggagtcccctacgcctccctggtggccaccatcctctgcttctccggggtggccttattctgcggctgtgggcatgtggctctcgcaggcaccgtggcgattcttgagcaacacttctccaccaacgccagtgaccatgccttgctgagcgaggtgatacaactgatgcagtatgtcatctatggaattgcgtcctttttcttcttgtatgggatcattctgttggcagaaggcttttacaccacaagtgcagtgaaagaactgcacggtgagtttaaaacaaccgcttgtggccgatgcatcagtggaatgttcgttttcctcacctatgtgcttggagtggcctggctgggtgtgtttggtttctcagcggtgcccgtgtttatgttctacaacatatggtcaacttgtgaagtcatcaagtcaccgcagaccaacgggaccacgggtgtggagcagatctgtgtggatatccgacaatacggtatcattccttggaatgctttccccggaaaaatatgtggctctgccctggagaacatctgcaacacaaacgagttctacatgtcctatcacctgttcattgtggcctgtgcaggagctggtgccaccgtcattgccctgatccacttcctcatgatactgtcttctaactgggcttacttaaaggatgcgagcaaaatgcaggcttaccaggatatcaaagcaaaggaagaacaggaactgcaagatatccagtctcggtcaaaagaacaactcaattcttacacataaatgtttgccagagtgtttcggccgacgtatttacagctctgacaaatcatcagacagctgctctgcagtacagatgtgtatcccaccaaactaatgtagatgtacaaacacttcactgtctgtctcaagctgctgggatgtatctctaggaaaaccttccagtgggtaaatctttttctttagaacaaatattggaggtttcatgttagccattttaaaaggcaacactttgacaaaatgatcgttcatactttgggaatttgtggcatgttcacatttattgctagggcaattctaccaagacactcaatggaatatgtcacactccttaatagggacctgtgactccttaataaggacctgtgacatgcccagcatcaagggataagaccgtaaattcacatatatgccatctgtcctcaagtgttatctacataggaaataaaatggaattgatgtaaagttccatttctgacagctgacatttattaaactttggatcaaagataatgtgattcttatgattgatttctcaaactagcttttccctcccaagtccaggacccattaatttcctgagccaatcagaaatatatttttcaataatgctaaaattagctacaattctgctgaccctactattaaagaatctggatgctggactcactgacaagctttccagaagcaattttataacagatttcattttaacaaaatactgatccaattttcattattcttgagaaatgtcagctttgccttaatgagtatttgctttaaatttctaagaatttatatcataactagagacccaaatatctttcacagaattttgttccataaatgtttttcttaattattaagaagtgttaccttattaaaatgaccaccattctaaaccatttttcagtggtctggatacgaagtttacagtttcataccaactatctaaaacctaattgcaaattgaccacagacctctaacctcctacttttatagacttgaatacttaagtaatttaaattagggttggtatttcatttttttcttatctaaatcttagtttcctggaataataaagtttgatgttcagcaagagaactgcttgagtttaagccattttcaaaagaaacttgccttttacattattgtgttccagaacattaagtgactgtaggtactgggtattagtgatggtaaactttgtgttgctctttatgaaatgatccatataactgttgggtgcatcagtgcttttcaaaggggctgcttactatagggttaactatgtatattcattgttaagagttaacttgtggtttggctgtttcctggattttataacatacatgtgcagaaatgtattcaaatgaaaggaagcatacctttatcaagatgctattaaaattgaacatcaagtataatatttcatttggattctcttttttggttaatgcctaaaaatgcctatttgggatttttttttttttttaaattaagagaagctctcttctgtgtagaacagttgttccaaaatagcttagtgttttgttttcctgttgcatgacagatttaactattctttccagcagtggaggtgctgtcagagtccagtgttctagaagaggcagtgtctaaagcctaattttacttttctaattctggtagctattaccaggaatttttgaaagttttgtttaagtagtctaatattttttatgtaaagagcattaaattttgctatgtataaatttttgtaacctaacagtgaatcaatattttctatcagtgccaagggcttcctgtagttctattcaagtgttacaataaatatttgtagataatagtcaatacttgtgtatgcttattttaaagatctatttaggtggaaatagttgtggatgtactaagagtaatgaaataaaattatagcttcaaaa

SEQ ID NO: 629 - DNA, 2834 bp, Homo Sapiens
  NM_001001998
gtctcctcggccgacaagctctcgcgagacgagccgtgcaggctgaaaaaatggcgccacccagtacccgggagcccagggtcctgtcggcgaccagcgcaaccaaatccgacggagagatggtgctgccaggcttcccggacgccgacagctttgtgaagtttgctcttgggtccgtggtggcagtcaccaaggcatctgggggcctaccacagtttggcgatgagtatgatttttaccgaagttttcctggcttccaagcattttgcgaaacacagggagacaggttgcttcagtgcatgagcagagtaatgcagtaccatgggtgtcgcagcaacattaaggatcgaagtaaagtgactgagctggaagacaagtttgatttactagttgatgccaatgatgtaattctggagagagtgggtattttactggatgaagcctcaggtgtaaacaagaatcaacagcctgtcctccctgccggcttgcaggtccccaaaacggtagtgtccagctggaaccgtaaggcagcagaatatggcaaaaaagcaaaatctgaaactttccggctgcttcatgcaaaaaatatcatccgacctcagctcaagtttcgagagaagattgacaattccaacacaccatttcttcctaaaatcttcatcaaacccaatgctcagaaacctctccctcaagctctctctaaggaaaggcgggaacgcccacaggatcgtcctgaggacttggacgtcccccctgcactggctgatttcatccatcagcagagaacccagcaggttgagcaagacatgtttgcacatccttatcaatatgaactaaatcactttaccccagcagatgcagtgcttcaaaagccacaaccccagttatacagacctatagaagagacaccatgccatttcatatcctccctggatgaactcgtggaactcaacgaaaagctcttgaattgtcaggaatttgcagttgacttggagcaccactcttacaggagcttcctgggactgacctgcctgatgcaaatttctactcggacggaagacttcatcattgacaccctcgagcttcgaagtgacatgtacattctcaatgagagcctcacagacccagccatcgttaaggtctttcatggtgctgattcagacatagaatggctacagaaagactttgggttgtatgtagtaaacatgtttgatactcatcaggcagcacgccttcttaacctgggcaggcactcactcgatcatctcctgaaactctactgcaacgtggactcaaacaagcaatatcagctggctgattggagaatacgccctctgcccgaggagatgctcagctacgcccgggatgacacccattacctgctatatatctatgacaaaatgaggctggagatgtgggagcgcggcaacgggcagccggtgcagctgcaggtggtgtggcaacggagcagggacatctgcctcaagaaattcatcaaacctatcttcacggatgagtcctaccttgaactctataggaagcagaagaagcaccttaacacacagcagttgacagcctttcagctgctgtttgcctggagggataaaacagctcgcagggaagatgaaagttacggatatgtactgccaaaccacatgatgctgaaaatagctgaagaactgcctaaggaacctcagggcatcatagcttgctgcaacccagtaccgccccttgtgcggcagcagatcaacgaaatgcaccttttaatccagcaggcccgagagatgcccctgctcaagtctgaagttgcagccggagtgaagaagagcggaccgctgcccagtgctgagagattggagaatgttctctttggacctcacgactgctcccatgcccctccggatggctatccaatcatcccaaccagtggatctgtgccagttcagaagcaggcgagcctcttccctgatgaaaaagaagataacttgctgggtaccacatgcctgattgccacagctgtcatcacgttatttaatgaacctagtgctgaagacagtaaaaagggtccattgacagttgcacagaaaaaagcccagaacatcatggagtcctttgaaaatccatttaggatgtttctgccctcactgggacaccgtgctcccgtctctcaggcagcgaagttcgatccatcaaccaaaatctatgaaatcagcaaccgctggaagctggcccaggtacaagtacaaaaagactctaaagaagctgtcaagaagaaggcagctgagcaaacagctgcccgggaacaggcaaaggaggcgtgcaaagctgcagcagaacaggccatctccgtccgacagcaggtcgtgctagaaaatgctgcaaagaagagagagcgagcaacaagcgacccaaggaccacagaacagaaacaagagaagaaacgactcaaaatttccaagaagccaaaggacccagagccaccagaaaaagagtttacgccttacgactacagccagtcagacttcaaggcttttgctggaaacagcaaatccaaagtttcttctcagtttgatccaaataaacagaccccgtctggcaagaaatgcattgcagccaaaaaaattaaacagtcggtgggaaacaaaagcatgtcctttccaactggaaagtcagacagaggcttcaggtacaactggccacagagatagtcctggaagacacgtggcgcctgtggaccggaagcaccaaatgctggtgctgcttttgtacatacatatttttaaaccattaaaattcttcctgaagaaaaaaaaaaaaaaaaaaaaaaaaaaaaa

SEQ ID NO: 630 - DNA, 1956 bp, Homo Sapiens
  NM_001002000
gcgtttcggttcagtgacgtcgtaaattggaatgaggcatccagtttagcaacagcagagatgacgactctgcgattctgagagtccctggcgagcccgggctagcgaaaagtgggggcagaacgaactacatctcccatcgtgccaggaggcggtcccgcccgtttccccctgggagttgtagtctaaccccctcggatccaacagcaacctcagtgcgtgaactctgttatccagaaggcctcgccctgccgccgccgaagctggaattcgtcggctagtagttctcgccggcaactagaggaacctgttggcgtggcccagaaggcttagcgggattgcacgaggttagttgctaagcaaggtggtctttggtcaactgccgcctggaccaaggcaacaggaaccctcagattcatcgctaccccgaggctaagcgccatgcctcatattgacaacgatgtgaaactggacttcaaggatgtccttttgaggcccaaacgcagtacccttaagtctcgaagtgaggtggatctcacaagatccttttcatttcggaactcaaagcagacatactctggggttcccatcattgctgccaatatggatactgtgggcacctttgagatggccaaggttctctgtaagttctctctcttcactgctgtccataagcactatagcctcgttcagtggcaagagtttgctggccagaatcctgactgtcttgagcatctggctgccagctcaggcacaggctcttctgactttgagcagctggaacagatcctggaagctattccccaggtgaagtatatatgcctggatgtggcaaatggctactctgaacactttgttgaatttgtaaaagatgtacggaagcgcttcccccagcacaccatcatggcagggaatgtggtaacaggagagatggtagaagagctcatcctttctggggctgacatcatcaaagtgggaattgggccaggctctgtgtgtactactcggaagaaaactggagtggggtatccacagctcagcgcagtgatggagtgtgcagatgctgctcatggcctcaaaggccacatcatttcagatggaggttgcagctgtcctggggatgtggccaaggcttttggggcaggagctgacttcgtgatgctgggtggcatgctggctgggcacagtgagtcaggtggtgagctcatcgagagggatggcaagaagtacaagctcttctatggaatgagttctgaaatggccatgaagaagtatgctgggggcgtggctgagtacagagcctcagagggaaagacagtggaagttccttttaaaggagatgtggaacataccatccgagacatcctaggagggatccgctctacgtgtacctatgtgggagcagctaagctcaaagagttgagcaggagaactaccttcatccgagtcacccagcaggtgaatccaatcttcagtgaggcgtgctagacctgagcagttctaccctcccaaggcaccagtactctaccatggggcatcccaagtggggtcctcacccatcccagctactgcagctctgtattactttgtcatttcctgttgtctcactcctgagggctcctgcagtaactctgtacttctctatctgcacacacaaaatgcccaaggcactcactggggaggaagcaaggaagcaaacagtctgagaaaatgatgcaagaaaatcaaatgggaatctggggacccaacacaacatcctgaagattattaaaaggaaaagatgctgattggtacataaatcttttacatggccttggtctagaggaggcaggcttttagaatcatgttttgttaatccgcttcactaaattggaccttcacatatctaaaaagctctgaagtgtttgtatatttgaaatacctcaataaagagagagctcattgactgtaaaaaaa

SEQ ID NO: 631 - DNA, 1631 bp, Homo Sapiens
  NM_001002002
tcgccaacattccttcgttcccctaaatcagcctcttgccccattgctctttgcaggggtagaagaaggaagtgtagcgggccctcagattcatcgctaccccgaggctaagcgccatgcctcatattgacaacgatgtgaaactggacttcaaggatgtccttttgaggcccaaacgcagtacccttaagtctcgaagtgaggtggatctcacaagatccttttcatttcggaactcaaagcagacatactctggggttcccatcattgctgccaatatggatactgtgggcacctttgagatggccaaggttctctgtaagttctctctcttcactgctgtccataagcactatagcctcgttcagtggcaagagtttgctggccagaatcctgactgtcttgagcatctggctgccagctcaggcacaggctcttctgactttgagcagctggaacagatcctggaagctattccccaggtgaagtatatatgcctggatgtggcaaatggctactctgaacactttgttgaatttgtaaaagatgtacggaagcgcttcccccagcacaccatcatggcagggaatgtggtaacaggagagatggtagaagagctcatcctttctggggctgacatcatcaaagtgggaattgggccaggctctgtgtgtactactcggaagaaaactggagtggggtatccacagctcagcgcagtgatggagtgtgcagatgctgctcatggcctcaaaggccacatcatttcagatggaggttgcagctgtcctggggatgtggccaaggcttttggggcaggagctgacttcgtgatgctgggtggcatgctggctgggcacagtgagtcaggtggtgagctcatcgagagggatggcaagaagtacaagctcttctatggaatgagttctgaaatggccatgaagaagtatgctgggggcgtggctgagtacagagcctcagagggaaagacagtggaagttccttttaaaggagatgtggaacataccatccgagacatcctaggagggatccgctctacgtgtacctatgtgggagcagctaagctcaaagagttgagcaggagaactaccttcatccgagtcacccagcaggtgaatccaatcttcagtgaggcgtgctagacctgagcagttctaccctcccaaggcaccagtactctaccatggggcatcccaagtggggtcctcacccatcccagctactgcagctctgtattactttgtcatttcctgttgtctcactcctgagggctcctgcagtaactctgtacttctctatctgcacacacaaaatgcccaaggcactcactggggaggaagcaaggaagcaaacagtctgagaaaatgatgcaagaaaatcaaatgggaatctggggacccaacacaacatcctgaagattattaaaaggaaaagatgctgattggtacataaatcttttacatggccttggtctagaggaggcaggcttttagaatcatgttttgttaatccgcttcactaaattggaccttcacatatctaaaaagctctgaagtgtttgtatatttgaaatacctcaataaagagagagctcattgactgtaaaaaaa

SEQ ID NO: 632 - DNA, 1688 bp, Homo Sapiens
  NM_001002010
cgtgatgctctgggatcccgcgcttccgagactcgcagtctacgcgagctgcctgtttttttcctgcttggacgcgcatgagggccccgtccatggaccgcgcggccgtggcgagggtgggcgcggtagcgagcgccagcgtgtgcgccctggtggcgggggtggtgctggctcagtacatattcaccttgaagaggaagacggggcggaagaccaagatcatcgagatgatgccagaattccagaaaagttcagttcgaatcaagaaccctacaagagtagaagaaattatctgtggtcttatcaaaggaggagctgccaaacttcagataataacggactttgatatgacactcagtagattttcatataaagggaaaagatgcccaacatgtcataatatcattgacaactgtaagctggttacagatgaatgtagaaaaaagttattgcaactaaaggaaaaatattacgctattgaagttgatcctgttcttactgtagaagagaagtacccttatatggtggaatggtatactaaatcacatggtttgcttgttcagcaagctttaccaaaagctaaacttaaagaaattgtggcagaatctgacgttatgctcaaagaaggatatgagaatttctttgataagctccaacaacatagcatccccgtgttcatattttcggctggaatcggcgatgtactagaggaagttattcgtcaagctggtgtttatcatcccaatgtcaaagttgtgtccaattttatggattttgatgaaactggggtgctcaaaggatttaaaggagaactaattcatgtatttaacaaacatgatggtgccttgaggaatacagaatatttcaatcaactaaaagacaatagtaacataattcttctgggagactcccaaggagacttaagaatggcagatggagtggccaatgttgagcacattctgaaaattggatatctaaatgatagagtggatgagcttttagaaaagtacatggactcttatgatattgttttagtacaagatgaatcattagaagtagccaactctattttacagaagattctataaacaagcattctccaagaagacctctctcctgtgggtgcaattgaactgttcatccgttcatcttgctgagagacttatttataatatatccttactctcgaagtgttccctttgtataactgaagtattttcagatatggtgaatgcattgactggaagctccttttctccacctctctcaacacactcctcaccgtatcttttaacccatttaaaaaaaaaaaaaagctaaaattagaaaaataactccctacttttccaaagtgaattttgtagtttaatgttatcatgcagcttttgaggagtcttttacactgggaaagtttgtagaaattttaaaataagttttatgaaatggtgaaataatatgcatgattttaagtattgccatttttgtaatttgggttattatgctgatggtatcaccatctcttgaaattgtgttaggtttggttattttgtctggggaaaaaatatttactggaaaagactagcagttagtgttggaaaaacctggtggtgtttacaatgttgctaatcattacaaaacattctatattgaagcactgataataaatatgaaatgcaaaacctttttaa

SEQ ID NO: 633 - DNA, 1637 bp, Homo Sapiens
  NM_001002019
cccacgtggtccggctccggctcagtcagccgcgtcgcgaatggggcaggagcgagcctctctggtcccgacgcgggtggcccgggtctcctcgactcctgaggaaagcccaccgggcggggcgggaggtgaagaggctggggaagtcagagctcgccgcgcatggccgggaacgcggagccgccgcccgccggagccgcatgcccccaggaccggaggtcctgcagcggccgggccgggggcgaccgcgtctgggaggacggagaacatccggcgaagaagctcaagagcggtggcgacgaggagcggcgcgagaagccgcccaagcggaagatcgtgctgctcatggcctattcgggcaagggctaccacggcatgcagaggaatgtcgggtcctcacaattcaaaacaattgaagatgacttggtgtccgccctcgtccggtcaggctgtattcctgaaaatcatggtgaggacatgaggaaaatgtccttccagcgctgcgcccggacagacaagggtgtgtccgcagccggccaggtggtatccctgaaggtgtggctgattgacgacattctagaaaagatcaacagccaccttccctctcacattcggattctgggactgaagcgggtcacgggcgggtttaactccaagaacagatgtgatgccaggacctattgctacctgctgcccacgtttgcctttgcgcacaaggaccgggacgttcaggatgagacctaccgcctgagcgccgagacgctgcagcaggtcaacaggctcctggcctgctacaagggcacgcacaacttccacaatttcacctcgcagaaggggccgcaggatcccagtgcctgccgctacatcctggagatgtactgcgaggaaccctttgtgcgggagggcctggagtttgcggtgatcagggtgaagggccagagcttcatgatgcatcagatccggaagatggtcggcctggtggtggccattgtgaagggttatgcccctgagagcgtgctggagcgcagctggggcacagagaaggtggacgtgcccaaggcgcccggactcggcctggtcctggagagggtgcacttcgagaagtacaaccagcgctttggcaacgatgggctgcatgagccgctggactgggcgcaggaggaaggaaaggtcgcagccttcaaggaggagcacatctaccccaccatcatcggcaccgagcgggacgaacgctccatggcccagtggctgagcaccttgcccatccacaacttcagtgccaccgctctcacggcaggtggcacgggcgccaaggtgcccagtcccctggaaggcagtgaaggggacggagacactgactgaggcgatgggagctgcccaccagagtgcctctgagcagctcacagtgtgtgcccagatgtgccacccctgtgggcagcaagaagctgggatcgctgcagccatgttttcccggccatgccggcgttgtaacctcaggaccttcccttgtaggaacagcctttctcgaatctgttttcagctcttgcattgcatagatgaacctcagcatgtaaagaactatttttttaaagaagtgattttcttattaaacaagtacaaattttgcttagtcaatc

SEQ ID NO: 634 - DNA, 3350 bp, Homo Sapiens
  NM_001002026
agaattgcgctgtccacttgtcgtgtggctctgtgtcgacactgtgcgccaccatggccgtgactgcctgtcagggcttggggttcgtggtttcactgattgggattgcgggcatcattgctgccacctgcatggaccagtggagcacccaagacttgtacaacaaccccgtaacagctgttttcaactaccaggggctgtggcgctcctgtgtccgagagagctctggcttcaccgagtgccggggctacttcaccctgctggggctgccagccatgctgcaggcagtgcgagccctgatgatcgtaggcatcgtcctgggtgccattggcctcctggtatccatctttgccctgaaatgcatccgcattggcagcatggaggactctgccaaagccaacatgacactgacctccgggatcatgttcattgtctcaggtctttgtgcaattgctggagtgtctgtgtttgccaacatgctggtgactaacttctggatgtccacagctaacatgtacaccggcatgggtgggatggtgcagactgttcagaccaggtacacatttggtgcggctctgttcgtgggctgggtcgctggaggcctcacactaattgggggtgtgatgatgtgcatcgcctgccggggcctggcaccagaagaaaccaactacaaagccgtttcttatcatgcctcaggccacagtgttgcctacaagcctggaggcttcaaggccagcactggctttgggtccaacaccaaaaacaagaagatatacgatggaggtgcccgcacagaggacgaggtacaatcttatccttccaagcacgactatgtgtaatgctctaagacctctcagcacgggcggaagaaactcccggagagctcacccaaaaaacaaggagatcccatctagatttcttcttgcttttgactcacagctggaagttagaaaagcctcgatttcatctttggagaggccaaatggtcttagcctcagtctctgtctctaaatattccaccataaaacagctgagttatttatgaattagaggctatagctcacattttcaatcctctatttctttttttaaatataactttctactctgatgagagaatgtggttttaatctctctctcacattttgatgatttagacagactccccctcttcctcctagtcaataaacccattgatgatctatttcccagcttatccccaagaaaacttttgaaaggaaagagtagacccaaagatgttattttctgctgtttgaattttgtctccccacccccaacttggctagtaataaacacttactgaagaagaagcaataagagaaagatatttgtaatctctccagcccatgatctcggttttcttacactgtgatcttaaaagttaccaaaccaaagtcattttcagtttgaggcaaccaaacctttctactgctgttgacatcttcttattacagcaacaccattctaggagtttcctgagctctccactggagtcctctttctgtcgcgggtcagaaattgtccctagatgaatgagaaaattattttttttaatttaagtcctaaatatagttaaaataaataatgttttagtaaaatgatacactatctctgtgaaatagcctcacccctacatgtggatagaaggaaatgaaaaaataattgctttgacattgtctatatggtactttgtaaagtcatgcttaagtacaaattccatgaaaagctcactgatcctaattctttccctttgaggtctctatggctctgattgtacatgatagtaagtgtaagccatgtaaaaagtaaataatgtctgggcacagtggctcacgcctgtaatcctagcactttgggaggctgaggaggaaggatcacttgagcccagaagttcgagactagcctgggcaacatggagaagccctgtctctacaaaatacagagagaaaaaatcagccagtcatggtggcctacacctgtagtcccagcattccgggaggctgaggtgggaggatcacttgagcccagggaggttggggctgcagtgagccatgatcacaccactgcactccagccaggtgacatagcgagatcctgtctaaaaaaataaaaaataaataatggaacacagcaagtcctaggaagtaggttaaaactaattctttaaaaaaaaaaaaaagttgagcctgaattaaatgtaatgtttccaagtgacaggtatccacatttgcatggttacaagccactgccagttagcagtagcactttcctggcactgtggtcggttttgttttgttttgctttgtttagagacggggtctcactttccaggctggcctcaaactcctgcactcaagcaattcttctaccctggcctcccaagtagctggaattacaggtgtgcgccatcacaactagctggtggtcagttttgttactctgagagctgttcacttctctgaattcacctagagtggttggaccatcagatgtttgggcaaaactgaaagctctttgcaaccacacaccttccctgagcttacatcactgcccttttgagcagaaagtctaaattccttccaagacagtagaattccatcccagtaccaaagccagataggccccctaggaaactgaggtaagagcagtctctaaaaactacccacagcagcattggtgcaggggaacttggccattaggttattatttgagaggaaagtcctcacatcaatagtacatatgaaagtgacctccaaggggattggtgaatactcataaggatcttcaggctgaacagactatgtctggggaaagaacggattatgccccattaaataacaagttgtgttcaagagtcagagcagtgagctcagaggcccttctcactgagacagcaacatttaaaccaaaccagaggaagtatttgtggaactcactgcctcagtttgggtaaaggatgagcagacaagtcaactaaagaaaaaagaaaagcaaggaggagggttgagcaatctagagcatggagtttgttaagtgctctctggatttgagttgaagagcatccatttgagttgaaggccacagggcacaatgagctctcccttctaccaccagaaagtccctggtcaggtctcaggtagtgcggtgtggctcagctgggtttttaattagcgcattctctatccaacatttaattgtttgaaagcctccatatagttagattgtgctttgtaattttgttgttgttgctctatcttattgtatatgcattgagtattaacctgaatgttttgttacttaaatattaaaaacactgttatcctacagtt

SEQ ID NO: 635 - DNA, 593 bp, Homo Sapiens
  NM_001002027
caggacacgtgggtgggggaagctgagcgctgagaccaagggctaaagctgggagactgaaaaaatgcagaccgccggggcattattcatttctccagctctgatccgctgttgtaccaggggtctaatcaggcctgtgtctgcctccttcttgaatagcccagtgaattcatctaaacagccttcctacagcaacttcccactccaggtggccagacgggagttccagaccagtgttgtctcccgggacattgacacagcagccaagtttattggtgctggggcagccacagttggtgtggctggttcaggggctggcattggaaccgtgtttggcagcttgatcattggctatgccaggaacccgtctctcaagcagcagctcttctcctatgccattcttggctttgccctgtctgaggccatggggcttttctgtttgatggtcgccttcctcatcctcttcgccatgtgaggctccatggggggtcaccggcctgttgctactgcaactccacaccattcttggtgctggggtgtgttaagctttaccattaaacacaacgtttctctaaaaaaaaaaaaaaaaaaaa

SEQ ID NO: 636 - DNA, 3199 bp, Homo Sapiens
  NM_001002235
tgggcaggaactgggcactgtgcccagggcatgcactgcctccacgcagcaaccctcagagtcctgagctgaaccaagaaggaggagggggtcgggcctccgaggaaggcctagccgctgctgctgccaggaattccaggttggaggggcggcaacctcctgccagccttcaggccactctcctgtgcctgccagaagagacagagcttgaggagagcttgaggagagcaggaaaggacaatgccgtcttctgtctcgtggggcatcctcctgctggcaggcctgtgctgcctggtccctgtctccctggctgaggatccccagggagatgctgcccagaagacagatacatcccaccatgatcaggatcacccaaccttcaacaagatcacccccaacctggctgagttcgccttcagcctataccgccagctggcacaccagtccaacagcaccaatatcttcttctccccagtgagcatcgctacagcctttgcaatgctctccctggggaccaaggctgacactcacgatgaaatcctggagggcctgaatttcaacctcacggagattccggaggctcagatccatgaaggcttccaggaactcctccgtaccctcaaccagccagacagccagctccagctgaccaccggcaatggcctgttcctcagcgagggcctgaagctagtggataagtttttggaggatgttaaaaagttgtaccactcagaagccttcactgtcaacttcggggacaccgaagaggccaagaaacagatcaacgattacgtggagaagggtactcaagggaaaattgtggatttggtcaaggagcttgacagagacacagtttttgctctggtgaattacatcttctttaaaggcaaatgggagagaccctttgaagtcaaggacaccgaggaagaggacttccacgtggaccaggtgaccaccgtgaaggtgcctatgatgaagcgtttaggcatgtttaacatccagcactgtaagaagctgtccagctgggtgctgctgatgaaatacctgggcaatgccaccgccatcttcttcctgcctgatgaggggaaactacagcacctggaaaatgaactcacccacgatatcatcaccaagttcctggaaaatgaagacagaaggtctgccagcttacatttacccaaactgtccattactggaacctatgatctgaagagcgtcctgggtcaactgggcatcactaaggtcttcagcaatggggctgacctctccggggtcacagaggaggcacccctgaagctctccaaggccgtgcataaggctgtgctgaccatcgacgagaaagggactgaagctgctggggccatgtttttagaggccatacccatgtctatcccccccgaggtcaagttcaacaaaccctttgtcttcttaatgattgaacaaaataccaagtctcccctcttcatgggaaaagtggtgaatcccacccaaaaataactgcctctcgctcctcaacccctcccctccatccctggccccctccctggatgacattaaagaagggttgagctggtccctgcctgcatgtgactgtaaatccctcccatgttttctctgagtctccctttgcctgctgaggctgtatgtgggctccaggtaacagtgctgtcttcgggccccctgaactgtgttcatggagcatctggctgggtaggcacatgctgggcttgaatccaggggggactgaatcctcagcttacggacctgggcccatctgtttctggagggctccagtcttccttgtcctgtcttggagtccccaagaaggaatcacaggggaggaaccagataccagccatgaccccaggctccaccaagcatcttcatgtccccctgctcatcccccactcccccccacccagagttgctcatcctgccagggctggctgtgcccaccccaaggctgccctcctgggggccccagaactgcctgatcgtgccgtggcccagttttgtggcatctgcagcaacacaagagagaggacaatgtcctcctcttgacccgctgtcacctaaccagactcgggccctgcacctctcaggcacttctggaaaatgactgaggcagattcttcctgaagcccattctccatggggcaacaaggacacctattctgtccttgtccttccatcgctgccccagaaagcctcacatatctccgtttagaatcaggtcccttctccccagatgaagaggagggtctctgctttgttttctctatctcctcctcagacttgaccaggcccagcaggccccagaagaccattaccctatatcccttctcctccctagtcacatggccataggcctgctgatggctcaggaaggccattgcaaggactcctcagctatgggagaggaagcacatcacccattgacccccgcaacccctccctttcctcctctgagtcccgactggggccacatgcagcctgacttctttgtgcctgttgctgtccctgcagtcttcagagggccaccgcagctccagtgccacggcaggaggctgttcctgaatagcccctgtggtaagggccaggagagtccttccatcctccaaggccctgctaaaggacacagcagccaggaagtcccctgggcccctagctgaaggacagcctgctccctccgtctctaccaggaatggccttgtcctatggaaggcactgccccatcccaaactaatctaggaatcactgtctaaccactcactgtcatgaatgtgtacttaaaggatgaggttgagtcataccaaatagtgatttcgatagttcaaaatggtgaaattagcaattctacatgattcagtctaatcaatggataccgactgtttcccacacaagtctcctgttctcttaagcttactcactgacagcctttcactctccacaaatacattaaagatatggccatcaccaagccccctaggatgacaccagacctgagagtctgaagacctggatccaagttctgacttttccccctgacagctgtgtgaccttcgtgaagtcgccaaacctctctgagccccagtcattgctagtaagacctgcctttgagttggtatgatgttcaagttagataacaaaatgtttatacccattagaacagagaataaatagaactacatttcttgca

SEQ ID NO: 637 - DNA, 3513 bp, Homo Sapiens
  NM_001002236
tgggcaggaactgggcactgtgcccagggcatgcactgcctccacgcagcaaccctcagagtcctgagctgaaccaagaaggaggagggggtcgggcctccgaggaaggcctagccgctgctgctgccaggaattccaggttggaggggcggcaacctcctgccagccttcaggccactctcctgtgcctgccagaagagacagagcttgaggagagcttgaggagagcaggaaagggcggcagtaagtcttcagcatcaggcattttggggtgactcagtaaatggtagatcttgctaccagtggaacagccactaaggattctgcagtgagagcagagggccagctaagtggtactctcccagagactgtctgactcacgccaccccctccaccttggacacaggacgctgtggtttctgagccaggtacaatgactcctttcgcagcctcccccgttgcccctctggatccactgcttaaatacggacgaggacagggccctgtctcctcagcttcaggcaccaccactgacctgggacagtgaatcgacaatgccgtcttctgtctcgtggggcatcctcctgctggcaggcctgtgctgcctggtccctgtctccctggctgaggatccccagggagatgctgcccagaagacagatacatcccaccatgatcaggatcacccaaccttcaacaagatcacccccaacctggctgagttcgccttcagcctataccgccagctggcacaccagtccaacagcaccaatatcttcttctccccagtgagcatcgctacagcctttgcaatgctctccctggggaccaaggctgacactcacgatgaaatcctggagggcctgaatttcaacctcacggagattccggaggctcagatccatgaaggcttccaggaactcctccgtaccctcaaccagccagacagccagctccagctgaccaccggcaatggcctgttcctcagcgagggcctgaagctagtggataagtttttggaggatgttaaaaagttgtaccactcagaagccttcactgtcaacttcggggacaccgaagaggccaagaaacagatcaacgattacgtggagaagggtactcaagggaaaattgtggatttggtcaaggagcttgacagagacacagtttttgctctggtgaattacatcttctttaaaggcaaatgggagagaccctttgaagtcaaggacaccgaggaagaggacttccacgtggaccaggtgaccaccgtgaaggtgcctatgatgaagcgtttaggcatgtttaacatccagcactgtaagaagctgtccagctgggtgctgctgatgaaatacctgggcaatgccaccgccatcttcttcctgcctgatgaggggaaactacagcacctggaaaatgaactcacccacgatatcatcaccaagttcctggaaaatgaagacagaaggtctgccagcttacatttacccaaactgtccattactggaacctatgatctgaagagcgtcctgggtcaactgggcatcactaaggtcttcagcaatggggctgacctctccggggtcacagaggaggcacccctgaagctctccaaggccgtgcataaggctgtgctgaccatcgacgagaaagggactgaagctgctggggccatgtttttagaggccatacccatgtctatcccccccgaggtcaagttcaacaaaccctttgtcttcttaatgattgaacaaaataccaagtctcccctcttcatgggaaaagtggtgaatcccacccaaaaataactgcctctcgctcctcaacccctcccctccatccctggccccctccctggatgacattaaagaagggttgagctggtccctgcctgcatgtgactgtaaatccctcccatgttttctctgagtctccctttgcctgctgaggctgtatgtgggctccaggtaacagtgctgtcttcgggccccctgaactgtgttcatggagcatctggctgggtaggcacatgctgggcttgaatccaggggggactgaatcctcagcttacggacctgggcccatctgtttctggagggctccagtcttccttgtcctgtcttggagtccccaagaaggaatcacaggggaggaaccagataccagccatgaccccaggctccaccaagcatcttcatgtccccctgctcatcccccactcccccccacccagagttgctcatcctgccagggctggctgtgcccaccccaaggctgccctcctgggggccccagaactgcctgatcgtgccgtggcccagttttgtggcatctgcagcaacacaagagagaggacaatgtcctcctcttgacccgctgtcacctaaccagactcgggccctgcacctctcaggcacttctggaaaatgactgaggcagattcttcctgaagcccattctccatggggcaacaaggacacctattctgtccttgtccttccatcgctgccccagaaagcctcacatatctccgtttagaatcaggtcccttctccccagatgaagaggagggtctctgctttgttttctctatctcctcctcagacttgaccaggcccagcaggccccagaagaccattaccctatatcccttctcctccctagtcacatggccataggcctgctgatggctcaggaaggccattgcaaggactcctcagctatgggagaggaagcacatcacccattgacccccgcaacccctccctttcctcctctgagtcccgactggggccacatgcagcctgacttctttgtgcctgttgctgtccctgcagtcttcagagggccaccgcagctccagtgccacggcaggaggctgttcctgaatagcccctgtggtaagggccaggagagtccttccatcctccaaggccctgctaaaggacacagcagccaggaagtcccctgggcccctagctgaaggacagcctgctccctccgtctctaccaggaatggccttgtcctatggaaggcactgccccatcccaaactaatctaggaatcactgtctaaccactcactgtcatgaatgtgtacttaaaggatgaggttgagtcataccaaatagtgatttcgatagttcaaaatggtgaaattagcaattctacatgattcagtctaatcaatggataccgactgtttcccacacaagtctcctgttctcttaagcttactcactgacagcctttcactctccacaaatacattaaagatatggccatcaccaagccccctaggatgacaccagacctgagagtctgaagacctggatccaagttctgacttttccccctgacagctgtgtgaccttcgtgaagtcgccaaacctctctgagccccagtcattgctagtaagacctgcctttgagttggtatgatgttcaagttagataacaaaatgtttatacccattagaacagagaataaatagaactacatttcttgca

SEQ ID NO: 638 - DNA, 4501 bp, Homo Sapiens
  NM_001002259
gtcggtgcctgcagggctctccgtggccgctcgggagaggtgctcttcgctcaggctcccccggagacttgagggggtgcgcgctggcgtgcatggggcctgttctgtccttggtttggggatgctcctaaggggggagaaagggatacctcgggtgcttggaggtcgagagacggatacgtaagtgcgcaagggccactgattagggcacgggaagggctcgctagaatgagctcttaaactggttgggtgtaagcggttttgggctagtctaaaccaaacaactgagaataaacgcggggttcctgcaggttgagagagtacctgtctgcaaatgtccagtagtgatggattgccttgtaggccccagagcaatcggggaagttagcattcttgttcaagaagctgctggttcacttagagctataaaagaatgttgtgagtttggattttcttccaaacgttcaggattgaggttagggctggtggtgagggatcatgtaaagaggtttgagtggctcagccttaggtcccggtgtggaaagcttattcttttggtgtcatcacgtggccgtgggaattatttagaatgtgatctgccctcatgagaagaaaggagctctgaagccgttgcagttcttcctccctatgtggaaaatcgaatttctggaaacatcctccgtattgggagattttgcctatgtaaaggctatccttattggctagcggcactaattactttaaaagtaggatggaagtacaagtatctcaagcatcattgggtttcgagctcacttctgtggaaaagagtttaagggagtggtctagactttccagggaagttattgcctggctgtgtccctctagtcctaattttatacttaactttcccccacctccttcagcctcatctgtttcaatggtgcaactcttttcatccccttttggttaccagtcaccttcaggccattcagaggaggaaagagaggggaatatgaagtcagccaagccccaagtgaaccacagtcagcatggggaaagccagcgggccttgagccccctgcagtctactctgagttctgctgcatctccttcccaagcgtatgagacctatattgaaaatggactcatatgccttaaacacaaaattagaaacatcgagaaaaagaagctcaaactggaggattataaggatcgcctgaaaagtggagagcatcttaatccagaccagttggaagctgtagagaaatatgaagaagtgctacataatttggaatttgccaaggagcttcaaaaaaccttttctgggttgagcctagatctactaaaagcgcaaaagaaggcccagagaagggagcacatgctaaaacttgaggctgagaagaaaaagcttcgaactatacttcaagttcagtatgtattgcagaacttgacacaggagcacgtacaaaaagacttcaaagggggtttgaatggtgcagtgtatttgccttcaaaagaacttgactacctcattaagttttcaaaactgacctgccctgaaagaaatgaaagtctgagtgttgaagaccagatggagcagtcatccttgtacttttgggaccttttggaaggtagtgagaaagcagtggtaggaacgacatacaaacacttgaaggatctactgtctaaattgctgaactcaggctattttgaaagtatcccagttcccaaaaatgccaaggaaaaggaagtaccactggaggaagaaatgctaatacaatcagagaaaaaaacacaattatcgaagactgaatctgtcaaagagtcagagtctctaatggaatttgcccagccagagatacaaccacaagagtttcttaacagacgctatatgacagaagtagattattcaaacaaacaaggcgaagagcaaccttgggaagcagattatgctagaaaaccaaatctcccaaaacgttgggatatgcttactgaaccagatggtcaagagaagaaacaggagtcctttaagtcctgggaggcttctggtaagcaccaggaggtatccaagcctgcagtttccttagaacagaggaaacaagacacctcaaaactcaggtctactctgccggaagagcagaagaagcaggagatctccaaatccaagccatctcctagccagtggaagcaagatacacctaaatccaaagcagggtatgttcaagaggaacaaaagaaacaggagacaccaaagctgtggccagttcagctgcagaaagaacaagatccaaagaagcaaactccaaagtcttggacaccttccatgcagagcgaacagaacaccaccaagtcatggaccactcccatgtgtgaagaacaggattcaaaacagccagagactccaaaatcctgggaaaacaatgttgagagtcaaaaacactctttaacatcacagtcacagatttctccaaagtcctggggagtagctacagcaagcctcataccaaatgaccagctgctgcccaggaagttgaacacagaacccaaagatgtgcctaagcctgtgcatcagcctgtaggttcttcctctacccttccgaaggatccagtattgaggaaagaaaaactgcaggatctgatgactcagattcaaggaacttgtaactttatgcaagagtctgttcttgactttgacaaaccttcaagtgcaattccaacgtcacaaccgccttcagctactccaggtagccccgtagcatctaaagaacaaaatctgtccagtcaaagtgattttcttcaagagccgttacaggctacttcttctccagttacttgtagctcaaatgcttgcttggttactaccgatcaggcttcttctggatctgaaacagagtttatgacctcagagactcctgaggcagcaattcccccaggcaagcaaccgtcttcactagcttctccaaatcctcccatggcaaagggctctgaacagggcttccagtcacctccagcaagtagtagttcagtaaccattaacacagcaccctttcaagccatgcagacagtatttaacgttaatgcacctctgcctccacgaaaagaacaagaaataaaagaatccccttattcacctggctacaatcaaagttttaccacagcaagtacacaaacaccaccccagtgccaactgccatctatacatgtagaacaaactgtccattctcaagagactgcagcaaattatcatcctgatggaactattcaagtaagcaatggtagccttgccttttacccagcacagacgaatgtgtttcccagacctactcagccatttgtcaatagccggggatctgttagaggatgtactcgtggtgggagattaataaccaattcctatcggtcccctggtggttataaaggttttgatacttatagaggactcccttcaatttccaatggaaattatagccagctgcagttccaagctagagagtattctggagcaccttattcccaaagggataatttccagcagtgttataagcgaggagggacatctggtggtccacgagcaaattcgagagcagggtggagtgattcttctcaggtgagcagcccagaaagagacaacgaaacctttaacagtggtgactctggacaaggagactcccgtagcatgacccctgtggatgtgccagtgacaaatccagcagccaccatactgccagtacacgtctaccctctgcctcagcagatgcgagttgccttctcagcagccagaacctctaatctggcccctggaactttagaccaacctattgtgtttgatcttcttctgaacaacttaggagaaacttttgatcttcagcttggtagatttaattgcccagtgaatggcacttacgttttcatttttcacatgctaaagctggcagtgaatgtgccactgtatgtcaacctcatgaagaatgaagaggtcttggtatcagcctatgccaatgatggtgctccagaccatgaaactgctagcaatcatgcaattcttcagctcttccagggagaccagatatggttacgtctgcacaggggagcaatttatggaagtagctggaaatattctacgttttcaggctatcttctttatcaagattgaaagtcagtacagtattgacaataaaaggatggtgttctaattagtgggattgaaggaaaagtagtctttgccctcatgactgattggtttaggaaaatgtttttgttcctagagggaggaggtccttacttttttgttttccttcctgaggtgaaaaatcaagctgaatgacaattagcactaatctggcactttataaattgtgatgtagcctcgctagtcaagctgtgaatgtatattgtttgcacttaatccttaactgtattaacgttcagcttactaaactgactgcctcaagtccaggcaagttacaatgccttgttgtgcctcaataaaaaagttacatgcacaaaaaaaaaaaaaaaa

SEQ ID NO: 639 - DNA, 2604 bp, Homo Sapiens
  NM_001002265
ctcggtgtcctcccgcggaggggcgtagggtgtaaacaggcgacgcgctgggggaggtgcggccttgctgcgtccacgtctcgggcatgctcgaggcgggccagggcggtagcgccgccagctcagagcccacctgaggtaactcctgcggcctctaggatcggagtcccccacgccgcgcgcagccgccgccgctggccgccaataagggcggccgagcccccggcccgggcagggggtgtggctgccggcagcgcgtcggctacaggtgggctgggctgggctgggctgggctgggctgggtgggggcggccgccaaggacccatccctgcgctgcgggcccggcgtggagcccgcggagaggcagcgcgactccaggcagtgggtctctctgccccggtgctcgcgtctgcccctggggccgggccgagcggaaccaggaatcgcagaaacggtcagcgcccagggctctaggccggccgccccgggtgccaggtgaattcctttccctgaccggctgtgagacgttggcccgtcagccgtcgtctttggcctgagtgtgcacatctgtaaaatggaagctcggactagtgatccgtgaggaccttccacgtctgacgtgtgatctcgagagacctgcgtacattcggggtgccagaaggaaagcatagagatggggtcttgctgtgttgcccagactggtctcaaactcctggcctcaagtgatccttctgcctcagcttcccaaagtactgggattacagcttgaaatccatggcccaaaatgactctaccagtggagactctcttctgtgaagaagacgaccagataagaggttgggatgagcatgccactgcatcagatctctgccattccatcccaggatgccatctctgctagagtctacagaagtaagaccaaagaaaaggagagggaagaacagaatgagaagactttgggacatttcatgagtcattcaagcaacatttctaaggctgggagtcctccgtcagcatcagctccggctccggtgtcctccttctctcgcacttctatcacgccatccagccaggacatctgcaggatctgccactgtgaaggagatgatgagagccccctgatcaccccctgccactgcacaggaagcctccacttcgtgcaccaggcctgcctgcagcagtggatcaagagctccgacacgcgctgctgcgagctctgcaagtatgagttcatcatggagaccaagctgaagccactgagaaaatgggagaagttgcagatgacgtccagcgagcgcaggaagatcatgtgctcagtgacattccacgtcattgccatcacatgtgtggtctggtccttgtatgtgctcattgaccgtactgctgaggagatcaagcaggggcaggcaacaggaatcctagaatggcccttttggactaaattggtggttgtggccatcggcttcaccggaggacttctttttatgtatgttcagtgtaaagtgtatgtgcaattgtggaagagactcaaggcctataatagagtgatctatgttcaaaactgtccagaaacaagcaaaaagaatatttttgaaaaatctccactaacagagcccaactttgaaaataaacatggatatggaatctgtcattccgacacaaactcttcttgttgcacagagcctgaagacactggagcagaaatcattcacgtctgattgtgtgcgggttgtcattttcctggacatccatgaagagctgaaggaaattgtttactgccaattgtatacctttcttatgtcctttaatagcatagactggacaggtgactatttatagtggcttctctttttctaaaccctccttagtctcctagaaaaccttcctgtgggccaggcatgcctgggtcctgcctctgcctggcagctctgtgggaaagtggaagaccccatgatgacatcatggggagccagcagagttcctgcccatggtcttgagctgaatgagagaataaaatgccaatcccaagggaagaggaggagcaggggtgcccaggccctgatacccagccgcctccagcttgcagtggtccccagcctggagcagagcattggggagtgtctagccatgacgagaagattccctctgcatcacggcgaaccccaggagatggtattgaaacagacccccaaacacagactcctgcctgccctctgccgatgctgcctcctccatgctcttgagcaggtggagccatggtgctctgtggtggcgcatgattcactgagcaaacagcactttacagaagaaaatctttattttgtaatatgtgtgtccagcgggattgacactcaaaaaaagtctcacttagaaatcttcccttccttacctttgtatctcctttacatcatgagagatcaaaaatccattttgccttacatatgctaagaagcgtggcattctttctgttcataaaacagactcatgacttttaagacaggacaagcaggccagaggctttttttttaatcacagatctcatgggaattagtggatgctaaatggcaattaaagcatgattcctatgcaaaaaaaaaaaaaaa

SEQ ID NO: 640 - DNA, 2000 bp, Homo Sapiens
  NM_001002266
atggtaggtatagggctgtggatatcgtcagtttgaccaagtattccaagaggccccatggagtttgtcatctgtaatagaggacgttagtgcattagtgatgaaaaaactgcttaccactgactattgtgatctcccagggagtataaggcagctccgcacttgaaatccatggcccaaaatgactctaccagtggagactctcttctgtgaagaagacgaccagataagaggttgggatgagcatgccactgcatcagatctctgccattccatcccaggatgccatctctgctagagtctacagaagtaagaccaaagaaaaggagagggaagaacagaatgagaagactttgggacatttcatgagtcattcaagcaacatttctaaggctgggagtcctccgtcagcatcagctccggctccggtgtcctccttctctcgcacttctatcacgccatccagccaggacatctgcaggatctgccactgtgaaggagatgatgagagccccctgatcaccccctgccactgcacaggaagcctccacttcgtgcaccaggcctgcctgcagcagtggatcaagagctccgacacgcgctgctgcgagctctgcaagtatgagttcatcatggagaccaagctgaagccactgagaaaatgggagaagttgcagatgacgtccagcgagcgcaggaagatcatgtgctcagtgacattccacgtcattgccatcacatgtgtggtctggtccttgtatgtgctcattgaccgtactgctgaggagatcaagcaggggcaggcaacaggaatcctagaatggcccttttggactaaattggtggttgtggccatcggcttcaccggaggacttctttttatgtatgttcagtgtaaagtgtatgtgcaattgtggaagagactcaaggcctataatagagtgatctatgttcaaaactgtccagaaacaagcaaaaagaatatttttgaaaaatctccactaacagagcccaactttgaaaataaacatggatatggaatctgtcattccgacacaaactcttcttgttgcacagagcctgaagacactggagcagaaatcattcacgtctgattgtgtgcgggttgtcattttcctggacatccatgaagagctgaaggaaattgtttactgccaattgtatacctttcttatgtcctttaatagcatagactggacaggtgactatttatagtggcttctctttttctaaaccctccttagtctcctagaaaaccttcctgtgggccaggcatgcctgggtcctgcctctgcctggcagctctgtgggaaagtggaagaccccatgatgacatcatggggagccagcagagttcctgcccatggtcttgagctgaatgagagaataaaatgccaatcccaagggaagaggaggagcaggggtgcccaggccctgatacccagccgcctccagcttgcagtggtccccagcctggagcagagcattggggagtgtctagccatgacgagaagattccctctgcatcacggcgaaccccaggagatggtattgaaacagacccccaaacacagactcctgcctgccctctgccgatgctgcctcctccatgctcttgagcaggtggagccatggtgctctgtggtggcgcatgattcactgagcaaacagcactttacagaagaaaatctttattttgtaatatgtgtgtccagcgggattgacactcaaaaaaagtctcacttagaaatcttcccttccttacctttgtatctcctttacatcatgagagatcaaaaatccattttgccttacatatgctaagaagcgtggcattctttctgttcataaaacagactcatgacttttaagacaggacaagcaggccagaggctttttttttaatcacagatctcatgggaattagtggatgctaaatggcaattaaagcatgattcctatgcaaaaaaaaaaaaaaa

SEQ ID NO: 641 - DNA, 2069 bp, Homo Sapiens
  NM_001002292
cgtccacaggcggcggagcggccacaatcacagctccgggcattgggggaacccgagccggctgcgccgggggaatccgtgcgggcgccttccgtcccggtcccatcctcgccgcgctccagcacctctgaagttttgcagcgcccagaaaggaggcgaggaaggagggagtgtgtgagaggagggagcaaaaagctcaccctaaaacatttatttcaaggagaaaagaaaaagggggggcgcaaaaatggctggggcaattatagaaaacatgagcaccaagaagctgtgcattgttggtgggattctgctcgtgttccaaatcatcgcctttctggtgggaggcttgattgggcccacaacggcagtgtcctacatgtcggtgaaatgtgtggatgcccgtaagaaccatcacaagacaaaatggttcgtgccttggggacccaatcattgtgacaagatccgagacattgaagaggcaattccaagggaaattgaagccaatgacatcgtgttttctgttcacattcccctcccccacatggagatgagtccttggttccaattcatgctgtttatcctgcagctggacattgccttcaagctaaacaaccaaatcagagaaaatgcagaagtctccatggacgtttccctggcttaccgtgatgacgcgtttgctgagtggactgaaatggcccatgaaagagtaccacggaaactcaaatgcaccttcacatctcccaagactccagagcatgagggccgttactatgaatgtgatgtccttcctttcatggaaattgggtctgtggcccataagttttaccttttaaacatccggctgcctgtgaatgagaagaagaaaatcaatgtgggaattggggagataaaggatatccggttggtggggatccaccaaaatggaggcttcaccaaggtgtggtttgccatgaagaccttccttacgcccagcatcttcatcattatggtgtggtattggaggaggatcaccatgatgtcccgacccccagtgcttctggaaaaagtcatctttgcccttgggatttccatgacctttatcaatatcccagtggaatggttttccatcgggtttgactggacctggatgctgctgtttggtgacatccgacagggcatcttctatgcgatgcttctgtccttctggatcatcttctgtggcgagcacatgatggatcagcacgagcggaaccacatcgcagggtattggaagcaagtcggacccattgccgttggctccttctgcctcttcatatttgacatgtgtgagagaggggtacaactcacgaatcccttctacagtatctggactacagacattggaacagagctggccatggccttcatcatcgtggctggaatctgcctctgcctctacttcctgtttctatgcttcatggtatttcaggtgtttcggaacatcagtgggaagcagtccagcctgccagctatgagcaaagtccggcggctacactatgaggggctaatttttaggttcaagttcctcatgcttatcaccttggcctgcgctgccatgactgtcatcttcttcatcgttagtcaggtaacggaaggccattggaaatggggcggcgtcacagtccaagtgaacagtgcctttttcacaggcatctatgggatgtggaatctgtatgtctttgctctgatgttcttgtatgcaccatcccataaaaactatggagaagaccagtccaatggaatgcaactcccatgtaaatcgagggaagattgtgctttgtttgtttcggaactttatcaagaattgttcagcgcttcgaaatattccttcatcaatgacaacgcagcttctggtatttgagtcaacaaggcaacacatgtttatcagctttgcatttgcagttgtcacagtcacattgattgtacttgtatacgcacacaaatacactcatttagcctttatctcaaaatgttaaatataaggaaaaaagcgtcaacaataaatattctttgagtattgtcttacttctcttaaaaaaaaaaaaaaaaaa

SEQ ID NO: 642 - DNA, 1945 bp, Homo Sapiens
  NM_001002836
gcccgtccccctgaccccagggtctgagtcgccgctgccgccgctgccaccatccgcgaggcaggagagaggaggaggagtgcggcgcggcggccccgggaccaaggagggacccagacatggagctgcgggaagaagcctggtctccggggccgctggattctgaggaccagcagatggccagtcacgagaacccagtggacatcctcatcatggatgatgacgacgtccccagctggcctcccaccaagctgtccccgccccagtctgcgcccccagccggcccgcctccccggccgcggccgcccgccccctacatctgcaacgagtgtggcaagagctttagccactggtccaagctgacgcggcaccagcgcacgcacaccggcgagcggcccaacgcctgcgccgactgcggcaagaccttctcgcagagctcgcacctggtgcagcaccggcgcatccacacgggcgagaagccctacgcctgcttggagtgcggcaagcgcttcagctggagctccaacctcatgcagcaccagcgcatccacacgggcgagaagccctacacctgccccgactgcggccgcagcttcactcagagcaagagcctggccaagcaccggcgctcgcacagcggcctcaagcccttcgtgtgcccgcgctgcggccgcggcttcagccagcccaagagcctcgcgcgtcacctgcggctgcacccggagctgtcggggcctggcgtggcggccaaggtgctggcggctagcgtccggcgggccaaggggcccgaagaggcggtggcggcggacggcgagatcgccatccccgtgggcgatggcgagggcatcatcgtggtgggcgcgccgggcgagggggccgcggccgcggcagccatggcgggcgcgggggcaaaggccgcggggccccggtcgcggcgcgccccggcccccaagccgtacgtgtgtctggagtgcgggaagggcttcgggcacggggccgggctcctggcgcaccagcgggcccagcacggggacgggctcggggcggcggggggcgaggagccggcccacatctgcgtggagtgcggggagggcttcgtgcagggcgccgcgctccggagacacaagaagatccacgcggtgggcgcgccctcggtctgcagcagctgcggacagagctactaccgcgcgggcggggaggaggaggacgacgacgacgaggccgcgggcgggcggtgccccgagtgccgcggtggggagggccggtaggggaggggcccgggggggggggcgggcagggcccctcgggcttggcgggagcgacgacgtgcaagaccaagagacccagggagaagcggacggggtgcgatggaccccgcggcatccccggctccccgccctcctctgtccctgcgccgtccgtgggggggcactggggcgtattagggcccgttcacttctccgcctcgagactctgccccctcagcctggcccgcccttcctaagttatcggcctgcgagccggagagacaatggagagaactgcagaggccgagtggcgaccaggccccaagcggaaggccattttccctgctcttcctcagttgtccggggcgggggtggggggtgctgcgaggaatggagaaaccaggccctttagaggatcccagagagggaagagaaccaggggcccttttctcttttagaattttcttttaatcagcccaccttttgactccccgcccgccccaatccattatttttttctgccttccgggtcccatccttagagctcgagtcgttccttcccctcctggattccgggtagcagaggcagcgccgcaggaggcgggtgcccgtttgtcccaggcctgggcgtggtggaggaaggggtgctggaacaataaacggcactatccaaatgtcaaaaaaaaaaaaaaaaaaaa

SEQ ID NO: 643 - DNA, 4415 bp, Homo Sapiens
  NM_001002843
acggctcggctgccagctccgcaatgggagccgccgccgtcgccgcagtgtagtttttcgtgctcctccttttcctcctcctctttctcctcctcctcagggctccagtcaggccgatccgctccgctcacggaaggaaaacagaaataacttgctggcttgtctggagtcacatggtaattcaaaaatggcagaactgtttatggaatgtgaagaagaggagctggaaccatggcagaagaaagtaaaagaagttgaggatgacgatgatgatgagccaatctttgttggcgagatatcaagttcaaaaccagcaatttcaaatattttgaacagagttaaccccagctcatattcaaggggactaaagaatggtgcactcagtcgaggtattactgctgcattcaagcctacaagtcaacactacacgaatccaacatcaaatccagtgcctgcctcaccaataaattttcatcctgagtctagatcttcagatagttctgttattgttcagcctttttctaaacctggttatataacaaactcatcacgagttgtgtctaataagtcatcagagttactgtttgacttgacccaggatacaggattatcacattaccaagggggaccaacactttctatggcaggtatgagtgaaagttcatttttatcaaaacgtccttctacttctgaagtaaataatgttaatccaaagaagcctaaacccagcgaaagtgtttctggagcaaattcctcagctgtattaccttcagttaaatctccttcagtgacttcttcccaggctatgctagcaaaaggtacaaatacctcatcaaatcagtctaaaaatggaacaccttttccaagagcttgtccaaagtgcaacattcatttcaatcttttggatcctttgaaaaatcacatgaagtattgttgtccagacatgataaataactttttgggactggctaaaacagaattttcaagtacagtaaataaaaacacaactattgattcagagaaaggaaaattgatcatgttagttaatgacttttattatggaaaacatgaaggagatgtccaggaggaacagaagactcacacaacctttaaatgcttcagttgcttgaaaattctaaaaaataacattaggtttatgaaccacatgaaacaccatttggaacttgagaagcagagcagtgagagctgggaaaaccataccacctgccagcactgctaccgtcagtttcccacaccatttcagttgcagtgtcacatcgaaagtacacatacgccccatgaattttctactatttgtaaaatctgtgaattgtcatttgaaacagaacatgttcttttacaacatatgaaggacaatcataaacctggtgaaatgccatatgtctgccaggtttgtaattatagatcatcatcattttctgatgtagaaactcattttagaacatcccatgaaaacactaagaacttgctatgcccgttttgcctcaaagttattaaaattgcaacaccatatatgcatcattatatgaagcatcagaaaaaaggaatacatcgttgtacaaaatgcaggctgcagtttttgacatgcaaggagaaaatggatcataagactcaacaccatcgaacatttataaaacctaaacaactagaaggattgcctcctggaacaaaagttactattcgagcttcagttggacctctgcaatcaggagcttcacctacaccttccattagtgcaagtgcttctacccttcagctctcacctccaaggactaaaaatataactgctaaaaatcctgcaaaatctaatacaagtaaacctaatacagtcaaatccaacgcaagtaaacctaatacaagtaagcctaatggaagtaaatctaaatacaaaccaaaaatctctaatatgcaaaagaaacaaagcacattggctagtagcaataaaaaaagtaaagtcaatacagcattgaggaatttaaggtatcgtcggggcattcacaaatgcattgagtgttgttccgaaataaaagattttgcaaaccactttcctacgtacgtccactgtagtttttgcagatacaacactagctgtagcaaagcctatgtaaatcatatgatgagctttcatagtaaccgtccaagcaaaaggttttgtatttttaagaagcattcagaaaatctccggggcattactctagtgtgccttaattgtgatttcctaagtgatgtttctggcttagataatatggctacacacttaagtcaacataaaactcatacttgccaagttgtaatgcagaaagtttctgtttgtatcccaacttctgagcacctttctgaattaaaaaaagaagctcccgcaaaggaacaagaacctgtgtctaaggaaattgcaagacctaacatggctgaaagagaaacagaaacatcaaattctgaaagtaaacaagataaagctgcttcttcaaaagaaaaaaatggatgtaatgcaaattcatttgaaggctcatcaacaacaaaaagtgaagaaagcataacagtttcagataaggaaaatgaaacctgtcttgcagaccaggaaactggctcaaaaaacatcgtcagttgtgattcaaatattggtgcagataaagtggaaaagaaaaaacaaatacaacacgtttgtcaggaaatggagttgaagatgtgccaaagttcagaaaacataatcttatctgatcagattaaagatcacaactccagtgaagccagattttcttcaaagaatattaaggatttgcgattagcatcagataatgtaagcattgatcagtttttgagaaaaagacatgaacctgaatctgttagttctgatgttagcgagcaaggcagtattcatttggaacctctgactccatccgaggtacttgagtatgaagccacagagattcttcagaaaggtagtggtgatccttcagccaagactgatgaagtagtgtctgatcaaacagatgacattcctggaggaaataaccctagcacaacagaggcaacagtagacctggaagatgaaaaagaaagaagttgaaattagtcattttaagtttcagtgtaccaacgataagggcatttggaacagtgctatcaggtgagctcagtggtgctgttgtaggttcagaaatggaaatatgtaagggaggtcacacatacactttacctgtatgttcaacctatgttatcaaacaaatcaattcaccaataatagcatgattagtagggattcccaaaaagtttttaaaaacacgaacaggattttaatgataattaaatttgcagtggaaaggtctcatttaatggttttcaaggaaatgggatttggttgctgacatgaattgatgatattagtaatatttataaagcctttcaaacttccatcaatcctaagctaaaaatctttattacctgtatatccttttcagttaactgagaggaagggatttggaaaccatgtacttttggggagtaattgattaaaaacaatggctgattggcattgttaatgaaggctttatttgtgaggatgatgctggtaaatggagcatgcttagagtactaaattgatctaatgagaatttggatgaacataaacttaattttggatttaatataacattccagtcagacgcatgtaaacagaatatttgaatctttgtacctccatacaagtgttagcctgccaggctgtaagcttaccttaattaaactttcagtgaaagtggaattattaagatataaatttatatttgtgctttttgtcagtgtgtaagctgtgtagaaattctttgatgtattagttgtattaatgtaaagtagaaacccattgttgaaactcctgtagctattatgcttttaatattgttttaatgatcttccttagaaataggcccataaaaatggtctggaagccaaaccaaagtatggtataatgtagatattgtaaagcagtaaactgaaaacatgtcctggcatgtattcagccatgtttaagtgacttttctgtaattgtaaaataaaaacttcaaatgggacctaaaacagtgatgtaaaagaactggttttggaaatttagcctaatttatctataagatggctgctaaattgatttttcagttctttttatcatctagaatataatagatatagaaatgaataatatgaagaacagtagtttgctttgaaatactaataaacttttatttaaaatgcttcatttttacttcttaaaatgtgctttggattcttaaattttgtttcactgaatgttcaatgttttaaatggcgattaaaatactctgctgtatatagtagtttttgagtaaatatttgcaataaaaatctgcccccgaataaaaaaa

SEQ ID NO: 644 - DNA, 855 bp, Homo Sapiens
  NM_001002876
ggctggactcagggcggtttgaaagatcggcgcgcaccgcaggagcaacggttggtcctgcggctgtgatgtcggtgttgaggcccctggacaagctgcccggcctgaacacggccaccatcttgctggtgggcacggaggatgctcttctgcagcagctggcggactcgatgctcaaagaggactgcgcctccgagctgaaggtccacttggcaaagtccctccctttgccctccagtgtgaatcggccccgaattgacctgatcgtgtttgtggttaatcttcacagcaaatacagtctccagaacacagaggagtccctgcgccatgtggatgccagcttcttcttggggaaggtgtgtttcctcgccacaggtggtggaaggctttagggccaccatggcgcagcgcctggtgcgcgtgctgcagatctgtgctggccacgtgcccggtgtctcagctctgaacctgctgtccctgctgagaagctctgagggcccctccctggaggacctgtgagggtggctggcccctgggctgccccttctcatggcttcgtgctgactccataaacattctctgttgaggatgtccagtcagggcttgacaggcccaggctcagcccgccgtggctgggaaggttccctgcagtgccagtgctgcagcagggagagctgggcagaagcagcgagggggcccagctggcgagactgtagccccctcccactcccacactcactcttgcagagcctgtgtctttaagcagctggcgtgttacatctccatttaaggtttcctttgaacaaaaggtctgtggctaaaaaaagtttaaaaatcaaaaaaaaaaaaaaaaaa

SEQ ID NO: 645 - DNA, 2694 bp, Homo Sapiens
  NM_001002878
gggcagtggggctgggagatggggcggggctgggcgctccgggactgaggtgctgatcgcccaaagggcgcccctgggctggggtctgacccggcttctcctccctcactacccgcggtccccggcctctcggcgctgcgctgttacctcatccgaaaagtgttcgctgcagcatcctcaggcttcacgttggagcctcttgattgtggtgttcagcattatttaagatcacctatgcatcatctgaagccacagtcccaggtcatcttcatcaccttccccagtggaatgcctcctgtgttaaagcccacaacaacccctgtggaggaacaaccatgtcatcagaatcgagcaaaaaacggaagcccaaagtgatccgaagcgatggagccccagctgaaggaaagcggaatcgatctgacaccgagcaggaaggtaaatactacagtgaggaggccgaggtggatctgcgggaccctggcagagactatgagttatacaagtacacctgccaggagctacagaggctgatggctgagatccaagacctgaagagcaggggtggcaaggatgtggcaatagaaatagaagaacggaggatccagagctgtgtgcatttcatgactctaaagaagcttaaccgattagcccacatcaggttgaagaaaggaagagatcagacccacgaggctaagcagaaagtagatgcctatcatctgcagctccagaacctgttgtatgaggtgatgcacctacagaaggagatcaccaaatgtttggagtttaagtcaaagcatgaagaaattgatctggtcagtttagaggagttttataaggaggctccaccagatatcagcaaggccgaagtcaccatgggagaccctcaccagcaaacactggcacgtctggactgggagctggagcagcggaaaaggctggcagagaagtaccgagagtgcctatctaacaaggagaagattctcaaggagattgaggtgaagaaggagtacctgagcagcctccagccccgcctcaacagcatcatgcaggcttcccttccggtgcaggagtacctgtttatgccattcgaccaggctcacaagcagtatgagacagccagacacctgccgcctcccctctatgtcctctttgttcaggccactgcgtatgggcaggcctgtgataagacgttatctgtggcaatcgaaggcagtgtggatgaagccaaggctctgttcaaacctccagaggactcccaagatgacgagagtgactcagatgccgaggaggagcagactacgaagcgccggagacccacactgggggttcagttggacgacaaacgcaaggagatgctgaagaggcacccactgtctgtcatgctcgacctgaagtgcaaagatgacagtgtgcttcacctgactttctactacctcatgaacctcaacatcatgacagtaaaagccaaagtgacaactgccatggagctgatcacccccatcagtgcaggtgacttgctgtctcctgactcagtcctgagttgcttgtatcctggggatcatggaaagaaaactccgaatccagccaatcagtatcagtttgataaagttggcatcctgactttgagcgactatgtacttgagctaggtcacccctatttgtgggtgcagaagctgggtggcctccacttccccaaagagcagccccagcaaacagtgattgctgaccactcgctgagcgccagccacatggagaccaccatgaaacttctgaagaccagggtgcagtcccgcctggccctccacaaacagtttgcatccctagaacatggcattgtgccagttaccagtgattgccagtacctcttccctgccaaggttgtctctcgcctggtgaaatgggtgacagttgcccatgaggattacatggagctgcacttcaccaaagacattgtggatgcgggactggctggggacaccaatctctactacatggcgctcatcgaaaggggcacagccaaactgcaggccgctgtggtgttgaaccctggctactcctccatcccacctgttttccagctctgtttgaactggaaaggggagaaaaccaacagcaacgatgacaacattcgggccatggagggcgaagtcaatgtgtgctacaaggagctgtgtggcccttggcccagccaccagctgttgaccaaccagctgcagcggctgtgtgtgctgctggatgtttacctggagaccgagagccatgacgacagtgtggaggggcccaaggaatttccccaggagaagatgtgtctgcggctcttcaggggtcctagcaggatgaagccatttaaatacaaccatcctcagggattcttcagccatcgctgatctcccgcgcagaccgttgtttcccccaaggcctcaccctgagcactgggcttctgctttctgctctggcccacatgtgactcttgatattctccaaagacaccagccaattaaaaagcgtcacctgaccagtggcctttgtctgtggttcctggcaaggtggctttgcagtctggaagggcaggtgggagctgtgacacagtgtgaaaaagcatttgtagagagactttttctcagcagccaataaaagcagagtggaaaaagattccaattctgcagagagatgctcaaaaaaaaaaaaaaaaaa

SEQ ID NO: 646 - DNA, 7036 bp, Homo Sapiens
  NM_001002909
gtcgcgcgcggagcaggggctagagggaagggtcagcctccagggctggcaggcgcctgcgccgcggggctcccgtcaggacgcgcattctcgctccctccctcggctgcgcgcgcccggtgggcgtgggaggaggcggggaaccggggaggggtgggtgtcgcaggagggaaggagcgaaccggagagcgtcgtcctgagaggagtgaaggcggcaaaatggcggaccgcttctcccgcttcaacgaagaccgagactttcagggtaatcactttgatcagtatgaggaaggacacttggaaattgaacaagcgtcacttgacaagcctatagaatcggataatattggacaccgcttactccagaaacatgggtggaagctgggccagggattgggaaaatctcttcaggggagaacagatcccattccaatcgttgtcaagtatgatgtcatgggcatgggtcgcatggaaatggagcttgattatgctgaagatgctaccgaacggcgccgtgtcctagaagtagaaaaagaagacacagaagagctgagacaaaagtacaaggattatgttgacaaagagaaggcaattgccaaagccttggaagacctcagagccaacttttattgtgaactgtgtgataagcaatatcagaaacatcaggaatttgataaccatatcaactcctatgatcatgcacacaagcagagattaaaagatctgaagcagagagagtttgctcgaaatgtctcttcaagatcccgcaaggatgagaaaaaacaggaaaaagcccttcggcggctccatgagttggcagagcaaagaaaacaagctgaatgtgcacctggaagtggtcccatgttcaaaccaaccacagtggctgtagatgaagaaggtggagaagatgataaagatgaatcagctacaaatagtggcacaggtgccactgcttcttgtggcctgggatctgaattctccacagataaaggaggccctttcactgcagtacaaatcactaataccactggactggcccaggctcctgggttagcctcccaaggcatcagctttggcattaagaataatctggggaccccattgcaaaaattgggagtgtcattttcttttgccaaaaaggctcctgtcaaactcgaatcaatagcatcagttttcaaggaccatgcggaggaagggacctctgaagatggaacaaaacccgatgagaagagttctgaccaaggactgcagaaggtaggagactctgatgggagcagtaatcttgatggtaaaaaagaggatgaagaccctcaggatggagggtcccttgcctcaacattatccaaattaaaaaggatgaaacgagaagaaggagctggggctacagagcctgagtattaccactacatccccccagcacactgcaaagtaaaacctaattttccctttctactttttatgagagccagtgaacaaatggatggtgataatactacacacccaaagaatgccccagagagtaaaaaaggcagttctcccaagcctaaaagctgcatcaaggcggcagcaagccaaggagcagaaaagacagttagtgaagtctctgagcagccgaaggaaaccagcatgaccgagccctcagaaccaggaagcaaagctgaggcaaagaaggccttaggaggggatgtaagtgatcagagtttagaaagtcatagtcagaaggtttcagagacccaaatgtgtgagtccaactcttctaaagaaacctctctggccaccccagcagggaaagaaagccaagaaggacccaaacatcctactggtcccttcttcccagttttgagcaaagatgaaagcactgccctccagtggccatcagaactattaattttcaccaaggcagaaccctccatttcatacagttgtaaccctttatattttgactttaaactttcaaggaacaaagatgccagaactaaaggaacagaaaaaccaaaggatataggaagctcctcaaaggaccatctccaaggcctagatcctggtgagccaaataaaagcaaggaagtgggcggagagaaaatagtacgttcctcaggaggcagaatggacgcacctgcttcagggtctgcctgtagcggcctgaacaagcaggagcctgggggtagccatgggtctgagacagaagacacagggagaagccttcccagcaagaaagaacgatctgggaagtcccaccggcacaaaaagaaaaagaagcacaaaaaatccagcaaacacaaacgtaaacacaaggctgacacagaagagaaaagctctaaggcagagtcaggggagaaatctaagaagcgcaagaaacgaaaacgaaagaagaataagtcatcagccccagcagattctgaacgaggacccaaaccagaaccccctgggagtggcagtcccgcaccaccaagaagaaggcggagagctcaagatgactcccagcggagatccctcccagctgaagaggggagcagtggcaaaaaggatgaaggtgggggtggtagcagctcccaagaccatggtgggaggaaacacaaaggtgaacttccaccttcatcctgccagcgaagagcaggcaccaaacggagcagccggtctagccatcggagccaacccagtagtggagatgaggatagtgatgatgcttcctcacaccggctgcaccagaagtctccatcccagtacagtgaggaagaagaagaggaagattcaggcagtgagcattcccgcagccgctcaaggtctggccggcgccattcctcgcatcgttcctcccggcgttcttactcaagtagctcagatgcctcttcagaccagagctgctatagtagacagcgcagttactctgatgacagctacagtgactacagtgacagatcacgaaggcactccaagcgctcccatgactcagatgactcagactatgccagctccaaacaccgatcaaaacggcacaaatattcatcttctgatgatgactatagcctcagttgcagccagtcccgaagccgatctcggagtcataccagagagcgctcaagatcccggggccgcagccgcagcagcagttgtagtcgtagtcgaagcaagcggagaagccgtagcaccacagcccacagctggcaacggagccggagctatagccgggaccgcagccgcagcaccaggagcccttcccagagatcaggctccaggaagagatcatggggtcacgagagccctgaggagaggcattctgggcgtcgggacttcattcgttctaagatctaccgctcccagtccccccactatttccgatcaggccggggagaaggtcctgggaagaaagatgatggcagaggagatgacagtaaagcaacaggtccaccttcccagaacagcaacattggcacaggaagagggtcagaaggtgactgcagtcctgaagacaagaactctgtcactgccaaactgctactggagaagatccagtcaaggaaagtggagaggaaacctagtgtgagtgaggaggtgcaggccacccctaataaagctgggcccaagctcaaggaccccccacaaggttactttgggcccaagctccccccatctcttggcaataagcctgtccttccactgatagggaagctcccagctacccgaaagcccaataagaagtgtgaagagtctggcttggaaaggggggaagagcaagaacagtcagagacagaagaggggcccccagggagtagtgatgccctatttgggcatcagttcccttcagaggaaacaactggccccttattagacccacccccagaagagtcaaagtctggagaagctactgctgatcaccctgtggctccactaggcaccccagcacattctgactgctaccctggggacccaaccatctcccataactacctccccgaccccagtgatggggacaccctggagtccctggatagcagcagtcagccaggccctgtggagtccagcttgctgcctatagcaccagaccttgagcatttccccagttatgcacctcccagtggggatcctagtattgagtcaacagatggggctgaggatgcttcactggcccccctggaaagccagcccatcaccttcacccctgaggagatggagaagtacagcaagctccagcaggctgctcagcaacacatccagcagcagcttctggccaagcaagtaaaggcctttccagcctcagctgccctggccccagccacaccagccctgcaacccatccacattcagcagccagctacagcctctgccacctccatcacaactgttcagcatgccatcctacaacatcatgctgccgcagctgctgccgccatcggcattcaccctcacccccatccccaaccacttgcccaggtgcatcatattccccagccccatctgacccccatttctttgtcccacctcactcactcaatcatccctggccaccctgccacctttctcgctagccatcccatccacatcattcccgcctcagccatccatcctgggcccttcacctttcaccctgtcccacatgctgccctctaccccaccctacttgctccacggcctgctgcagcagctgccactgcacttcaccttcacccactacttcaccccatcttctcaggtcaggacctgcaacatccccccagccatggcacgtgagttgggggatgggatcctaggtagggccaggggaggagacccataaatgttcccttgggggtgttgagccattaataccagcaagtagaagctgggatgggcagtgtctgacagccaaagaattgagttttggcttgcaggggtgggtttagatttgaagtttgctttcagtttactatcagggatttctttttcctgtcctcctctcaatttgtccctccctcttctgtgtttctaagctagggaacaccagtaagtgctacccacccctctgcagcaacatctccaaactgtcaagtttagataatcccctcctccctctgcttttttcctctgctcttcccttctgtaaattttaaaacattttcctcccctctggccagtgggttgtcaccagagcacttgctgtgggcccatctggtcttgccttctcagcgccacagggaaggccaagctgttctagtggtggaagtgccaccattttggggtagtatctttgaccatctttggtgacgttacgttatcccaggtgaggtggaaagcgtctcacctggaacctgatataactcaggctgcaattccatccagttcccacatcaacggagccacacatttggcactgttatcttggtatccctcatcccagaagaggcatctccatatcccagaaaagaagatcctatcatgaataaaagctgtatggcccagagaggagctcatgtgtctaaagtgaagggtatattttcttctgttgtgttgatgtttccttcttaatttataggatttttttaatgtaaaaaattgcactgaactctataaacgtaaatgctgctttttgtagctcatataaaaaaggttccatatttgtagtatactgcaataatattttttacatccagctctttaagtgatcctcgttctggtggctttgtgtaaatatgtttgccctagttgaattaagaaactctaaaggttataaaatgaaaacaaaaaataaaatatttgttttctgctagatgcaaaactgactaagcatgtatattttaccaaacttatgtattttttgaagttatgaactataaaatgttaaaacattttttgctgggacaaaatgttaagtaatttgcagtatgtagtgcccccagtattgggatttttgagctaatgggcagcagtcagctgggggcttctgagggatgctcatctttaacagtctccctcatgtacttttgctgttttacacagagaaacaggtagaccccacagaggagaaggaggggattcaacagctttattgtctggaagcagtgagatttggtgattgtctggggggattcctgggtttccctgggtaccttgttccaggcagtcagtccatttgccttcctagtacttagccccctctgacaattttttttttaatgtgccttttgggttggtagaaacggaagtagaagtaggctggaggatgagttgggacagtcttccttttgttgggaggtgagcacatttacagatattttgcttcatagtttccatgccctctgcccagctcagtttagacagtaaacgttccttgtttcttttctcccatgacactgacaagaggaattaccacctcagcctcttttgcccctcttcttgcctttcacccaggctctcagccctaattaacacactgacccaaaggtgcttgtgttgcaggtcccatctcctttgatgaggttaacaattcccactttggcattttcctaactattcgtgtggctagaattggttggttggtcacttgacaagaaaaaccatacttacctgggccaaggctctgttcctgccttcgcaaattctcaaaagagtaaagtttatgaaaagaaagtggcaggcaaacacaactcttgactgccctcccaccctcctacctgttcagtactcatctgattcagaagcatcacttcttggataactagcactggaaaaatgaaatcatctgtgtaagtgaagggactcatttttctttgctttcagcccatgtaaataaataatacagtattaacattttcgtgctgcttcccattagcttgtagattgagccatactctggctgcctctttgccttcctaggggcattttctttaacttccagaatagtgattttaaaagtaaaaataaaaataaaccttacttacaagcataacagattgtatttaactttatcacatatgatagagatatatatgctgtaaaatgagggaaaggaactttctaataaaccaatgatttgtggaaacttaaaaaaaaaaaaaaaaaa

SEQ ID NO: 647 - DNA, 832 bp, Homo Sapiens
  NM_001002913
ggagtgaatgggggcagcatgaggccgggcggctttttgggcgccggacagcggctgagtagagccatgagccgatgtgttttggagcctcgccccccggggaagcggtggatggtggctggcctggggaatcccggactgcccggcacgcgacacagcgtgggcatggcggtgctggggcagctggcgcggcggctgggtgtggcggagagttggacgcgcgaccggcactgtgccgccgacctcgccctggccccgctgggggatgcccaactggtcctgctccggccacggcggcttatgaacgccaacgggcgcagcgtggcccgggctgcggagctgtttgggctgactgccgaggaagtctacctggtgcatgatgagctggacaagcccctggggagactggctctgaagctggggggcagtgccaggggccacaatggagtccgttcctgcattagctgcctcaactccaatgcaatgccaaggctgcgggtgggtatcgggcgcccggcgcaccctgaggcggttcaggcccatgtgctgggctgcttctcccctgctgagcaggagctgctgcctctgttgctggatcgagccaccgacctgatcttggaccacatccgtgagcgaagccaggggccctcactggggccgtgacactagtggccatggctgcctgcctgactgtagtgcccaccaacccagccactgccacagagctgccacgccagccttggtatctactttttatacaaatctcctctagactgttccaggctgcctgcggattaaagtgggggtgactgtgaaaaaaaaaaaaaaaaaa

SEQ ID NO: 648 - DNA, 1349 bp, Homo Sapiens
  NM_001002924
ggtcgcgtgcgggagggggcgggtggggaaggatcgcaggcgagattacgaggcgaggctcgcgcgcccgcccccgccctggcccccagtgcccacccggtcggcccggcacagccatgatcaaggcgatcctaatcttcaacaaccacgggaagccgcggctctccaagttctaccagccctacggtatataactgggagtaaaattgccaaatcatatgagtgaagatacacaacagcaaatcatcagggagactttccatttggtatctaagagagatgaaaatgtttgtaatttcctagaaggaggattattaattggaggatctgacaacaaactgatttatagacattatgcaacgttatattttgtcttctgtgtggattcttcagaaagtgaacttggcattttagatctaattcaagtatttgtggaaacattagacaaatgttttgaaaatgtctgtgagctggatttgattttccatgtagacaaggttcacaatattcttgcagaaatggtgatggggggaatggtattggagacaaatatgaatgagattgttacacaaattgatgcacaaaataagctggaaaaatctgaggctggcttagcaggagctccagcccgtgctgtatcagctgtaaagaatatgaatcttcctgagatcccaagaaatattaacattggtgacatcagtataaaagtgccaaacctgccctcttttaaataaaaatgtaaaaaggccactcccaggtaaaatccagggggaagagtcatctaagtttaccatgcagttgtttaccaaaaatagaggaggagagtcttaacttttgctcttggatttaagtcaaggtactgtatagaagttgtgtaaaatcagtatgaaagttcaatgttgctgttcttgctcagtgattttaaagaaattgagtagttcctatgtgatttttttttttcttttctaaactgcattcctgtgcccacctacggcatgcctctatgtattggctactacagtgttttaaaaagtgtttcagatatttctctaattatgtacaacctaaaatgttggtgttttgtatggatcacaagtgcagcattccttaattccttctgctatatgtcacacagttgttatttggagaaccaagtatgtattgcatgaaaacattatgacttttttctcttagtttaaataaactccaaggtaactggacttctaaagcacctttctgtttgcctgatatctactttagcaataattttttttacaaccctctgactcaacaaagtaaataaaagtatattttatcactattaaaaaaaaaaaaaaaaaaaaaaaaaa

SEQ ID NO: 649 - DNA, 3892 bp, Homo Sapiens
  NM_001002926
gtgggaaccttgacaagcagcatggctgcaggttgctcagaggcgccgcggccagcggcggcttctgatgggtctctggtagggcaggctggcgtcctgccttgcctagagttgccgacttatgccgctgcttgtgcgctggtgaacagtcgctactcatgcctggtggccgggccgcaccaaaggcacatcgcgctgtcgccccgctaccttaacaggaaacgcaccggcattcgagaacagcttgatgcggagctccttcgctattctgagagccttttaggtgtccctattgcatatgataacatcaaagttgtgggagagcttggagatatttatgatgatcaaggacacattcatcttaacattgaagccgattttgttattttctgccctgaaccagggcagaagcttatgggtatagttaataaagtgtcttctagccacattggctgtttagtacatgggtgtttcaatgcctccattcctaaacctgagcagttgtcagctgagcagtggcaaaccatggagataaacatgggtgatgaactagaatttgaagtatttcgtttagactcagatgctgctggagtattctgcattcggggaaaactaaatatcacaagtttacaattcaagcgctctgaagtttctgaagaagttacagaaaatggcactgaggaagctgctaaaaaacctaaaaagaagaaaaagaagaaagacccagagacatatgaagtggacagtggtaccacaaagctagcagatgatgcagatgacactccaatggaagagtcagccctgcagaatactaataatgcgaatggcatctgggaggaggagccaaagaaaaagaagaagaagaaaaagcaccaggaagttcaggaccaggaccctgttttccaaggcagtgactccagtggttaccaaagtgaccataaaaagaaaaaaaagaaaagaaaacacagtgaagaggccgaatttaccccacctttgaaatgctcaccaaaaagaaaagggaaaagtaattttctttagtgtattttaaacacgattcagtttttaaaagatcgatctacatacaatagatgaataaatgttttcagtgatatgaaaaggttaagtatgccagtagtttacaaaacagaaaatacttaactaggagtaggaggctttatatgctaaaaatgataaaactgactgtaaattaatttggggaaagccagtattgttaaaataccattttatacaaaataaaaagctgctctcactgtcagctctcatattcttccaggttttgcactctacataaaattatttctacaatgtcaagactagccaaaggactttataatacaatattatattactaaagaatgagttaagtttgagattttgatgatttgattttgtgtgtgtttaataggcttcaccttattacatgctattttattttgcttttttaaaaactcaggacattaactaattttaggttttcctttatcatggctttctacagtatttctattgtttaacataaaatagtttgccaaagaagtttctgaagtcttcacagctcttaaaagccaggccagtactgactgtgtggtggtaaatgctattcattattttcttttctttcttccaagtgcatgtgtgtccttgtcttcttaagtctgagaggttgctggaaaggactgttttcttgtacttgttcatttgtgcctcagccattctagttttgttgtgtgttggaggacagtctaatgaagacaggataaatgtgattctgactagtgggaaatttcagattactttttaatgattggaatgggctataagatattgtgctgaagagaaaacagttgttctgttcactgctttcattgagaaaatgtggaatgtctcttgactaattgacaaagtgtaatgaaatgacaagctggttgaagctggtaatcaatgcatggccatatttattcattttccacacacttgaccatctactttgtataacacattctgctaaggcccagggatacaatggcaaacaagatagatgtagttccttcccttgtggcatgtcataagagaaacagatgtgcatatacacacaataaataagaaaattaataattgtattaagtggtatgaaaaaaagggggaggattgttcactcactgttacctgtgttagtatctgcaaatgcatgaatggttgaactcccatgtcagcatttttgttgccatttatttagtaccagacatagtgctggtctcacagcttaatatttggtaatgaataaattctgctagtggtatatgttgatctgaacttacaatgatgggatatagaattggcagagtggcagatgttcacaattgtctacaagtagatgtgctagacaatggaaggatgcaggccaacctctttgattacaattgagattcatgtgactattgagccctggaaatgtagcttgtccaaattgagatgtgctgtcagtataaaatacataccagattttaaagatgtaccaaaaaatgtaaactatctcaatttttatattggtgaaatcaatatgtcttggtatagtggcttaaataaaacaattttagcctttctcagtttatttttctgcaaaaagattaaaaattgtacatgaagctcatgttaactttcttttggtcagtgctattttaaaggaagtatgagttgaaaaaaaattgaaataaactatatcatattactaggacttaatatagtggcatacccaggaaatgcttagtaagtgttcccttcacattttaaaatttgagtatacaatcatgtttgacaatatagaaatttaatttttagtgaaacaattctaaaccccttttccatagacacaagaaagatggcaaatttatgctattcctggaaaaatacattgtggcttagcaaataagcaagttcccacgttacttttgttttgcttcaagtaatacttctgccagttgtgttttatgaattaaacagggaacggcatgctgaacttgaaactagatttgttcctgcttttttcacaatgtgagtagttttgaaaagtcagatctggccatttgtctttcctagaatagcataactttgttcattgttttttttgtttgtctttctgacacagaaagactgatgatggtgtccactatgtattcttcaaaacatttggcacatgctgcactaacctagtctatcttttctatcttggaatttgctcatacaaaccctatagcctagactagatcccttaccctctctccagttcctatcattcacccatttcactgtgcaagacacctcactagtcaccagtgatacagaaatgacttttaagcagtttctgctcttaagggcttaccgttttgtctataagatacacaagtataaatgacaagtacaaataacaatgaatgtttaatgctttacgtttagtgtttaagcttgttgttggaagagcagcattttgacccttggagaagaaaaactagctgtggcattccaggtggagaacctgacagaggactaagaagttatctaatgtaaaagacctcaggcaccaccttcgcataaactttttccagacaaggctaaatgtgcatgcttcataaccataattcttatttttctttaataaatatttttctacttgtaacactgtgcattatttcaaactgtttacctgtttgtaaagcttgtctcttaatcaaatttgtcttgaccaaataagtttcctgagggctggaattatgccttaactatatctatagtatttaacagtgaatcctttgtataatgaaagcatcaacagataattttaaattgataaataaaaagcacagtttcaaatggt

SEQ ID NO: 650 - DNA, 512 bp, Homo Sapiens
  NM_001003
cctttcctcagctgccgccaaggtgctcggtccttccgaggaagctaaggctgcgttggggtgaggccctcacttcatccggcgactagcaccgcgtccggcagcgccagccctacactcgcccgcgccatggcctctgtctccgagctcgcctgcatctactcggccctcattctgcacgacgatgaggtgacagtcacggaggataagatcaatgccctcattaaagcagccggtgtaaatgttgagcctttttggcctggcttgtttgcaaaggccctggccaacgtcaacattgggagcctcatctgcaatgtaggggccggtggacctgctccagcagctggtgctgcaccagcaggaggtcctgccccctccactgctgctgctccagctgaggagaagaaagtggaagcaaagaaagaagaatccgaggagtctgatgatgacatgggctttggtctttttgactaaacctcttttataacatgttcaataaaaagctgaacttt

SEQ ID NO: 651 - DNA, 9902 bp, Homo Sapiens
  NM_001003406
atggctgagagcgcctccccgccctcctcatctgcagcagccccagccgctgagccaggagtcaccacggagcagcccggaccccggagccccccatcctccccgccaggcctggaggagcctctggatggagctgatcctcatgtcccacacccagacctggcgcctattgccttcttctgcctgcgacagaccaccagcccccggaactggtgcatcaagatggtgtgcaacccgtggtttgaatgtgtcagcatgctggtgatcctgctgaactgcgtgacacttggcatgtaccagccgtgcgacgacatggactgcctgtccgaccgctgcaagatcctgcaggtctttgatgacttcatctttatcttctttgccatggagatggtgctcaagatggtggccctggggatttttggcaagaagtgctacctcggggacacatggaaccgcctggatttcttcatcgtcatggcagggatggtcgagtactccctggaccttcagaacatcaacctgtcagccatccgcaccgtgcgcgtcctgaggcccctcaaagccatcaaccgcgtgcccagtatgcggatcctggtgaacctgctcctggacacactgcccatgctggggaatgtcctgctgctctgcttctttgtcttcttcatctttggcatcataggtgtgcagctctgggcgggcctgctgcgtaaccgctgcttcctggaggagaacttcaccatacaaggggatgtggccttgcccccatactaccagccggaggaggatgatgagatgcccttcatctgctccctgtcgggcgacaatgggataatgggctgccatgagatccccccgctcaaggagcagggccgtgagtgctgcctgtccaaggacgacgtctacgactttggggcggggcgccaggacctcaatgccagcggcctctgtgtcaactggaaccgttactacaatgtgtgccgcacgggcagcgccaacccccacaagggtgccatcaactttgacaacatcggttatgcttggattgtcatcttccaggtgatcactctggaaggctgggtggagatcatgtactacgtgatggatgctcactccttctacaacttcatctacttcatcctgcttatcatagtgggctccttcttcatgatcaacctgtgcctcgttgtcatagcgacccagttctcggagaccaagcaacgggagcaccggctgatgctggagcagcggcagcgctacctgtcctccagcacggtggccagctacgccgagcctggcgactgctacgaggagatcttccagtatgtctgccacatcctgcgcaaggccaagcgccgcgccctgggcctctaccaggccctgcagagccggcgccaggccctgggcccggaggccccggcccccgccaaacctgggccccacgccaaggagccccggcactaccagctgtgcccgcaacatagccccctggatgcgacgccccacaccctggtgcagcccatccccgccacgctggcttccgatcccgccagctgcccttgctgccagcatgaggacggccggcggccctcgggcctgggcagcaccgactcgggccaggagggctcgggctccgggagctccgctggtggcgaggacgaggcggatggggacggggcccggagcagcgaggacggagcctcctcagaactggggaaggaggaggaggaggaggagcaggcggatggggcggtctggctgtgcggggatgtgtggcgggagacgcgagccaagctgcgcggcatcgtggacagcaagtacttcaaccggggcatcatgatggccatcctggtcaacaccgtcagcatgggcatcgagcaccacgagcagccggaggagctgaccaacatcctggagatctgcaatgtggtcttcaccagcatgtttgccctggagatgatcctgaagctggctgcatttgggctcttcgactacctgcgtaacccctacaacatcttcgacagcatcattgtcatcatcagcatctgggagattgtggggcaggcggacggtgggctgtcggtgctgcggaccttccggctgctgcgcgtgctgaaactggtgcgcttcatgcctgccctgcggcgccagctcgtggtgctcatgaagaccatggacaacgtggccaccttctgcatgctgctcatgctcttcatcttcatcttcagcatccttgggatgcatatttttggctgcaagttcagcctccgcacggacactggagacacggtgcccgacaggaagaacttcgactccctgctgtgggccatcgtcactgtgttccagatcctcacccaggaggactggaacgtcgttctctacaatggcatggcctccacttctccctgggcctccctctactttgtcgccctcatgaccttcggcaactatgtgctcttcaacctgctggtggccatcctggtggagggcttccaggcggagggtgacgccaatcgctcctactcggacgaggaccagagctcatccaacatagaagagtttgataagctccaggaaggcctggacagcagcggagatcccaagctctgcccaatccccatgacccccaatgggcacctggaccccagtctcccactgggtgggcacctaggtcctgctggggctgcgggacctgccccccgactctcactgcagccggaccccatgctggtggccctgggctcccgaaagagcagtgtcatgtctctagggaggatgagctatgaccagcgctccctgtccagctcccggagctcctactacgggccatggggccgcagcgcggcctgggccagccgtcgctccagctggaacagcctcaagcacaagccgccgtcggcggagcatgagtccctgctctctgcggagcgcggcggcggcgcccgggtctgcgaggttgccgcggacgaggggccgccgcgggccgcacccctgcacaccccacacgcccaccacattcatcacgggccccatctggcgcaccgccaccgccaccaccgccggacgctgtccctcgacaacagggactcggtggacctggccgagctggtgcccgcggtgggcgcccacccccgggccgcctggagggcggcaggcccggcccccgggcatgaggactgcaatggcaggatgcccagcatcgccaaagacgtcttcaccaagatgggcgaccgcggggatcgcggggaggatgaggaggaaatcgactacaccctgtgcttccgcgtccgcaagatgatcgacgtctataagcccgactggtgcgaggtccgcgaagactggtctgtctacctcttctctcccgagaacaggttccgggtcctgtgtcagaccattattgcccacaaactcttcgactacgtcgtcctggccttcatctttctcaactgcatcaccatcgccctggagcggcctcagatcgaggccggcagcaccgaacgcatctttctcaccgtgtccaactacatcttcacggccatcttcgtgggcgagatgacattgaaggtagtctcgctgggcctgtacttcggcgagcaggcgtacctacgcagcagctggaacgtgctggatggctttcttgtcttcgtgtccatcatcgacatcgtggtgtccctggcctcagccgggggagccaagatcttgggggtcctccgagtcttgcggctcctgcgcaccctacgccccctgcgtgtcatcagccgggcgccgggcctgaagctggtggtggagacactcatctcctccctcaagcccatcggcaacatcgtgctcatctgctgtgccttcttcatcatctttggcatcctgggagtgcagctcttcaagggcaagttctaccactgtctgggcgtggacacccgcaacatcaccaaccgctcggactgcatggccgccaactaccgctgggtccatcacaaatacaacttcgacaacctgggccaggctctgatgtccctctttgtcctggcatccaaggatggttgggtgaacatcatgtacaatggactggatgctgttgctgtggaccagcagcctgtgaccaaccacaacccctggatgctgctgtacttcatctccttcctgctcatcgtcagcttctttgtgctcaacatgtttgtgggtgtcgtggtggagaacttccacaagtgccggcagcaccaggaggctgaagaggcacggcggcgtgaggagaagcggctgcggcgcctggagaagaagcgccggaaggcccagcggctgccctactatgccacctattgtcacacccggctgctcatccactccatgtgcaccagccactacctggacatcttcatcaccttcatcatctgcctcaacgtggtcaccatgtccctggagcactacaatcagcccacgtccctggagacagccctcaagtactgcaactatatgttcaccactgtctttgtgctggaggctgtgctgaagctggtggcatttggtctgaggcgcttcttcaaggaccgatggaaccagctggacctggccattgtgctactgtcagtcatgggcatcaccctggaggagatcgagatcaatgcggccctgcccatcaatcccaccatcatccgcatcatgagggttctgcgcattgcccgagtgctgaagctgttgaagatggccacaggaatgcgggccctgctggacacggtggtgcaagctttgccccaggtgggcaacctgggcctcctcttcatgctgctcttcttcatctatgctgctctcggggtggagctctttgggaagctggtctgcaacgacgagaacccgtgcgagggcatgagccggcatgccaccttcgagaacttcggcatggccttcctcacactcttccaggtctccacgggtgacaactggaacgggatcatgaaggacacgctgcgggactgcacccacgacgagcgcagctgcctgagcagcctgcagtttgtgtcgccgctgtacttcgtgagcttcgtgctcaccgcgcagttcgtgctcatcaacgtggtggtggctgtgctcatgaagcacctggacgacagcaacaaggaggcgcaggaggacgccgagatggatgccgagctcgagctggagatggcccatggcctgggccctggcccgaggctgcctaccggctccccgggcgcccctggccgagggccgggaggggcgggcggcgggggcgacaccgagggcggcttgtgccggcgctgctactcgcctgcccaggagaacctgtggctggacagcgtctctttaatcatcaaggactccttggagggggagctgaccatcatcgacaacctgtcgggctccatcttccaccactactcctcgcctgccggctgcaagaagtgtcaccacgacaagcaagaggtgcagctggctgagacggaggccttctccctgaactcagacaggtcctcgtccatcctgctgggtgacgacctgagtctcgaggaccccacagcctgcccacctggccgcaaagacagcaagggtgagctggacccacctgagcccatgcgtgtgggagacctgggcgaatgcttcttccccttgtcctctacggccgtctcgccggatccagagaacttcctgtgtgagatggaggagatcccattcaaccctgtccggtcctggctgaaacatgacagcagtcaagcacccccaagtcccttctccccggatgcctccagccctctcctgcccatgccagccgagttcttccaccctgcagtgtctgccagccagaaaggcccagaaaagggcactggcactggaaccctccccaagattgcgctgcagggctcctgggcatctctgcggtcaccaagggtcaactgtaccctcctccggcaggccaccgggagcgacacgtcgctggacgccagccccagcagctccgcgggcagcctgcagaccacgctcgaggacagcctgaccctgagcgacagcccccggcgtgccctggggccgcccgcgcctgctccaggaccccgggccggcctgtcccccgccgctcgccgccgcctgagcctgcgcggccggggcctcttcagcctgcgggggctgcgggcgcatcagcgcagccacagcagcgggggctccaccagcccgggctgcacccaccacgactccatggacccctcggacgaggagggccgcggtggcgcgggcggcgggggcgcgggcagcgagcactcggagaccctcagcagcctctcgctcacctccctcttctgcccgccgcccccgccgccagcccccggcctcacgcccgccaggaagttcagcagcaccagcagcctggccgcccccggccgcccccacgccgccgccctggcccacggcctggcccggagcccctcgtgggccgcggaccgcagcaaggacccccccggccgggcaccgctgcccatgggcctgggccccttggcgcccccgccgcaaccgctccccggagagctggagccgggagacgccgccagcaagaggaagagatgagggtcgcaggggcccccggccgcccaccgcccgccccgtctcaccttctttacctcaggagccaggagcagacagcaatacttcgtccacacctgggatcgcgcagggcccgcagggcacaggcgcccgacagccgggctgagcggagtctgggttagccaggcctgcgtggcccatggtggcccttccagtgcatatacatacatatatatatatatatgcatatatatatatatatatatatatatgtgtatacacacacacatagacagacatatatatatatatttattttttttactgagagcttatgacttccagaaagtgctaaaggtgggaggtgggccagggcctggacggggcttttgtctgatgctctgggattctggccagacccaccccagggcacatgtcctgcgggggcgtcccagctgtgttttttgatgtctcctccctggttaagagtagcttggagaggaccctcaggcctctgagggcaccaggccctggagaagaggtgcaattcagggtgtgtgtgtgttttttttcctttaaagaagaaacgctgctaagatcccacgtggctcccacgtgtcggggtgtctgtcctgtcatcctgactgtctcgttattgtgaagtctttcgtagacaccccagagcacacacatccccttagtccaccggttagatgtctctctttagaaaaatcaggggtgagtagctgtgtttccttaggcctggggtaggggatggagagcagctccaaggctgagctggggctctggccccaggtgaggtccccagctcctgagcacttctgagggggtgggttccacccccaggagggcgggggtgggtggagcaggagtggaggcagcctgcagaggaagggtgcgggagactgagccggcagtggcttgcttggaggggctagggtacccgcctggtctcggctggctccagctgccctgcaggtgcccctgggctcaggtagttagttgttcagccactaatgccttttatcccccatatgggcgctgagctgtggctgttcctggacactgtgctgtccccgtcctgagcaactatgcccccgccccagtaggttcaaggcaaagcagctctgaccgaattctaggcaggggtgggggcacctgcctgggccctgggtccagccgcatccccatgcccagcctttcgcgtcacctggaggccacatcttcccaccccacctgccagcccctgtctctcctccccgctgcccctaactgcagctcagctttcactatagcagtgcttcccaaacgggttctagacttgggtgtttgatttgaagagttacgcatttatttcactatttattgggaaaaaaatgcattgaacccgtgatttcacagacattttgcttaggtcaaggctactttttaaaaagggagtgactttcatgaagtcagtttgaagaaggaggttgggagcatgttggtggcagtgatctggagaggctgcaggggccacgagtttgcagatgctgtacttcagcaataaccttgcctttgctaagaccccctccgagggcttcaggggggcctgccaagggggggccttgttcttgttcccaaactctgacttggaagaactcagcttgtggccgggctggtgagggtgtggggtgcgcccttcccttttgggctgagggagagggggccgggaggggttgtcaagcccacccgggaaactgagccctggagaggggaagcagccagcccaggatgcttcagggccctggcagcaaagaagctggggtggtgtggagggccctactccacaccctagagctgtgatgctgagcaaggtgcctgtggcggaaggaactgcccagtcctccctgggggcaggtagacctgtggggatggctcggtccaagcccaacactgcccgctccagagagcctcagccctgcctccctttccacagaggtggttttatgtggaacgaggtaccttgtctggggaagaagtggagctgggcaggcttgactgctcctggctgaccctgagctctcgcagttggagggaagcagacagacttgactttttgcaagtccgcgtgttgctggagggacacgtgtattggagcccagaagaggggctgtgtggcctgggaataccatgtggaaggttgggcttcaagttaacaggatcagacaccagtcaagcagcctcaggtcatcttgcgactccactgagcagcctttcctgttgtcacatgggttcagagcagctgagcagggaacacgtcctaggcaggtctgacgtgaaacctccccttaccctgaaccgtgtgactctgcaagcagacacctcgaggcaggtgttctaggcaaagggatgggcatgagcgaaggctccagggtccacagagcagggagtgtggagaaggtggaagagctgagctcagaggcagagaagctccttgcagggagcactgggagatggcctggcccgtcccaggctcctggaggccccacctgccgatcccaggcacttgaccttgttcctgtgggtgacagagatgagaaccagggaagctgtgatccactggccaggacaagtcaacatgggtgagggttgggcaaagggcccttccttcctccccaaccctgtggtctggggccatggcctcaggcttgtgtctatcacaaaagcacaaacttgccctaacccacatgggcctggctgtggggaaagtggggacccaggtccctgagctgtctgctgggctccgtagagcggtggtgggcaggcaccttggcatctgtgcagagacggcccagtctggccaaatcctcttcctctcccctgctctaccttctccggcaccaggcagccccttaaaggaggacaaagtgtgtaaagcccgtctgctgtcttcccccaaatcctcagctcagagccttccgcttccagggccaaccccagccccgtttgctgcgttgtgtaagggcttggggtcttagaagctgctctttagcccagatacacatactcttttttgtctttgtgcaataatcagtgttcctggcagagcctgggccaagctgcagcctactgaggaggcagaggccacctcctccagaaagccctcggcctgggccgccgccgtgactctagcactctcagtcgctgtacagtttctatggtgtgaatgaacttccctcctagttgctgatggcgctggtacctgctggcccatggcccgggtgtagagaaaccaagcggcagccaccaccagtgttgttttgaataaaagcccagaagcctatttaagaaaaaaa

SEQ ID NO: 652 - DNA, 7620 bp, Homo Sapiens
  NM_001003407
gtcattgagctgatgtgcttttgcaaggggtctctttagaagtggtaggggcagggtcgagagaagaaggggatgcagaatctgtacatgaggaaggagccagagtcactcaggaaactcctcattcttcctgcgctggctgtggcacacccaccggtggcacacccctccctcgggtccagttcagcccacagactcctgggaggagagccagggccccagcctctcctttgaggagtgttgcagcctttctgtgtgccagatgcctagtgaagaaaagctgaaaccctggagctttgtgcatgttaatgaccttggaaatgactgagctcacggaccctcatcacaccatgggagactacaaagtggcccaccctcaggaccctcaccacccatcagagaagcctgtcattcactgccataaatgtggggagccttgcaagggtgaagtgcttcgggtccagaccaaacatttccacatcaagtgtttcacctgcaaagtgtgtggctgtgacctggcacaagggggcttcttcataaagaacggagagtatctctgcaccctggactaccagcggatgtacgggacacgctgccatggctgtggggagttcgtggagggcgaagtggtgactgctctgggcaagacctaccatcccaattgctttgcttgtactatctgcaagcgcccgtttccacccggagaccgagtcacattcaatgggagagactgcctttgtcaactctgtgcacagccgatgtcgtccagtccgaaagaaaccaccttctccagcaattgtgccggctgcggaagagatatcaagaatgggcaggcgctgctggcgctggataagcagtggcacttggggtgctttaaatgcaagtcctgcgggaaggtcctcaccggggagtacatcagcaaggatggtgctccgtactgtgaaaaggactaccagggactctttggggtgaaatgtgaggcgtgtcaccagtttatcacagggaaagtcctggaggcaggtgacaaacattaccaccccagctgtgcacgatgcagcagatgcaaccagatgttcacagaaggagaggaaatgtatcttcaaggctccaccgtttggcatcccgactgtaagcaatctacgaagaccgaggaaaagctgcggcctaccaggacatcctcggaaagtatttattctaggccaggctccagtattcctggctcaccaggtcatactatctatgcaaaagtagacaatgagatcctggattacaaggatttagcagccattccgaaggtcaaggcaatttatgacattgaacgtccagatcttattacctatgagcctttctacacttcgggctatgatgacaaacaggagagacagagccttggagagtctccgaggactttgtctcctactccatcagcagaagggtaccaggatgttcgggatcggatgatccatcggtccacgagccagggctccatcaactcccctgtgtacagccgccacagctacactccaaccacgtcccgctctccccagcatttccacagacctggcaatgagccgtccagcggccggaactcccctctcccttaccggccagacagccgccctctaactccaacttacgctcaggcccctaaacatttccatgttccagatcaaggaatcaacatttaccgaaagccacccatctacaaacagcatgctgccttggcagcccagagcaagtcctcagaagatatcatcaagttttccaagttcccagcagcccaggcaccagaccccagcgagacaccaaagattgagacggaccactggcctggtcccccctcatttgctgtcgtaggacctgacatgaaacgcagatctagtggcagagaggaagatgatgaggaacttctgagacgtcggcagcttcaagaagagcaattaatgaagcttaactcaggcctgggacagttgatcttgaaagaagagatggagaaagagagccgggaaaggtcatctctgttagccagtcgctacgattctcccatcaactcagcttcacatattccatcatctaaaactgcatctctccctggctatggaagaaatgggcttcaccggcctgtttctaccgacttcgctcagtataacagctatggggatgtcagcgggggagtgcgagattaccagacactcccagatggccacatgcctgcaatgagaatggaccgaggagtgtctatgcccaacatgttggaaccaaagatatttccatatgaaatgctcatggtgaccaacagagggcgaaacaaaatcctcagagaggtggacagaaccaggctggagcgccacttagcccctgaagtgtttcgggaaatctttggaatgtccatacaggagtttgacaggttacctctttggagacgcaacgacatgaagaaaaaagcaaaactcttctaagtcccactcgtgaatggcaattagagaaaggactgacagtggcggtgccccataggatgtcatattgaggcccaaacttgattggagaatttgcaaactaccgtcgctcagcaacaccaaaaagagaaagtctggttaaaacaccatgagtcaaatgtcgggccagccaacagtaacacttgccaagaagcatggcgtagaaatttctatgttccgaaacacagagtagtgtccacatgtgagcttttcacattaccttatgtatacaacaggagctgcgttgttttcttctttttcttttcctttatctgttgtccaacaacagtgctgactgtccggataagagctggcaagtgcccttaggatgccgcatgggaaaaatcggttatcataatttcaaagtataaatatatttattaagtagcgctgcggctaagaaggaagagtgaggggtctgtccatggggtggcagtgatttcacacccgcctttcttgaatggcttcgtgttactcagccgtgccctggcaggaatggaactccatcagggaacagggcagctctgtttgaatggggtgaaaaacagcaaaattaattcttagcaagctccttgttctctactgttcaccgggacctggctggcaaatgacttagctattagtatatttaaaaactgttcaaaagcaaaagagaaggaacaggaatgaaaggaaaccttcccttaactctttctgcttcccatagcaggtctggttcctgctccccgcctaggacaggagctgtctggagctccacctttgcaaagaaaggaaaaacacaaattgcccccagattggcccagtggcatgccattaggtgattttgcataggggccatatcattcatggccaaaaaaaaccaaaaagcaaaaaacaaaaacaagtcccatgtcctactgactctagttcttccagtcgttatcctctgctgtctctctggcatcctatgaatcagatcaagcccatgctgttgttggtttttaaggtttctttcaataataggctaaggaaagacatgtttttctcttttaaatctctgcaactccaaagtagactccttcgaacgtatttaatttggccttttcagctttcttcttgcccagctctgtcgaattcatgggtgtgtgtgcacatgttggtttcactcacccagagtaattttgtgagcatgcatgtgctttttaatttctgcttgaatgtttgtcctgctgtgttgcagcttctaaagacattgtcaccgagtgtgtgtgactcaaagatcaagagtgaggctaaactgcgaccccaacatcacttccttcatggaaaggtgttggcgctgatgtagctcatggaaggatcagactgggaaccacagaggaaggatgaggtgggatgtggaggtcagagcatctcacgagagtccctcaggctctgcaacactagattcgaatatgagcctagggtttccccaacacgtgcgtgcatatgaaaccacatcatgattcccgacgtgagttagatgagggagagtttgtgtaactccacacccaggagggtaagccactttattatcatgctttggggctgtgcttaagaatttaagctctgttttaaagccgaagaagaaaacatttgaatttaccttcatatgccactaagaacaaaagctctgaagttcttcctgctggcaccaaatattaggattacaagctgtctctctgacaccagtggtaaaaaagcaagtagaatagtttctgagtctgtgttgcagcctctgacacgtggctcaccgctgtcatttgggggatggaatgaacagtcactgttctatagcatcctcctgtgctcttacctaaggaatctaaattgtcctagccttccattgctatgcactgaatgaggactactctcgtgtgtgtgtgtgtgtgtgtgtgtgtgtgtgtgtgtgtgtgtgtgtgtgttggatctactaacatgtttagcaaatggctctgacagggtggccatgagcagatgagaccagctcttgcttggttggaagccacactgcagtttgcagtttagcctttggtgtctcagtggcttcttgcttattccatgctttttctatcccatcctctctctgtgccctcctgcaatggcagccttggcacaatgcctgggtgtcctcatccttgctttactctggaaagtgtggggatggagaggatggtgcatttccagtgcttccttacctgtcaataacaatggtggccacctgggtcccagcacttggctggtggagagatttttttcattatggagctaataaagggtccctacgttttacattgattaatgaattatcacccagacatgtgcagatgaaatgtcaatataagaaaaatcaaggtatttgggaaacatgggcataatcaggtagttttgctaaaattcctcttccttggtctacataaagaagacatgggtctgtcatagaatggggacattagactgaaaactgggacaacccccttccttattttatagagactaggagttaaggggcctgcctaagattgcagtgataaagaactgaaccctaaatcagctcccactaatgaaaccctgctttccttgtatcttttaaactcagttctgcatccaacttgagaagaaaaaaagcttctttccatatcaagtaccatatgagttcatttaaactgcaccttgcagaaatgcattgccagaaagcaccagtagcctcctatctgcaagcagagtagtgctctgctctggggaggggtcattggaaaccataatgcagagtgggccccctactccatttcccagcaaaaggctccagctggagggatgggttgtggggcaacctggttcctgctaactgccagattgaatgtgtgggctagaatgcctgcacatttagttaaactgggctcagcatgcttgtcctcaaaatgtccatcctggtcacagcacacaagatggctattggtctgcttttaccctaccctgtactatacatgaaaattccagttattaacacactcaaactggtggagcttgttcaccctaggaaggggattgtatatatggcaggcttccctggtgccgatgtaaagggctacatttgggaacatttgacttccttgggactcttaagtgcataatgatggcatgaagtaaaaggggcctcaatgatgataggaaaatcagttcttttaaaatttcttcaagaaaatccaggctatcacatagtctttctgtgtgacttattaggagataggaagagcattgggaaacttgcacagctagctatgcatctacattttggtttggggttagttatgaaatgttcttaatatgacgtgttcaataacttcacataaacttcctgttctccaaaacctcaaagagatagagttaatgagttgttgtttttttttaaatgggggtagttttctatctgtcatgggctctagcatctactccgctacccaattctgtcatctccaagctgagtttcctcttctgaggcagaggctggagcagttctttttcagttctcatcctctccatcccaatccagtatatcaatcaactctaactcggagacgtctagctggcaatgtttctaaaactttcactggatttctttagacattgaagcaaacatttttttctaagaattgcttctcagatgatgatatcaaatgtatatgcttttgcaagtttgaaaagttcaaattaaccacttttgactaggtaagtctttctaaaaaccatttaaagctaactgggtcttagcatcctcctgtgtatggaagagacaggtgaccgctccaggttgggtgctcacagaacccttttcctgactctcatggaagatggtggaaggaaaatagactgtctcatcaaccctcctgtgtcctctgaagcaatctcagtttttattaaccacctcttctgtgtttctggtagctatttaacctgtatttaatctgtacttcctatgccagcctcaattttatttgatttttacaattattctcttctaaccaatgaagtgtttgtcagtatgccccaaagcttgctcttttgtgctcccttttgaataactttctatccagaaaaagagattatttgggacttgagatttgcagtgataccaacttatagcaatgatgtactttaagggaactacccaactatgttgtgatagaagaaagagaaaccttcactttggcatttttttttaatcactgtttatttttctgtttgcggcccaggaagcagtgggaggtggtggcagatatgctttgcatatggattgttatgtttttatttgggcaagtttaatcatggaaaactcaaaaagaaggggggaaatggtcagtttaagccaaaagaaactttctaaacaatgtataggtacacagcaaaattaaacaaatccaacaatttctgaagcttagtgtaattgagtggtggttgttattcaataaaattattcccaaaagtgtttctcctaagagtgcagttcccatgagtcacttcctgaacccattgaccaaaggtggacagagacaatcctgtagaccttgacattcagaaagatgtgagctgcttactgatcatatatgcatacgtttctttacagcagaggaaaccattgtccacaaaactgatgttcttttggggttttatgtacagacttgtccaatcatgtgtgtggttcctgcgagttgctgatgactccgcattgaagctctctgagttctttgattttaagttgggtttatggaattttttcaaatgttggaaggtgtgtggttcttcctgccctccctccccttttggaaatatgaaagcaaatgtttagaagaattccttttgaaaagctgtgtcgtgttccctgtgaaactgagcaggtgtgtgttggcgcgctaagtgccacatgcttgtgtgtagaggaggaggtggccctgccggctccgcgctgctgtgcctgtgatccctacctgctccccgctcctgttgccagcagcactcactgcactcctttgtcatatactctgcatcactgtcatactcacaacttcgtgaataaagttgtgtgctttattcgtagaaaaaaaaaaaa

SEQ ID NO: 653 - DNA, 1753 bp, Homo Sapiens
  NM_001003677
ctcccgtcccccttccgccgcgtgggtgccatggcaacggagagagacggcaacctgggttccggaagccggagagctggagctttgaagccaccccggtcaaaggatgctgagtccggagcgcctagccctaccggactacgagtatctggctcagcgacatgtcctcacctacatggaggatgcagtgtgccagctgctagaaaacagggaagatattagccaatatggaattgccaggttcttcactgaatattttaacagtgtatgccagggaacacacattctctttcgagaattcagcttcgtccaagccaccccccacaatagggtatcatttttacgggccttctggagatgcttccgaactgtgggcaaaaatggcgatttgctgaccatgaaagaatatcactgtttgctgcaattactgtgtcctgatttcccgctggagctcactcagaaagcagccaggattgtgctcatggacgatgccatggactgcttgatgtctttttcagatttcctctttgccttccagatccagttttactactcagaattcctggacagtgtggctgccatctatgaggacctgctgtcaggcaagaaccccaacacagtgattgtgccgacgtcgtccagtgggcagcaccgccaacgacctgccttgggcggggccggcacgctggagggcgtggaggcgtcgctgttctaccagtgtctggaaaacctgtgtgatcggcacaagtacagctgcccacccccagcacttgtcaaagaggccctcagcaatgttcagagactgaccttctatggattcctcatggctctctcaaagcaccgtggaatcaaccaagccctcggagctttgcctgacaagggggatctgatgcacgacccagcaatggatgaagagctggaacggctgcttcttcccttcttcaggctggcccaggtcccaggcctggtcaactcggtcacagccagtccagaggccagttgcctgccttcccggacccctccccgggttggctctccctggagacctctccatcattcccgaaaagtggatggagagagtgatggctccactgaagagacagacgagtcggagacttgaggagtccaaagggtcctgcccacagcgccctgtacctgctcccacccagcccttggtgtgcccacccagcctcctctccagcaccttgctgtgctgccctctgctgctgacaaggtgaataacagccccaagaccagccagaggggctctgatgatcagcccagccagtggccccggaaggtgaatggcctgctctccctggccctatcagcctgtgaacttcacttaggccccaagctgacagactgtgctgaggccaccttgtcacgccgtagcctgttagtcctcctaacctcttaagagcagtctcttctgagccagcctctgcgggtcccccaataaggttcatctcctcacagcaactccattaagggggagaacccgaatagccacgcagggccttgcaccatcaagggtgacacctgcgacgcaagtaccaggaggacataaccgctgtggcctgttggagaacagccagtagccttggtaatatgaagggtgggccagaagatgatttcacttgcaaaaactgcttcaagtcttgacccctttgtgtctaatagctaaacaaacatgtgaaacgaataaaaagtccctcatgtctggtaaaaaaaaaaaaaaaaaaaaaaaaaa

SEQ ID NO: 654 - DNA, 5142 bp, Homo Sapiens
  NM_001003679
ccggtctggcttgggcaggctgcccgggccgtggcaggaagccggaagcagccgcggccccagttcgggagacatggcgggcgttaaagctctcgtggcattatccttcagtggggctattggactgacttttcttatgctgggatgtgccttagaggattatgggtgtacttctctgaagtaagatgatttgtcaaaaattctgtgtggttttgttacattgggaatttatttatgtgataactgcgtttaacttgtcatatccaattactccttggagatttaagttgtcttgcatgccaccaaattcaacctatgactacttccttttgcctgctggactctcaaagaatacttcaaattcgaatggacattatgagacagctgttgaacctaagtttaattcaagtggtactcacttttctaacttatccaaaacaactttccactgttgctttcggagtgagcaagatagaaactgctccttatgtgcagacaacattgaaggaaagacatttgtttcaacagtaaattctttagtttttcaacaaatagatgcaaactggaacatacagtgctggctaaaaggagacttaaaattattcatctgttatgtggagtcattatttaagaatctattcaggaattataactataaggtccatcttttatatgttctgcctgaagtgttagaagattcacctctggttccccaaaaaggcagttttcagatggttcactgcaattgcagtgttcatgaatgttgtgaatgtcttgtgcctgtgccaacagccaaactcaacgacactctccttatgtgtttgaaaatcacatctggtggagtaattttccagtcacctctaatgtcagttcagcccataaatatggtgaagcctgatccaccattaggtttgcatatggaaatcacagatgatggtaatttaaagatttcttggtccagcccaccattggtaccatttccacttcaatatcaagtgaaatattcagagaattctacaacagttatcagagaagctgacaagattgtctcagctacatccctgctagtagacagtatacttcctgggtcttcgtatgaggttcaggtgaggggcaagagactggatggcccaggaatctggagtgactggagtactcctcgtgtctttaccacacaagatgtcatatactttccacctaaaattctgacaagtgttgggtctaatgtttcttttcactgcatctataagaaggaaaacaagattgttccctcaaaagagattgtttggtggatgaatttagctgagaaaattcctcaaagccagtatgatgttgtgagtgatcatgttagcaaagttacttttttcaatctgaatgaaaccaaacctcgaggaaagtttacctatgatgcagtgtactgctgcaatgaacatgaatgccatcatcgctatgctgaattatatgtgattgatgtcaatatcaatatctcatgtgaaactgatgggtacttaactaaaatgacttgcagatggtcaaccagtacaatccagtcacttgcggaaagcactttgcaattgaggtatcataggagcagcctttactgttctgatattccatctattcatcccatatctgagcccaaagattgctatttgcagagtgatggtttttatgaatgcattttccagccaatcttcctattatctggctacacaatgtggattaggatcaatcactctctaggttcacttgactctccaccaacatgtgtccttcctgattctgtggtgaagccactgcctccatccagtgtgaaagcagaaattactataaacattggattattgaaaatatcttgggaaaagccagtctttccagagaataaccttcaattccagattcgctatggtttaagtggaaaagaagtacaatggaagatgtatgaggtttatgatgcaaaatcaaaatctgtcagtctcccagttccagacttgtgtgcagtctatgctgttcaggtgcgctgtaagaggctagatggactgggatattggagtaattggagcaatccagcctacacagttgtcatggatataaaagttcctatgagaggacctgaattttggagaataattaatggagatactatgaaaaaggagaaaaatgtcactttactttggaagcccctgatgaaaaatgactcattgtgcagtgttcagagatatgtgataaaccatcatacttcctgcaatggaacatggtcagaagatgtgggaaatcacacgaaattcactttcctgtggacagagcaagcacatactgttacggttctggccatcaattcaattggtgcttctgttgcaaattttaatttaaccttttcatggcctatgagcaaagtaaatatcgtgcagtcactcagtgcttatcctttaaacagcagttgtgtgattgtttcctggatactatcacccagtgattacaagctaatgtattttattattgagtggaaaaatcttaatgaagatggtgaaataaaatggcttagaatctcttcatctgttaagaagtattatatccatgatcattttatccccattgagaagtaccagttcagtctttacccaatatttatggaaggagtgggaaaaccaaagataattaatagtttcactcaagatgatattgaaaaacaccagagtgatgcaggtttatatgtaattgtgccagtaattatttcctcttccatcttattgcttggaacattattaatatcacaccaaagaatgaaaaagctattttgggaagatgttccgaaccccaagaattgttcctgggcacaaggacttaattttcagaagagaacggacattctttgaagtctaatcatgatcactacagatgaacccaatgtgccaacttcccaacagtctatagagtattagaagatttttacattttgaagaaggggagcaaatctaaaaaaaattcagttgaacttctgagagttaacatatggtggattatgttgatttagaacttaaaatagatgtgtaaatttgggttcaaaatgtagatttgagtccagtttggatgtgtgattaattttcaaatcatctaaagtttaaaagtagtattcatgatttctggcttttgatttgtcatattcctggtcataaaacattaagaaaattatggctgttgctgtcattacatatctattaaatgtcatcaaatatgtagtagacaatgctgtaattaggtgaactctaaaactgcaacatctgacaaatagctttaaaaatacaatgattataagtatggaatcagtgaaaatatttagtttgtatttttatgtccaaacttttccattttagattcctttatagacacgtcagcctaaaaatcagcctattcgggtgttcttttgaatatctcctggcatttttgtatctaactttgttcaatctgggaatttcagttttcaatatccttgaaaatggcttaagtgataacttccgtttcagttaaaaggaagcccgaagttgtgtttgtgctgcccacaggacagtgggagttacagttcatatcaggatgaccctacatacccaggtcagattgacgggaccagaagggaacatcgacttctaatccagctttcttgtttaattatgacctaaatctaatttacttccactgaaccatccaagacctctggcaggcagggaaatgggcagtgatgcaaaaaagggagactctttggagcttttatgaatagttcatggtgaggacagaacttttctactttcagacagactgcttgctagttttatgaattcagcacacgaattatgctgcgttgctcacattcaaaccaaaccaacgactatgtttaatgaactcagtattcaaatttattatatatgcgtatatatgtatatatggatcccttatatttagatttaactcgtagttttatttgaaagtagaaaagaactctacaaaaacgggaagaatgtgtctttcttcccttcttgacttctaataggtgtcattgaaatgtaaaatctaagtatgaaattatgaaaggacattctttaattactgcccactcaacacatatttaatatgtgcccagattattctaaaatcttaaaaaaagatgcatatagtgaaattttttaaatggatatacttttaataaagttttataactcactgacaaaacatatttcaatagtatatgagtatgagatttcttatcaattatgagtgaaatattctatctgaatgcattggaaggcatttacagtatttgctttcaacagttactgagtatgacattttagcatgaaatatatcaaacacatcatttgaaggacatatgtaatcttgactatggttatggtttttttgtatgtattccttgttttcatattgatagcatctaattcttttgacaatcttaatatgtaggttcatttaaattttaagacagttcagtgcatatatagtagaagccttaagaaaaaagaaaatgagcaagcaaatatttgaagaaatgtataaaaccatagatttctttcagaaaaaaaaaacaggcataggaacagttttctcttcatatattatgattatgaataataggaaagttgtattaattcagtatttgtcattatgcagtattttaatacctacataagtctattccattattatattttgcgcttggcatatttattcctttatgcttttaatcactaacatattttacttaagagtataaaactatgctaaataaattgtattgtatatggaatatgcttgccattatgaagaacagctgggtataccattatttcaagtaataaatctgaattctattagtttaaaaattgtaaaattcaagttaaatgacgtgtatgatatataagctgaacacattttctatagcccttaatttagttgtgttaatttttcaaggtgatgtatcaacagctttttttattttgcatttgttttttcaatgtgtttacattgtatgaattgagctttttgcccacagattcttgatttgtagttgtttggcaggatttttctttgtgatataatcacttctataaaaaatatgatgtacaaaaaaaa

SEQ ID NO: 655 - DNA, 1334 bp, Homo Sapiens
  NM_001003686
ggcctgcagtggacgagcatcgcatagcctgcggggctggatgctgaccgcccgggccagcacctaggcggacgcggagctgtgcagaccagggttcgcgcgggccgggtggaggctcaagcggggaccccggagcgtgagccccggagtcggcggcgctggggccagaggggccgggagggagtcggctgaggtggcggcggaggcgaagtggcggcggaggcgaaggggcggcgggacccgggcctggcccgtatgtgtccttggcggcctagactaggccgtcgctgtatggtgagccccagggaggcggatctgggcccccagaaggacacccgcctggatttgccccgtaggcccggcccgggcccctcgggagcagaacagccttggtgaggtggacaggaggggacctcgcgagcagacgcgcgcgccagcgacagcagccccgccccggcctctcgggagccggggggcagaggctgcggagccccaggagggtctatcagccacagtctctgcatgtttccaagagcaacaggaaatgaacacattgcaggggccagtgtcattcaaagatgtggctgtggatttcacccaggaggagtggcggcaactggaccctgatgagaagatagcatacggggatgtgatgttggagaactacagccatctagtttctgtggggtatgattatcaccaagccaaacatcatcatggagtggaggtgaaggaagtggagcagggagaggagccgtggataatggaaggtgaatttccatgtcaacatagtccagtacagaacctgctaaggccatcaaacctattgatcggaagtcagtccatcagatttgctctgggccagtggtactgagtctaagcactgcagtgaaggagttagtagaaaacagtctggatgctggtgccactaatattgatctaaagcttaaggactatggagtggatctcattgaagtttcagacaatggatgtggggtagaagaagaaaactttgaaggcttaacgatgtcaccatttctacctgccacgcgtcggtgaaggttgggactcgactggtgtttgatcacgatgggaaaatcatccaggaaaccccctacccccaccccagagggaccacagtcagcgtgaagcagttattttctacgctacctgtgcgccataaggaatttcaaaggaatattaagaagacgtgcctgcttccccttcgccttctgccgtgattgtcagtttcctgaggcctccccagccatgcttcctgtacagcctgcagaactgtgagtcaattaaacctcttttcttcataaattaaaaaa

SEQ ID NO: 656 - DNA, 4728 bp, Homo Sapiens
  NM_001003694
cgtcgccgccgctgctgccgccgccgctgccacagcctttgccgccacggtctccgccgccgctgtcctcgcgctgcctctgggagcctccattgttccagcagcgcccggtcccgagaccgggcatcttgggggctcgcgaaacgggcggcggccgacggagttgagaccccagggcgccggcgggaccaggagcggcaggggtcagctcaggaatcccggggagccgggaccaaagcgtggggcggcagggggccggggtggcgaggtctacggtctccggagttggggctcccccttcccggcccgactttccccgccgacctccccaagtggggtcggagccccggcgggcgcccccggcgatgagcccggactcgaggtggccgatgtgacagcatgggggtggactttgatgtgaagactttctgccacaacttgcgggcgactaagccaccatacgagtgcccggtggagacctgccgaaaggtctacaagagttacagtggtattgagtaccacctgtaccactatgaccacgacaacccaccacccccacaacaaactccactccgcaagcacaagaaaaaggggcgccagtcacgcccagccaacaagcagtcacccagcccctcagaggtctcacagtcaccaggccgtgaggtgatgagctatgcacaggcccagcgcatggtggaggtggacttgcatggccgcgtccaccgcatcagcatctttgacaacctggatgtggtgtcagaggatgaggaagcccccgaggaggcccctgagaatggcagcaacaaggagaacactgagacaccagctgctactcccaagtcaggcaaacataagaacaaggagaagcgcaaggactccaaccatcaccaccaccacaatgtttctgcgagcaccactcccaagctgccagaggtggtctatcgggagctggaacaggacacccctgatgccccaccccggccaacttcctattaccggtacatcgagaagtctgcagaggagctggacgaggaagtagagtatgacatggacgaggaggactacatctggctggatatcatgaatgagcgtcggaagacagagggtgtaagtcccatcccgcaggagatctttgagtacctaatggaccgactggagaaggagtcgtactttgagagtcataataaaggcgaccctaatgcgctagtggacgaggatgctgtttgctgtatctgcaatgatggtgagtgccagaacagcaatgtcatcctcttctgtgacatgtgcaacctggccgtgcaccaggagtgctacggtgtcccctatatccctgagggccagtggctgtgccgccgttgcctgcagtcaccctctcgtgctgtggattgtgccctgtgccccaacaagggcggtgccttcaagcagacagatgacgggcgctgggcccatgtggtgtgtgccttgtggatccctgaggtctgcttcgccaacacggtcttcctagagcctattgacagcattgagcacatcccaccagctcgctggaagctcacctgctacatttgcaaacaacggggctcaggggcctgcatccagtgccacaaggccaactgttacacagctttccatgtgacatgcgcccagcaggctggcctttacatgaagatggagcctgtgcgggagacaggcgccaacggcacctctttcagtgtccgcaagacagcctactgcgacatccacacgcctccaggttcagcacgccgactgcctgccctgtcccacagcgagggtgaggaggatgaagatgaggaggaggatgagggtaagggctggagctcagagaaagtcaagaaggccaaggccaagtcccggatcaaaatgaagaaggcacggaagatcctggcagagaagcgggcagcagcacctgtggtgtcagtgccctgcatcccaccacacaggcttagtaaaatcaccaaccgcctgaccatccaaaggaagagccagttcatgcagaggctgcacagctactggacactgaagcggcagtcacggaatggggtcccattgctacgtcgcctgcagacacacctgcaatctcagaggaactgtgaccaagttgggagagattctgaggataagaactgggcccttaaagaacagctcaagtcctggcagcggctccggcatgacttggagcgagctcggctgctcgtggaattgatccgcaagcgggaaaaactcaaaagggagacgatcaaggttcagcagattgccatggagatgcagctgactcctttcctcatcctccttcgcaaaaccttggagcagctccaagagaaggacacaggcaacatcttcagcgagccggtccctctgtctgaggtaaccgaattggacgaagtacctgactacctagaccacatcaaaaagcccatggactttttcaccatgaagcagaacttggaggcttaccgctacctgaattttgatgattttgaggaggacttcaacctcatcgtcagcaactgcctcaagtataacgccaaggacaccatcttctaccgggcagcagtgcggcttcgtgagcagggtggtgctgtgctccgccaggcccggcgccaggcagaaaaaatgggcattgactttgagacgggcatgcatatcccccacagcctggctggagatgaggccacacaccacactgaagatgcagccgaggaagagcggctggtcttgctggagaaccagaagcacctgccagtggaagaacagctaaagctgcttctggagcggctggacgaagtgaatgccagcaagcagagtgtgggccgctcacggcgtgcaaagatgatcaagaaagagatgacggcactgcggcggaagcttgcccatcagcgagagacgggacgtgatggccctgagcggcatggcccctcgagccggggtagtctgacaccccacccggcagcctgtgacaaggatgggcagacagatagtgcggcagaggagagcagcagccaggagacaagcaaaggcctgggtcccaacatgtcctcaacccccgcacatgaggtgggcaggagaacctcagttctgttctccaaaaagaacccgaagacagctggaccgcccaagaggccgggccggccccccaaaaaccgggagagccagatgacccccagccacggaggcagtcctgtggggcccccccagctccccatcatgagttccctgcgtcagcgcaagcggggtaggagcccccggcccagttcgagctcagacagcgacagtgataagtccacagaagaccccccaatggacttaccagccaatggcttcagcggtggaaaccaaccagtgaagaagagtttcttggtataccgtaatgactgcagccttccccggagcagctcagactctgagtccagcagcagtagcagtagcagcgctgcttcagaccggaccagcacaacgccctcaaaacaaggccggggcaaaccctccttctctcggggcactttcccagaggacagcagtgaggatacctcaggcactgagaatgaggcctactccgtgggcactggccgcggcgtgggccacagcatggtaaggaagagtctgggccggggagctggctggctgtcagaggatgaggactccccgctggatgctctggacctcgtgtgggccaaatgccgaggctatccatcatacccagctctgatcattgatccaaagatgccccgagaaggtatgttccaccatggggttcccatccctgtgcccccactggaggtgctgaaacttggggagcagatgacccaggaagcccgagagcatctctacctcgtcctcttctttgacaacaaacgaacctggcagtggctgcccaggaccaagctggttcctctgggtgtgaaccaggacctagacaaggagaagatgctggagggccgcaagtccaacatccgcaagtcagtacagatcgcctaccacagggctctgcagcaccgcagcaaggtgcaaggcgagcagagcagtgagaccagcgatagtgattgatactgctcaacacagcccaacctatagtgccctgtgacttctctcctcccctttgctcactgtcctggagtggcaccggcctctgcactgactcatttctggtcttggggccagtctcaggggaagctgggtgggggaggtccctcctgccctaagtgcagctggactgtacagaacactccaagggccaatggcagttcagcgcaaggagagggagggcccacaggtcagaaaaagctccagagacctcacagcattgtagggcggggtggtgggccaaagttaggacactgcgtaaaacaggccatcccaccacctctacctgctcatgccaggagaatccataactgcctagaggcctggggcccctaccggtcgtgaggtgagtgggcatctgtccagcctggaagaggggcactaggtgactccctcccctgctgttgtaaatactgtaattatcggagaatttaaattattctcatttgtaactgcgtttccgggtcgcgccagagtcatttggtactaaaaaaaaaaaaaaaaaagactgggggctgtccccatttcccttctctttcccatagattcccccacctttcaaactggtttgtatttatttcaaaggaagaaaatatattgattcttagaaaataaactgtcaatttagaa

SEQ ID NO: 657 - DNA, 841 bp, Homo Sapiens
  NM_001003696
tgtgggggaaaaggccccggaacgaggccggcccgcgagggcccgcgctcccctcctccccggcggccgcactcacccactccggaatcggccctgtcgcccccgcccgcactccagagccggctgagaacggcagcggcgagggctccacgtgcagcgtctctccgggtaagacctgcagctcccgcgactagaagtgtgaggtcccagggcccttcccgcggaatcggcgctgagaagccccaacccccctcccgcctcccaggcaccttcgggtccaggactacaactcccggcagggtgcgcaaaacgaccgcccaaggcaacggaggctcacgagaatcagcatgattcttcagaggctcttcaggttctcctctgtcattcggtcagccgtctcagtccatttgcggaggaacattggtgttacagcagtggcatttaataaggaacttgatcctatacagaaactctttgtggacaagattagagaatacaaatctaagcgacagacatctggaggacctgttgatgctagttcagagtatcagcaagagctggagagggagctttttaagctcaagcaaatgtttggtaatgcagacatgaatacatttcccaccttcaaatttgaagatcccaaatttgaagtcatcgaaaaaccccaggcctgaagaaataaagtaaaattaatctggtaatttgtcacggattagttgtacaactagttagaagtttcagaataaacatgcatttcataactgtcaaatgttcttttaattctgagtccaaataaattatttggtgatgttgagtgtgttcttgatgaattgaaaaaaaa

SEQ ID NO: 658 - DNA, 1217 bp, Homo Sapiens
  NM_001003701
tgtgggggaaaaggccccggaacgaggccggcccgcgagggcccgcgctcccctcctccccggcggccgcactcacccactccggaatcggccctgtcgcccccgcccgcactccagagccggctgagaacggcagcggcgagggctccacgtgcagcgtctctccgggtaagacctgcagctcccgcgactagaagtgtgaggtcccagggcccttcccgcggaatcggcgctgagaagccccaacccccctcccgcctcccaggcaccttcgggtccaggactacaactcccggcagggtgcgcaaaacgaccgcccaaggcaacggaggctcacgaggtacaaggaagcacaacgccccaatccgctttgttttacacagtctcactttccctgcacctttatacacttcgataaccctaacgaacaggacgctgactcggaggggagcttgaactaggggaaaggccactcaaagagcgcatgcgtacagagcaaggtttcaaggaggggaaaaagaacgggtcaaattaggcgaagaaaagatggcggaggctgtgccaggggacccggaagcacttaccctccacttcctcctcctgtttggcttctgtctcacctagacccgtccggtcgcagactgtctccgagacgcttcctgtccggtgagcgtcgaccgactgaaacggcggcccataatgcattgcgatggcggaatcagcatgattcttcagaggctcttcaggttctcctctgtcattcggtcagccgtctcagtccatttgcggaggaacattggtgttacagcagtggcatttaataaggaacttgatcctatacagaaactctttgtggacaagattagagaatacaaatctaagcgacagacatctggaggacctgttgatgctagttcagagtatcagcaagagctggagagggagctttttaagctcaagcaaatgtttggtaatgcagacatgaatacatttcccaccttcaaatttgaagatcccaaatttgaagtcatcgaaaaaccccaggcctgaagaaataaagtaaaattaatctggtaatttgtcacggattagttgtacaactagttagaagtttcagaataaacatgcatttcataactgtcaaatgttcttttaattctgagtccaaataaattatttggtgatgttgagtgtgttcttgatgaattgaaaaaaaa

SEQ ID NO: 659 - DNA, 1303 bp, Homo Sapiens
  NM_001003703
tgtgggggaaaaggccccggaacgaggccggcccgcgagggcccgcgctcccctcctccccggcggccgcactcacccactccggaatcggccctgtcgcccccgcccgcactccagagccggctgagaacggcagcggcgagggctccacgtgcagcgtctctccgggtaagacctgcagctcccgcgactagaagtgtgaggtcccagggcccttcccgcggaatcggcgctgagaagccccaacccccctcccgcctcccaggcaccttcgggtccaggactacaactcccggcagggtgcgcaaaacgaccgcccaaggcaacggaggctcacgaggtacaaggaagcacaacgccccaatccgctttgttttacacagtctcactttccctgcacctttatacacttcgataaccctaacgaacaggacgctgactcggaggggagcttgaactaggggaaaggccactcaaagagcgcatgcgtacagagcaaggtttcaaggaggggaaaaagaacgggtcaaattaggcgaagaaaagatggcggaggctgtgccaggggacccggaagcacttaccctccacttcctcctcctgtttggcttctgtctcacctagacccgtccggtcgcagactgtctccgagacgcttcctgtccggtgagcgtcgaccgactgaaacggcggcccataatgcattgcgatggcgggtaggcgtgtgggggcggagccagggccggaagtagagcggaggtggtggcggcggaggctttggcagctcgggactgagtgcaagaatcagcatgattcttcagaggctcttcaggttctcctctgtcattcggtcagccgtctcagtccatttgcggaggaacattggtgttacagcagtggcatttaataaggaacttgatcctatacagaaactctttgtggacaagattagagaatacaaatctaagcgacagacatctggaggacctgttgatgctagttcagagtatcagcaagagctggagagggagctttttaagctcaagcaaatgtttggtaatgcagacatgaatacatttcccaccttcaaatttgaagatcccaaatttgaagtcatcgaaaaaccccaggcctgaagaaataaagtaaaattaatctggtaatttgtcacggattagttgtacaactagttagaagtttcagaataaacatgcatttcataactgtcaaatgttcttttaattctgagtccaaataaattatttggtgatgttgagtgtgttcttgatgaattgaaaaaaaa

SEQ ID NO: 660 - DNA, 960 bp, Homo Sapiens
  NM_001003704
agacgctccctgctggcggagatttcctgacctgtccttcggcgcgggactttcggcgggtcccggccgggcagacccaagtgccggcggcggagactgcagtggagccagtaccggctgtagtggccggggccgtggcgggagagtcatgtcagagccgcagccgcggggcgcagagcgcgatctctaccgggacacgtgggtgcgatacctgggctatgccaatgaggtgggcgaggctttccgctctcttgtgccagcggcggtggtgtggctgagctatggcgtggccagctcctacgtgctggcggatgccattgacaaaggcaagaaggctggagaggtcggtggatttcctcctggactccagcctgcgcaagctctacccaacagtggggaagcccagctcctcctgatcatactctggtacctggcctgtgcatcggcctcctgcttcatgtcaacctcctactcctgccagggaatgtggacacctggctccctggtgtccaaagaccctggcacctgggtgggtttgagctggacagaagcttagagacaaaggcttcaagaagcagtggctgcagggagtcacagaagggcaggacctgaacgctgtctgcttccctggaatccaagatgctgagtggaagtggaccctgggtgggcccggccctgtctttttcaggaaaattacatcctcccatggaggatgagagactgaggctcagggagggcaaggaataggcccaagatcacttggcaagctgggcacccaggacccccaggtgcttgacagagtcaccccatggtggtatggctgaacaaggagcggcagacaactcagggagaaactcaggagtgcagtaccagggacacctcaggacagattctctggccaggcccttccctgacccaataaatcctgaagaggttaaaaaaaaaaaaaaaaaaaaaaaa

SEQ ID NO: 661 - DNA, 411 bp, Homo Sapiens
  NM_001003714
gtgcattccctacccagcagccctcgcgcggtccggcacagcggacaccaggactccaaaatggcgtcagttggtgagtgtccggccccagtaccagtgaaggacaagaaacttctggaggtcaaactgggggagctgccaagctggatcttgatgcgggacttcagtcctagtggcattttcggagcgtttcaaagagagcacgagcggctccgcaaataccactgaagaggacacactctgcacccccccaccccacgaccttggcccgagcccctccgtgaggaacacaatctcaatcgttgctgaatcctttcatatcctaataggaattaacctccaaataaaacatgactggtacgtgtgctgattgcctgcctgtctgccgtagccaaaaaaaaaaaaaaaaaa

SEQ ID NO: 662 - DNA, 2367 bp, Homo Sapiens
  NM_001003787
cggcgcggcggcggctgctagggcctgccgcagccgcggccactcggaaagggcgggacttccccgcagggcggggtggggcggagcgctctatcagtcctcccggtcgccccactgcgcatggcacgttgcgtactcccctcccagcaaccggtctggcggcggcgcggcagtaaaactgaggaggcggagccaagacggtcggggctgcttgctaactccaggaacaggtttaagtttttgaaactgaagtaggcctacacagtaggaactcatgtcatttcttgtaagtaaaccagagcgaatcaggcggtgggtctcggaaaagttcattgttgagggcttaagagatttggaactatttggagagcagcctccgggtgacactcggagaaaaaccaatgatgcgagctcagagtcaatagcatccttctctaaacaggaggtcatgagtagctttctgccagagggagggtgttacgagctgctcactgtgataggcaaaggatttgaggacctgatgactgtgaatctagcaaggtacaaaccaacaggagagtacgtgactgtacggaggattaacctagaagcttgttccaatgagatggtaacattcttgcagggcgagctgcatgtctccaaactcttcaaccatcccaatatcgtgccatatcgagccacttttattgcagacaatgagctgtgggttgtcacatcattcatggcatacggttctgcaaaagatctcatctgtacacacttcatggatggcatgaatgagctggcgattgcttacatcctgcagggggtgctgaaggccctcgactacatccaccacatgggatatgtacacaggagtgtcaaagccagccacatcctgatctctgtggatgggaaggtctacctgtctggtttgcgcagcaacctcagcatgataagccatgggcagcggcagcgagtggtccacgattttcccaagtacagtgtcaaggttctgccgtggctcagccccgaggtcctccagcagaatctccagggttatgatgccaagtctgacatctacagtgtgggaatcacagcctgtgaactggccaacggccatgtcccctttaaggatatgcctgccacccagatgctgctagagaaactgaacggcacagtgccctgcctgttggataccagcaccatccccgctgaggagctgaccatgagcccttcgcgctcagtggccaactctggcctgagtgacagcctgaccaccagcaccccccggccctccaacggtgactcgccctcccacccctaccaccgaaccttctccccccacttccaccactttgtggagcagtgccttcagcgcaacccggatgccaggcccagtgccagcaccctcctgaaccactctttcttcaagcagatcaagcgacgtgcctcagaggctttgcccgaattgcttcgtcctgtcacccccatcaccaattttgagggcagccagtctcaggaccacagtggaatctttggcctggtaacaaacctggaagagctggaggtggacgattgggagttctgagcctctgcaaactgtgcgcattctccagccagggatgcagaggccacccagaggcccttcctgagggccggccacattcccgccctcctgggcagattgggtagaaaggacattcttccaggaaagttgactgctgactgattgggaaagaaaatcctggagagacacttcactgctccaaggcttttgagacacaagggaatctcaacaaccagggatcaggagggtccaaagccgacattcccagtcctgtgagctcaggtgacctcctccgcagaagagagatgctgctctggccctgggagctgaattccaagcccagggtttggctccttaaacccgaggaccgccacctcttcccagtgcttgcgaccagcctcattctatttaactttgctctcagatgcctcagatgctataggtcagtgaaagggcaagtagtaagctgcctgcctcccttccctcagacctctccctcataattccagagaagggcatttctgtctttttaagcacagactaaggctggaacagtccatccttatccctcttctggcttgggccctgacacctaagtctttcccacggtttatgtgtgtgcctcattcctttcccaccaagaatccatcttagcgcctcctgccagctgccctggtgctttctccaagggccatcagtgtcttgcctagcttgagggcttaagtccttatgctgtgttagtttcgttgtcagaacaaattaaaattttcagagacgctgctggagaaaaaaaaaaaaaaaaaaaaaaaaaaaaaaaa

SEQ ID NO: 663 - DNA, 2190 bp, Homo Sapiens
  NM_001003789
gctgcgaggacgcgggccgagccggaagtggagtgcgctgcggcgcgagctgggccggcgggcgtggttcgagagcgcgcagagtccagactggcggcagggcccgaggggccgacccgcagcgtccctggtctctccagccctcactcggaaccgcacacagtgacaataccctcccctcccttgggctggacccctctctacagctaggagccaatggcagaagacaaaaccaaaccgagtgagttggaccaagggaagtatgatgctgatgacaacgtgaagatcatctgcctgggagacagcgcagtgggcaaatccaaactcatggagagatttctcatggatggctttcagccacagcagctgtccacgtacgccctgaccctgtacaagcacacagccacggtagatggaaggaccatccttgtggacttttgggacacggcaggccaggagcggttccagagcatgcatgcctcctactaccacaaggcccacgcctgcatcatggtgtttgatgtacagaggaaagtcacctataggaacctgagcacctggtatacagagcttcgggagttcaggccagagatcccatgcatcgtggtggccaataaaattgatgcagacataaacgtgacccaaaaaagcttcaattttgccaagaagttctccctgcccctgtatttcgtctcggctgctgatggtaccaatgttgtgaagctcttcaatgatgcaattcgattagctgtgtcttacaaacagaactcccaggacttcatggatgagatttttcaggagctcgagaacttcagcttggagcaggaagaggaggacgtgccagaccaggaacagagcagcagcatcgagaccccatcagaggaggcggcctctccccacagctgaggggctggggctaggggtgggtggagcccttttaaaatacccttcccttcaacaactctccagctctgaatggagaaactctctaggccatcccctcttctacctcctgcaacccacccatcctattagcctcccacattctaggcccgtgatacagggatgaggtcagcaccagcaaactctggactggtggaagaattccccaccagatctccttgaagcagaagtagggatcagcatcattaacaccttccccaccccctccccgcaggcagacagtgaagagaatcagaaaacatgattatgtgtcactttaatacaggaaatttaggtgttttttggtgtttttgtttttgtttttgttttctttccaaagctcacctcggggacaattccttgggcttctcctgaggtaatgatttacccccccacccacagctgagtctgtgaggccccatcctttccctacgttttctcccatcttttttcctcttcagtctcccagtcatctggtttgtttgtttctttgttcgttctgagacggagtctcgctctgtcgccaggctggagtgcagtggcgcagtctcggctcgctgcaacctctgactccctggttcaaacgattctcctgcctcagcctcccgagtggctggcatcaccacgcccagctaatttttgtatttttagtagagacggggtttcaccatgttgcccaggatggtctcgatctcctcacctcgtgatccgcccgcctcggcctcccaaagtgctgggattacaggcatgagccaccgcgcccggccccaatcatctgtttttaaacaatcgtttttgagcagatagctattcattccagattttcgtgtacccattctgtttcaggagctcttctaggtaaagctgagatcacaggaacagcaggtgacaggcctagctatagttaggaatacacaagccgtaaaatcgagtccttacagccataccacaaggtacgtccatttggactacaagaagagcttcctttaaagttcctatttcagcataaagaggctgtccttttttttgaggaatagtttggaccttgtgcctcctgtgggaggctgaggactgcaagaggagagctagcagatatgcctgttcacccctctctggtacttgtggcttgctagtatgtttttatgataatctcgggcattgtttgcattgtgtttattaatagggttttgtttttgttgtttccttttttacagtaaaggctgaattacataaacattgagtaaatgt

SEQ ID NO: 664 - DNA, 3595 bp, Homo Sapiens
  NM_001003795
aaacaaaaaaaggggggaaaagggggggaaagaaagaaagagaaaaaggagggcgagtggcgagcaggggcctcggccgccacccacacgccccgaagcgtgctcgtcccccgcgcggggctcccggccgccgccctcggccatcggctgctccccggtggcccaggcctcggactccgcggccggcccggcgcggcccagcgccctcagggatcatggcccaggtagcagtgtccaccctgcctgttgaagaagagtcctcctcagagaccaggatggtggtgacattcctcgtgtctgccctcgaatccatgtgtaaagaactggccaagtccaaggcagaagtggcctgcatcgcagtgtacgaaacagacgtgtttgtcgtcggaaccgagagaggatgcgcttttgttaatgccaggacggattttcagaaagattttgcaaaatactgcgttgcagagggactgtgtgaggtgaaacctccctgccctgtgaacgggatgcaggtccactcgggcgaaacggaaatactcaggaaggcagtggaggactatttctgcttttgttatggtaaagccttagggacaacagtgatggtgcctgttccctatgagaagatgctgcgagaccagtcggctgtggtagtgcaggggcttccggaaggcgttgcctttcaacaccctgagaattacgaccttgcaaccctgaaatggattttggagaacaaagcagggatttcattcatcataaatagacccttcctaggaccagagagtcagctgggtggccctgggatggtaacagatgcggagagatccatagtatcaccaagtgaaagctgcggccccatcaatgtgaaaactgaacccatggaagattctggcatttcactgaaagcagaagctgtctcagtcaagaaagaatcagaagatcctaattactatcaatataatatgcaaggaagccacccttcttccacaagcaatgaagtaatagaaatggaattaccaatggaagattccactccgctggtcccttcagaagaaccaaatgaggaccctgaagccgaggtgaaaatcgaaggaaacacaaattcatccagtgttacaaattctgcagcaggtgttgaagatcttaacatcgttcaagtgactgttccagataatgagaaggaaagattatcaagcattgaaaagattaaacagctaagagaacaagttaatgacctctttagccgaaaatttggtgaagcaattggcgtggatttccctgtgaaagttccctacaggaagatcacattcaaccctggctgtgtggtgattgatggcatgcccccgggggtggtattcaaggcccccggctatctggaaatcagttccatgaggaggatcttggaggcagctgagtttatcaaattcacagtcatcaggccgcttccagggcttgagctcagtaatgtgggaaaacgcaagatagaccaggagggccgtgtgtttcaagaaaagtgggagagagcgtatttcttcgtggaagtacagaatattccaacatgtctcatatgcaaacaaagcatgtctgtgtccaaagaatataacctaagacgccactatcaaaccaatcacagcaagcattatgaccagtatacggaaagaatgcgtgacgagaagcttcacgagctgaaaaaagggctcaggaagtatctcttaggctcgtcagacaccgagtgtcccgagcaaaaacaagtgtttgcaaacccaagtccaacccagaaatcccccgtgcagcctgtagaggacctagctgggaacttatgggagaagttacgtgaaaaaatcaggtcttttgtggcatattctatcgcaatcgatgagatcacggatataaataataccacccagttggccatattcatccgtggtgtcgatgagaatttcgatgtgtccgaagaacttctggacacggtgcccatgacgggtacaaaatctggcaacgagatctttttgcgtgttgagaagagcctgaaaaagttctgtatcaactggtcgagattagtaagcgtggcctccactggcaccccagcgatggtggatgccaataacgggcttgtcacaaaactgaagtccagggtggcgacgttctgcaagggtgcggaactgaagtccatctgttgtataattcatccggaatcactctgtgctcagaagttgaagatggaccacgtcatggacgtggtagtgaagtccgtgaactggatatgctcccggggactgaaccacagcgagttcacaaccttgctctatgagctggacagccagtatggtagcctcctgtactacacggagattaagtggctcagtcgcgggctcgtgctaaagagatttttcgaatccttggaagaaatcgactccttcatgtcatccagagggaaacccctgcctcaactgagctccatagattggatccgagacctggccttcttggttgacatgacgatgcatctgaacgctttgaacatctctctccaaggacactcccaaatcgtcacgcagatgtatgacctgatccgggcgttcctagcaaaactgtgcctctgggagactcatttgacgaggaataatctggcccactttcccaccctgaaattggtttccagaaatgaaagcgatggcctgaactacattcccaaaatcgcggaactcaagaccgaattccagaaaaggctgtctgatttcaaactctacgaaagcgaactgactctgttcagctccccgttctccacgaagatcgacagtgtgcacgaggagctccagatggaggttatcgacctgcaatgcaacacggtcctgaagacgaaatacgacaaggtgggaataccagaattctacaagtacctctggggtagctacccgaaatacaagcaccattgcgcaaagattctttccatgttcgggagcacctacatctgcgaacagctgttctccattatgaaactgagcaaaacaaaatactgctcccagttaaaggattcccagtgggattctgtactccacatcgcaacgtgatggagagaaaactcctggcagggccctatggtgggaaaggctggagtcttctagtcccaagggattgggagatgacaaaatgaattttttttttcttttttgagatggagtcttgctctgtcgcccaggttggagtgcagtggcgtgatctcggcttactgcaacttccagctcctgggttcgaacgattctcctgcctcagcctcccgagcagctgggactacaggcatgcgccaccatgcccggctaatttttgtattagtagagatgaggtttcaccatgttggccaggctggtctccaactcctgacctcaggtgatccacctgcctcgacctcacaaagtgctgggattacaggcatgaaccactgtgcccagctgacaaaatgagttcttaaactttttttttttttcagttttttttccactttgaatcagaaatataatctgcagtatcatacttgtttatattacattgtatgcctcactattcattaaaaatcaagaaagttttattgtaaaaaaaaaaa

SEQ ID NO: 665 - DNA, 1520 bp, Homo Sapiens
  NM_001003796
gccgcgcggggccatttccgctgctgcttctgtgagtttttccggtgcacgcgagtgcttctgaaacgtcagctgcgctcccctaggagtgctgagcccgcggaaccgcagccatgactgaggctgatgtgaatccaaaggcctatccccttgccgatgcccacctcaccaagaagctactggacctcgttcagcagtcatgtaactataagcagcttcggaaaggagccaatgaggccaccaaaaccctcaacaggggcatctctgagttcatcgtgatggctgcagacgccgagccactggagatcattctgcacctgccgctgctgtgtgaagacaagaatgtgccctacgtgtttgtgcgctccaagcaggccctggggagagcctgtggggtctccaggcctgtcatcgcctgttctgtcaccatcaaagaaggctcgcagctgaaacagcagatccaatccattcagcagtccattgaaaggctcttagtctaaacctgtggcctctgccacgtgctccctgccagcttcccccctgaggttgtgtatcatattatctgtgttagcatgtagtattttcagctactctctattgttataaaatgtagtactaaatctggtttctggatttttgtgttgtttttgttctgttttacagggttgctatcccccttcctttcctccctccctctgccatccttcatccttttatcctccctttttggaacaagtgttcagagcagacagaagcagggtggtggcaccgttgaaaggcagaaagagccaggagaaagctgatggagccaggacagagatctggttccagctttcagccactagcttcctgttgtgtgcggggtgtggtggaattaaacagcattcattgtgtgtccctgtgcctggcacacagaatcattcatacgtgttcaagtgatcaaggggtttcatttgctcttgggggattaggtatcatttggggaggaagcatgtgttctgtgaggttgttcggctatgtccaagtgtcgtttactaatgtacccctgctgtttgcttttggtaatgtgatgttgatgttctccccctacccacaaccatgcccttgagggtagcagggcagcagcataccaaagagatgtgctgcaggactccggaggcagcctgggtgggtgagccatggggcagttgacctgggtcttgaaagagtcgggagtgacaagctcagagagcatgaactgatgctggcatgaaggattccaggaagatcatggagacctggctggtagctgtaacagagatggtggagtccaaggaaacagcctgtctctggtgaatgggactttctttggtggacacttggcaccagctctgagagcccttcccctgtgtcctgccaccatgtgggtcagatgtactctctgtcacatgaggagagtgctagttcatgtgttctccattcttgtgagcatcctaataaatctgttccattttgatgacaaaaaaaaaaaaaaaaaaaaa

SEQ ID NO: 666 - DNA, 1689 bp, Homo Sapiens
  NM_001003802
ctggcatcttcctcccctcctcctttccagatcctcagaatggcccttggtgctgcaggcgcggtgggctccgggcccaggcaccgagggggcactggatgactctccaggtgcaggaccctgccatctatgactccaggtcttcagcacccacccaccgtggtacagcgccccgggatgccgtctggagcccggatgccccaccagggggcgcccatgggccccccgggctccccgtacatgggcagccccgccgtgcgacccggcctggcccccgcgggcatggagcccgcccgcaagcgagcagcgcccccgcccgggcagagccaggcacagagccagggccagccggtgcccaccgcccccgcgcggagccgcagtgccaagaggaggaagatggctgacaaaatcctccctcaaaggattcgggagctggtccccgagtcccaggcttacatggacctcttggcatttgagaggaaactggatcaaaccatcatgcggaagcgggtggacatccaggaggctctgaagaggcccatgaagcaaaagcggaagctgcgactctatatctccaacacttttaaccctgcgaagcctgatgctgaggattccgacggcagcattgcctcctgggagctacgggtggaggggaagctcctggatgatcccagcaaacagaagcggaagttctcttctttcttcaagagtttggtcatcgagctggacaaagatctttatggccctgacaaccacctcgttgagtggcatcggacacccacgacccaggagacggacggcttccaggtgaaacggcctggggacctgagtgtgcgctgcacgctgctcctcatgctggactaccagcctccccagttcaaactggatccccgcctagcccggctgctggggctgcacacacagagccgctcagccattgtccaggccctgtggcagtatgtgaagaccaacaggctgcaggactcccatgacaaggaatacatcaatggggacaagtatttccagcagatttttgattgtccccggctgaagttttctgagattccccagcgcctcacagccctgctattgccccctgacccaattgtcatcaaccatgtcatcagcgtggacccttcagaccagaagaagacggcgtgctatgacattgacgtggaggtggaggagccattaaaggggcagatgagcagcttcctcctatccacggccaaccagcaggagatcagtgctctggacagtaagatccatgagacgattgagtccataaaccagctcaagatccagagggacttcatgctaagcttctccagagaccccaaaggctatgtccaagacctgctccgctcccagagccgggacctcaaggtgatgacagatgtagccggcaaccctgaagaggagcgccgggctgagttctaccaccagccctggtcccaggaggccgtcagtcgctacttctactgcaagatccagcagcgcaggcaggagctggagcagtcgctggttgtgcgcaacacctaggagcccaaaaataagcagcacgacggaactttcagccgtgtcccgggccccagcattttgccccgggctccagcatcactcctctgccaccttggggtgtggggctggattaaaagtcattcatctgacaaaaaaaaaaaaaaaaaa

SEQ ID NO: 667 - DNA, 1027 bp, Homo Sapiens
  NM_001003806
gggcaagagttgggcaaaaaaatcaaggtatttggtcccggaacaaagcttatcattacagataaacaacttgatgcagatgtttcccccaagcccactatttttcttccttcaattgctgaaacaaagctccagaaggctggaacatacctttgtcttcttgagaaatttttccctgatgttattaagatacattggcaagaaaagaagagcaacacgattctgggatcccaggaggggaacaccatgaagactaacgacacatacatgaaatttagctggttaacggtgccagaaaagtcactggacaaagaacacagatgtatcgtcagacatgagaataataaaaacggagttgatcaagaaattatctttcctccaataaagacagatgtcatcacaatggatcccaaagacaattgttcaaaagatgcaaatgatacactactgctgcagctcacaaacacctctgcatattacatgtacctcctcctgctcctcaagagtgtggtctattttgccatcatcacctgctgtctgcttagaagaacggctttctgctgcaatggagagaaatcataacagacggtggcacaaggaggccatcttttcctcatcggttattgtccctagaagcgtcttctgaggatctagttgggctttctttctgggtttgggccatttcagttctcatgtgtgtactattctatcattattgtataacggttttcaaaccagtgggcacacagagaacctcactctgtaataacaatgaggaatagccacggcgatctccagcaccaatctctccatgttttccacagctcctccagccaacccaaatagcgcctgctatagtgtagacatcctgcggcttctagccttgtccctctcttagtgttctttaatcagataactgcctggaagcctttcattttacacgccctgaagcagtcttctttgctagttgaattatgtggtgtgtttttccgtaataagcaaaataaatttaaaaaaatgaaaagtt

SEQ ID NO: 668 - DNA, 1808 bp, Homo Sapiens
  NM_001003828
ttttaaagaccagataaatttacctttgggacagttagatgtgcacaaatgcaccatgtgtttaaagatcaccaaagaggagagaaaaggggattccttagtccagagaacaaaaactgcaggaggctggagctgagacgtgggtgttcctgcagctggggcctgtgctcccaggcactcatggcttctctggctggttcacttctccctggctcagacagatcaggagtggaaacatctgaatatgctcaaggaggagtgagtgacctgcaggaagaaggcaagaatgccatcaactcaccgatgtcccccgccctggtggatgttcaccctgaagacacccagcttgaggagaacgaggagcgcacgatgattgaccccacttccaaggaagaccccaagttcaaggaactggtcaaggtcctcctcgactggattaatgacgtgctggtggaggagaggatcattgtgaagcagctggaggaagacctgtatgacggccaggtgctgcagaagctcttggaaaaactggcagggtgcaagctgaatgtggctgaggtgacacagtccgaaatagggcagaaacagaagctgcagacggtgctggaagcagtacatgacctgctgcggccccgaggctgggcgctccggtggagcgtggactcaattcacgggaagaacctggtggccatcctccacctgctggtctctctggccatgcacttcagggcccccatccgccttcctgagcatgtaacggtgcaggtggtggtcgtgcggaaacgggaaggcctgctgcattccagccacatctcggaggagctgaccacaactacagagatgatgatgggccggttcgagcgggatgccttcgacacgctgttcgaccacgccccggataagctcagcgtggtgaagaagtctctcatcacttttgtgaacaagcacctgaacaagctgaatttggaggtgacggaactggagacccagtttgcagatggcgtgtacctggttctgctcatgggccttctggaagactactttgttcctctccaccacttctacctgactccggaaagcttcgatcagaaggtccacaatgtgtccttcgcctttgagctgatgctggacggaggcctcaagaaacccaaggctcgtcctgaagacgtggttaacttggacctcaaatccaccctgagggttctttacaacctgttcaccaagtacaagaacgtggagtgacgggggagctgtggatggtggcaggagtgtcccagcaagaaaggcggcatccgtctgtgccctgtgcctttccagggagccaggcgccatgggcttctggtccaagctgtgttgactgtcatccccaccccacccctacctcacgcctgccccaccccctgcctcttttggttgttgttcttaatctcctctccatgtagttcccagtgggcaagagcctttgaaaatgcaggattctaaacactcgtgcttgcgtttgaagcctcgcgtcactcagtcgcgtgggatgatgagtccgttgttgtctgccttggccgaaagatgaaaaaaagcctgaaccccaacccccagctggttgagagcaccctgcattctgcctcatggtgcagttagcgatcacaggccttcagaagtacaacatcagctcagcaggaacgccggctccccgaggacccaggcttgacgattcaccggggatctcctgggctgggctctccttggaagtgaggccttttattaaaaataaaagggttttgcagtttgaaaaaaaaaaaaaaaaaaaaaaa

SEQ ID NO: 669 - DNA, 1268 bp, Homo Sapiens
  NM_001003897
gggaactacttccgggggagcggcgcggcggcgcgggagttggttctaaagagtggtgagtcagaagagacgtcaggcagcaagcgacttgggccatggcctctgacctagacttctcacctccggaggtgcccgagcccactttcctggagaacctgctacggtacggactcttcctgggagccatcttccagctcatctgtgtgctggccatcatcgtacccattcccaagtcccacgaggcggaggctgaaccgtctgagcccagaagtgctgaggtgacgaggaagcccaaggctgctgttccttctgtgaacaagaggcccaagaaagagactaagaagaagcggtagaagaggaggcctgaggagctgggcgggcagggagagggtcttggggacagccctcctgggaatctacattgtgttcccccgcattccaggctcagggtctgaggaggctgtgacgccctatgaccgcagagatctagacagtcgtaacagtccccaggctccagctgggcaatccaccacttcctcttccttctgcttctgtgacggtttagagtcaagggggctgaaacacactgtgagcatagactgtattaggtttgttcagaagccgggtcagctcacagagtcacattttcttgcttagtcatgtgtccctccttgagttgccccctccttgtgggtttacactacatttgggagtcattgtctaatgctgacaagcacaccctctcccattatttgtgcactacagatctcctcctgatcagtcacctttgttgctgctgtgtagacagagccaggcctcacctgtttgtttaggccaagatgccatggacatgcagcgttagtgatcccactagctgtgacagccaggcccagaaaatgcctggcgtgagagccagcagacagccaggccagggtaggcagtgcctgcttctgctccatcaggtgcaggggatttggctgaaggcgtgcatatttcctgggcacaaacttcctgagcctctgaaatgggaggctcgtcaatttcagaccaacctcttttcaacccatcatagcacgttcaaggtgtgccttttacttctacctgtacatcccccatcccttcaattctttcattccctgaccagtgagagggttcctgggggaagtatggtgaataaactgacatgcatgcttcagaaaaaaaaaaaaaaaaaaaaaaaaaaaaaaaaaaaaaaaaaaaaaaaaaaaaaaaaaaaaaaaaaaaaaaaa

SEQ ID NO: 670 - DNA, 2355 bp, Homo Sapiens
  NM_001003931
gtatccgggcccaaggtcaccgcgcgaccggcagatgcgtgctgcaggccccggccacatgagcagcgctacggacgcgactgccccggccttggatatgccagatcgagtgtccacccgtccgtgggactggtcgcctgactcggcctgccccagcctctgcttcaccccactggtggccaaatagccgatgtctaatcccccacacaagctcatccccggcctctggcgattgttgggaattctctccctaattcacgcctgaggctcatggagagttgctagacctgggactgccctgggaggcgcacacaaccaggccgggtggcagccaggacctctcccatgtccctgcttttcttggccatggctccaaagccgaagccctgggtacagactgagggccctgagaagaagaagggccggcaggcaggaagggaggaggaccccttccgctccaccgctgaggccctcaaggccatacccgcagagaagcgcataatccgcgtggatccaacatgtccactcagcagcaaccccgggacccaggtgtatgaggactacaactgcaccctgaaccagaccaacatcgagaacaacaacaacaagttctacatcatccagctgctccaagacagcaaccgcttcttcacctgctggaaccactggggccgtgtgggagaggtcggccagtcaaagatcaaccacttcacaaggctagaagatgcaaagaaggactttgagaagaaatttcgggaaaagaccaagaacaactgggcagagcgggaccactttgtgtctcacccgggcaagtacacacttatcgaagtacaggcagaggatgaggcccaggaagctgtggtgaaggtggacagaggcccagtgaggactgtgactaagcgggtgcagccctgctccctggacccagccacgcagaagctcatcactaacatcttcagcaaggagatgttcaagaacaccatggccctcatggacctggatgtgaagaagatgcccctgggaaagctgagcaagcaacagattgcacggggtttcgaggccttggaggcgctggaggaggccctgaaaggccccacggatggtggccaaagcctggaggagctgtcctcacacttttacaccgtcatcccgcacaacttcggccacagccagcccccgcccatcaattcccctgagcttctgcaggccaagaaggacatgctgctggtgctggcggacatcgagctggcccaggccctgcaggcagtctctgagcaggagaagacggtggaggaggtgccacaccccctggaccgagactaccagcttctcaagtgccagctgcagctgctagactctggagcacctgagtacaaggtgatacagacctacttagaacagactggcagcaaccacaggtgccctacacttcaacacatctggaaagtaaaccaagaaggggaggaagacagattccaggcccactccaaactgggtaatcggaagctgctgtggcatggcaccaacatggccgtggtggccgccatcctcactagtgggctccgcatcatgccacattctggtgggcgtgttggcaagggcatctactttgcctcagagaacagcaagtcagctggatatgttattggcatgaagtgtggggcccaccatgtcggctacatgttcctgggtgaggtggccctgggcagagagcaccatatcaacacggacaaccccagcttgaagagcccacctcctggcttcgacagtgtcattgcccgaggccacaccgagcctgatccgacccaggacactgagttggagctggatggccagcaagtggtggtgccccagggccagcctgtgccctgcccagagttcagcagctccacattctcccagagcgagtacctcatctaccaggagagccagtgtcgcctgcgctacctgctggaggtccacctctgagtgcccgccctgtcccccggggtcctgcaaggctggactgtgatcttcaatcatcctgcccatctctggtacccctatatcactcctttttttcaagaatacaatacgttgttgttaactatagtcaccatgctgtacaagatccctgaacttatgcctcctaactgaaattttgtattctttgacacatctgcccagtccctctcctcccagcccatggtaaccagcatttgactctttacttgtataagggcagcttttataggttccacatgtaagtgagatcatgcagtgtttgtctttctgtgcctggcttatttcactcagcataatgtgcaccgggttcacccatgttttcataaatgacaagatttcctccttttttaa

SEQ ID NO: 671 - DNA, 4304 bp, Homo Sapiens
  NM_001003943
atggagccatctcagtgtgtggaggagctggaggatgatgtgttccaaccagaggatggggagccggtgacccaacccgggagcttgctctctgctgacctgtttgcccagagcctactggactgccccctcagccgacttcagctcttccctctcacccactgctgtggccctggccttcgacccaccagccaggaagacaaagctacccagactctcagcccagcctcccccagccaaggtgtcatgctgccttgtggggtgactgaggaaccccagcgactcttttatgcaccagcagaaccaaaatcgtgtgtggtggcagatcctcctcttcctgcacaaccttgctttgaatggagaagagaacaggaacggggcaggccctaggtgagggtgggctgccctcttcacatggggcaccaggaacaccgtctggaacaggaaggacatcgggcaggactgacactgtgtcttgtgaaattgtttttttgttgttattttgtgttttaattttttttaatttctctctgagtgtacatacaacatactcaagcgggaccttctttctctgtcaggcccttgacctggaatgggggcctttgtcaaacactgttgaaggagaggctgatgtgtctgtgatggtgagaattcccaagggctctgacaagtagattcttcgactgaggaatctaccagttgtcgaagatgatccgttagtgatgttctctgggaagtggactgtggtttttccagaggaactcagttaagaaatcgagagtggattagactcccagttccaccaaacctatgagccttccactgtggatgggggccgtgatcctgatggtcacattgctttaacccagcagggcttcggccaggggctttccacttgaggatagcagcttcactaggctggccggccagctccacatctgactgggttcttacttctcagccagtacctgccccatgggctcaaggattcctggccagctcctgccacctccagcagacctcagggagggttgggtttctctaaggacccctcaaacatgtcgcaaaatgaaccaaacttctggctaggcctcaaaactgacttggtcccacttggaggccccaggattggtcctgaggtacagagccactgccaccactggcggcctgggaccagctgggtgtcagccacggatgagccgaatagccagtcagcatgttgctgctggcagcctgtgcctttgtcagctcttctttcaaaagaccccaccgacagaccgcattccacccccaacatcggcactgagggacatcgggggcaagtttgcagtggggccggaaaatatggtggccaccctaccatgagagtcagccgtaggggaccccagaccccttggtttccttggaaacaacatacctcttcccccttatccccagtcctttttcatacctagtgggatacagaagaagccaggacagtggctttgccagctaagtgacttttagagtaacagataacgattagagtggggaaccgtcaaagctgggtacacatttcctatcttcctccagcttccagctaggccagaagggcatgctctggaacccagcaggatcacagctgcctgtgcacgtcttcccttctctccctgctgcggcacttatggagaggatctaaagcagccggtgtggcagctccgatagcaggcacagggaatctgttaaccagacgctagaaactaaattataacttttgcatatgtgagaaaagacaacattggtgctaacagtgaagtaaggcccaaaggaaagacggcttccctggacaaagaagacctcagggctacccaaggaaataggaggagtctagagtagactcacaaatctgaacaagcccaagtcttccagttctgaggagaggaggtcttcagtactattgaaggagacattgatcttctggatgtacagttgtgcaggttgttcactgcacaagggcacctgcagctaatggaggctggaattcagcttgtgttctgctcactaagctgtgtgcgtgccctggtgtggggctacttctcccaagaagaaggggtgcctttcctaatttgcaaaggtgccatatgggctcacagcaccctggaggagaagggcctcaaactgtgcatgtaagcctttgttttgttctgctcagatattctggatattacctcttcttggtcagaattctattctcagggtgtgtaccatgatttgtctgctaagaagacgggttcctgctttgcagagaaggagccggggaccagcttgaagactggctctgggacacactgaccattgtgaaattcagccttccctgtgggtctccataccattttatgatgtgtatgggacatacgttgttctcccctctctggatcaaggtggtgacaggcagcctgctgccgtatgcttcagtggcacacaccaaaaaaccgggattatttacagcagccactattcaccccttttggcagactctccacctgagttcagtgagagagaaaatgatttagatcttggtgctggggcaaggccatcagcttcagagaccttgccaggcccaggctgggtgccctgtggcctgagaactgagcccagactttgacaaacccacctcaacatcaagcctggggcaggtggaaggtggtctgactgcactgtctccatcttatgcaaagccaggaactcactcactgtcttaagtgagccagggcaaaatttacacccctcacgtttccctctcccttcttccccaccaacaaaacccaggaggtagctggcagagtagctgtcaggaaggagaaaggttctttctggctggttgtttttaattggcttagtgatctaaactggccccttcctcctctgcctggtgagttggcctaaacattcctcaagtctagcctcaggagacctgcccctcccccccgacctccaccccctcagactccatcccccacccccaggagcctggctgtctctagcgaggggtggagaatcagatttagagggagggagagtctgacctggatcctgacctgtaaccagctgaagacggtggaggctttgtggcttgctgagggtgggggttgggagagggactggaaaccttcctcctcgggaaagaaatgcctgggaggaagggaagcctgatattcagggtcaaaacagcccttctaattcacaaccccaaagcaggggtttctagaagttggtcaacagatctggtgagggaagtccccaggccagacgctggactcctgcaatgagggtggaggactcagcctggcctctgcctggcctgtttcaaagtctgggccactggcagccttctcttgctcaatccgaggtggaaaaagatcacctcccagtgacctccctcagcccccaggggagtaggtctgtgtccaaagctatgtggcaggcttgtttgaaggacccagaggggcccagctgacctgtctcactgctcctggcagcccagccccatcggcaggtggcccctgcctgggggttattcgggatggttcagccagggcctcccaggaagagtgctgtggagccacggtgactgtcctggacagcaaggagcatgctaccccagtgagcacttctttttgagggacttgatggggaggtggggtaggcagaagggacgtggcagaagcgggaagactttggtcaccatggctctgcaggccttctgcaaatcagtgctggcctgggctggaaacagctctgtgtgtgaaggtgaggactcttggaagcaggccatcctggccagacaccctagcaggaaggggctcacctgtcacccttaggcagcctgagggctggtggggacttttgagtcttgaggggatagcggaaaaagctgagctcataggtgcccagccagcctcccagctaaaggtgctcagagccccactgccccctctctctgtgcaggtggccagtgcccctccctgctctgggagcattgctagccttctaccccatccctggatccacaggggctatcgaggagacccagtgagaatgtagcattttgttcatccccagggtagctgccctggggtctgggcactctgcctctgggagagaggaagaagaaaggggccccattttttaaaaaactgtacagagcctttggctttatgtgtttatgttcttcacatgcatatgtgtgtatgtgtgtatatctttccccccatcaattggtacaatttttaataaaatcatttaaagcaaaaaaaaaaaaaaaa

SEQ ID NO: 672 - DNA, 1489 bp, Homo Sapiens
  NM_001003962
cgggcgacagcagggccgcggtgcagtgtccgacccgagagttgcggcctgagtcaccggccccgccctccggagccggacgctgcgggaggcccgggagcggcagtggaaccgactcccagaactccggacgtgtgcggcgtgagtcgcagccatgttcctggttaactcgttcttgaagggcggcggcggcggcggcgggggaggcgggggcctgggtgggggcctgggaaatgtgcttggaggcctgatcagcggggccgggggcggcggcggcggcggcggcggcggcggcggtggtggaggcggcggtggcggtggaacggccatgcgcatcctaggcggagtcatcagcgccatcagcgaggcggctgcgcagtacaacccggagcccccgcccccacgcacacattactccaacattgaggccaacgagagtgaggaggtccggcagttccggagactctttgcccagctggctggagatgacatggaggtcagcgccacagaactcatgaacattctcaataaggttgtgacacgacaccctgatctgaagactgatggttttggcattgacacatgtcgcagcatggtggccgtgatggatagcgacaccacaggcaagctgggctttgaggaattcaagtacttgtggaacaacatcaaaaggtggcaggccatatacaaacagttcgacactgaccgatcagggaccatttgcagtagtgaactcccaggtgcctttgaggcagcagggttccacctgaatgagcatctctataacatgatcatccgacgctactcagatgaaagtgggaacatggattttgacaacttcatcagctgcttggtcaggctggacgccatgttccgtgccttcaaatctcttgacaaagatggcactggacaaatccaggtgaacatccaggagtggctgcagctgactatgtattcctgaactggagccccagacccgccccctcactgccttgctataggagtcacctggagcctcggtctctcccagggccgatcctgtctgcagtcacatctttgtggggcctgctgacccacaagcttttgttctctcagtacttgttacccagcttctcaacatccagggcccaatttgccctgcctggagttccccctggctctaggacactctaacaagctctgtccacgggtctccccattcccaccaggccctgcacacacccactccgtaacctctcccctgtacctgtgccaagcctagcacttgtgatgcctccatgccccgagggccctctctcagttctgggaggatgactccagtccctgcacgccctggcacacccttcacggttgctacccaggcggccaagctccagaccgtgccagacccaggtgccccagtgcctttgtctatattctgctcccagcctgccaggcccaggaggaaataaacatgccccagttgctgatctctaaaaaaaaaaaaaaa

SEQ ID NO: 673 - DNA, 2583 bp, Homo Sapiens
  NM_001004128
ggaggcaggcggtgccgcggcgccgggacccgactcatccggtgcttgcgtgtggtggtgagcgcagcgccgaggatgaggaggtgcaacagcggctccgggccgccgccgtcgctgctgctgctgctgctgtggctgctcgcggttcccggcgctaacgcggccccgcggtcggcgctctattcgccttccgacccgctgacgctgctgcaggcggacacggtgcgcggcgcggtgctgggctcccgcagcgcctgggccgtggagttcttcgcctcctggtgcggccactgcatcgccttcgccccgacgtggaaggcgctggccgaagacgtcaaagcctggaggccggccctgtatctcgccgccctggactgtgctgaggagaccaacagtgcagtctgcagagacttcaacatccctggcttcccgactgtgaggttcttcaaggcctttaccaagaacggctcgggagcagtatttccagtggctggtgctgacgtgcagacactgcgggagaggctcattgacgccctggagtcccatcatgacacgtggcccccagcctgtcccccactggagcctgccaagctggaggagattgatggattctttgcgagaaataacgaagagtacctggctctgatctttgaaaagggaggctcctacctgggtagagaggtggctctggacctgtcccagcacaaaggcgtggcggtgcgcagggtgctgaacacagaggccaatgtggtgagaaagtttggtgtcaccgacttcccctcttgctacctgctgttccggaatggctctgtctcccgagtccccgtgctcatggaatccaggtccttctataccgcttacctgcagagactctctgggctcaccagggaggctgcccagaccacagttgcaccaaccactgctaacaagatagctcccactgtttggaaattggcagatcgctccaagatctacatggctgacctggaatctgcactgcactacatcctgcggatagaagtgggcaggttcccggtcctggaagggcagcgcctggtggccctgaaaaagtttgtggcagtgctggccaagtatttccctggccggcccttagtccagaacttcctgcactccgtgaatgaatggctcaagaggcagaagagaaataaaattccctacagtttctttaaaactgccctggacgacaggaaagagggtgccgttcttgccaagaaggtgaactggattggctgccaggggagtgagccgcatttccggggctttccctgctccctgtgggtcctcttccacttcttgactgtgcaggcagctcggcaaaatgtagaccactcacaggaagcagccaaggccaaggaggtcctcccagccatccgaggctacgtgcactacttcttcggctgccgagactgcgctagccacttcgagcagatggctgctgcctccatgcaccgggtggggagtcccaacgccgctgtcctctggctctggtctagccacaacagggtcaatgctcgccttgcaggtgcccccagcgaggacccccagttccccaaggtgcagtggccaccccgtgaactttgttctgcctgccacaatgaacgcctggatgtgcccgtgtgggacgtggaagccaccctcaacttcctcaaggcccacttctccccaagcaacatcatcctggacttccctgcagctgggtcagctgcccggagggatgtgcagaatgtggcagccgccccagagctggcgatgggagccctggagctggaaagccggaattcaactctggaccctgggaagcctgagatgatgaagtcccccacaaacaccaccccacatgtgccggctgagggacctgagcttatttgaagtcctgcctcattctcactggagcctcagtctctcctgcttggtcttggccctcaactggggcaagtgaagccagaggagggtcccccagctgggtgggctggaatggaactcctcactagctgctggggctccgcccaccctgctcccttccggacaatgaagaagcctttgcaccctgggaggaaggaccaccccgggccctctatgcctggccagcctccagctcctcagacctcctgggtggggtttggcttcagggtggggtttggaagcttctggaagtcgtgctggtctcccaggtgaggcaagccatggttgctgggctgtagggtgagtggcttgcttggtgggacctgacgagttggtggcatgggaaggatgtgggtctctagtgccttgccctggcttagctgcaggagaagatggctgctttcacttccccccattgagctctgctccctctgagcctggtcttttgtccttttttattttggtctccaagatgaatgctcatctttggagggtgccaggtagaagctagggaggggagtgtcttctctctccaggtttcaccttccagtgtgcagaagttagaagggtctggcgggggcagtgccttacacatgcttgattcccacgctaccccctgccttgggaggtgtgtggaataaattatttttgttaaggcaa

SEQ ID NO: 674 - DNA, 4188 bp, Homo Sapiens
  NM_001004301
agattcgcgaaaacccggaagcggatcgcgtggagtgacggtcccacggcagcgcgattgacttctaaagactcttggtatgtgaggaagaaacctggaagaggaagaggaaagcaaaggagtcagggatggctcttcctcagggtctattgacattcagggatgtggccatagaattctctcaggaggagtggaaatgcctggaccctgctcagaggactctatacagggacgtgatgctggagaattataggaacctggtctccctggatatctcttccaaatgcatgatgaaggagttctcatcaacagcacaaggcaatagagaagtgatccacacagggacattgcaaagacatgaaagtcatcacactggagactttcgctttcaggaaattgataaagatattcataacttagagtttcagtggcaagaagatgaaagaaatagccatgaagcacccatgacagaaatcaaaaagttgactggtagtgcagaccgatatgatcaaaggcatgctggaaacaagcctattaaagatcagcttggatcaagctttcattcgcatctgcctgaactccacatgtttcagacccaagggaaaattggtaatcaagtggagaagtctatcaacgatgcttcctcaatttcaacatcccaaagaatttcttgtaggcccaaaacccatatttctaataactatgggaataatttccggaattcttcgttactcacacaaaaacaggaggtacacatgagagaaaagtctttccaatgtaatgagagtggcaaagcctttaattatagctcactcttaaggaaacatcaaataatccatttaggagagaaacaatataaatgtgatgtatgtggcaaggtctttaatcggaagcgaaacctagtgtgccatcgtagatgtcacactggggagaaaccttacaggtgtaatgagtgtggcaagactttcagtcagacgtattcccttacatgccatcgtagacttcatactggagagaaaccttacaaatgtgaagaatgtgacaaagctttcagtttcaaatcaaaccttaaaagacataggagaattcatgctggagaaaaaccatacaagtgtaatgaatgtggcaagacctttagtcagacgtcatcccttacatgccatcgtagacttcatactggagagaaacctttcaagtgtaatgagtgtggcaagacctttagtcggaagtcatcccttacatgccatcatagacttcatacgggagagaaaccttataagtgtaatgaatgtggcaagaccttcagtcaggagttaacccttaaatgccatcgtagacttcataccggagagaagccttacaagtgtaatgaatgtggcaaggtttttaataaaaaggcaaaccttgcacgtcatcatagacttcatagtggagagaaaccctacaagtgtactgagtgtgtcaagacgttcagtcgaaattcagcccttgtaattcataaggctattcatattggagagaaacgttacaagtgtaatgagtgtggcaagacgttcagtcgaatttcagccctcgtaattcatacggcaattcatactggagagaaaccttacaagtgtaatgaatgtggcaagggttttaatcggaaaacacaccttgcatgtcatcatagacttcatactggagagaaaccttacaagtgtaatgaatgtggcaaggtttttaatcgaaaaacacaccttgcacatcatcatagacttcatactggagataaaccttacaagtgtaatgaatgtggcaaggtttttaatcaaaaagcacaccttgcacgtcaccatagacttcatactggagagaaaccttacaagtgtaatgaatgtggcaaggtttttaatcaaaaagcaaaccttgcacgtcatcatagacttcatactggagagaaaccttacaagtttaatgagtgtggcaaagcttttaattgaaaagcaaagcttgcacatcatcatacaattcatactggaaagaaacaagtgcaatgagtgtggcaagaccttctgtcacaattcagtccttgtaattcataagaattcatactggagagaaacaagtgtaatgaacgttgcaaaatttttaatcaacaagcacaccttccacgtcatcatagacttcatagtggagagaaaccttagaaatgtgaagcatgtgacaaagtttacagtggcaaatcgagcctcaaaagacaggagaattcatactggagagaaagcttacaaaggtgaagaatatcacagagttttcagtcacaagtcaaaccttgaaagacataaaataaatcatactgcagagaaaccataaaattgtaagagttcgtgacaaggctttcgggcatgactcacacctggcacaacatcctagaatttatactggagagaaaccttacaagtgtaatgagtctggcaaagccttaatgagcagtcaacacttactcaccatcaggcaatccatggtgaaggaaacttgactaatgtaatgattgtcaccaagtcttcagtaacgctacaaccattgcaaatcattggagaacccataaggaagagagatcatacaagtgtaataatcggcaaatttttcagacatcgtccataccttgcagttcattggcgaactcatactggagacaaaccttataaatgtcatgattgaggcaaggtcttcagtcaagcttcatcctatgcaaaacataggagaattcatacaggagagaaacctcacgtgtgatgattgtggcaaagcctttacttcacgttcacacctccttagacatcagagaatgcacactggacggaaatcttacaaatgtcatcagtgtggcaaggttttcagtctgacttcactccttgcagaatatcagaaaattcattttgagataattgttccaaatgcaatgagtagagcaaaccatcaagcagtaattgacattaaagtgtttatgttaagaggattgggccaggtacagtgtctcacacctgtaatcccagcactttgggaggccaaggcgggtagatcacttgaggtcaggagtttcagatcagtctggccaacaaacatgagccacttttcccagtttgctttttgttctttaacaaaaactgatagggatttttatgggtaccgtgttgaatctaaatcacattgggttatataatcatttaacaatattaatttttccaatccatcaatatgggttatatgtctgtatatgtttttaatcatattgatgtatatttgtagatttcaaggtacaaacttctcacctttttacttttatttctatttctttaagttctctagcaaatggaagtgtttttaaattttcttttaaaattgtttattgttacaaacttctcatctttttgcttttattcctaagtatttcttactttaagttctctagcaaatggaagtgtttttaaattttcttttaaaattgtttattgttaatgtatggaaattcagctaatttttggtgctgatattgtactgtgcagatacactgaatctgtttattacttccagtagtattttggttgagtctttgtgattttctacacagaagatcatgtcatctacaaacacatataattttacttctttctttctgatttggatgggtttgatttcttttgctatttcattgctctggctaggacagccagtatttattgaatagaaggggtgagagcattcttccatcatgtgagatcctacaggaaaatcattccatgttccctgcttcgttatctactcgttggtcatttcatggatggcctttctattgttgaggtaaatttccttttctgtctattttgttcagaatttctatgatgagtggattttgaattttgtgaaatactttttctccatctattgagatgatgtggttttcatctttcattctgttcaagtggcatatcacattgatttgcttgactatgttgaaccatccttgcatcccagaaataagtggcacttgagtatctacagtcctttttacatcctcttgaatacagctttttagtacaaggggtcttcaagaagttcatggaaaaatacatattttgcatattatgagaaaattgtgtatgaatttcccagtttttgcaccaaaataaactggtacgaatctgt

SEQ ID NO: 675 - DNA, 2128 bp, Homo Sapiens
  NM_001004307
aggcggctgaagagttgctgtattctgggaatgggcagggtcactcgtccgaacagagtcctatcctacgcggcggaagagtgtgccctttgacttgcatcgtctacctacctctgccatcctctaccagccgcaactgcgagggctggagccaacttcaggactgattgatcatgacttctataaaggagcaggcagcaattagcaggctcttaagttttttacaggagtgggacaacgctggcaaagtcgcaaggagtcacatcctcgacaagttcattgaaaccaaccaaggcaagactgcccctgaactggagcaggagttttcccagggagccagtttgttcctggtacgcttgaccacctcgcttagaatcacctatatgactgactcatgtttagaaaagcttctcaggtccattggcatcttcttatcagctgtaagcagtaatcggtaccttatagaatttcttgaggttggaggtgtcctaaccctcttggaaatacttgggctagagaagatcaaggaggaggccaagaaggaatctgtcaaactacttcaggttattgcgaactctggcaggacatacaaggaactcatttgtgaaagctatggtgtacgatccatagcagaatttttggcaaagtctaagtcagaagagacccaggaggaagtgcaggttctgttggattctttggtccacggcaatcccaagtaccaaaatcaagtgtataaaggtctaatagctttgctgccctgcgagtccccaaaagcccagcagctgtccctgcagactctcaggactgcccagccaatcattgggaccacacaccccagcatcgtggactgcgtgctgaaggtgctgggcacgatgcacctggaagtccagtatgaagccatcgagttgatcaaagacctggtcggttacgatgtgcgccaggcgctgctcaagggcctcgtggcgctgctgataccgtcggtcaaggagatctccaaactgcaggccaagatcctcagtgacccctcggttctccagctcacccccagcctgccgatgtttttgcagcaggccgcggccgccaaggccatcgggtaagcgggcaggggttagtgggtagctgcagcaagcctggcttggcgctgccggcgggccccgggagcgctccgtgcgccgggtgggcgggggtgtgcgccgggtgagccccagggcgtcgccccagcccgaacccccggcccagggtcctggcgcgcaacgacatgagcatcgccgaggagctgctgtacctgcgcgtggtgcgtggcctaatggccgccatgggcaacacggaccacagcaacagccagcggctggccagcctcacgctggagatgttccccttggtggcggagcacgtgcgcaagtgcatgggggaggaactctaccagctcttcctggtaagtgcgcccttcctgccccgccgcaatgagcagatggcggctcggacagtgtgatgccccttcagacagtccccatcctggagcgcgccacatgcagagtggacctggccaccagctgcaggagggactgctctggcgtaggctcctccacccgccaccttcctgttccctttcctgccctttcggtcaggctgccgacccgcaccccacctgcaacatccctctgccaagcccaactccaagtccagactgccctggcaccccagccgggtcccccttgctcctgtcctcagagcaacgctgaggacttgtacatgaaaatagacagcattcaggcggacatcttggcggccaacacagtcaatgttaccaaagccctgtgcctccatggcagctcctacagcatgaacactctctatggctcgcgcgattcggctcagatggcctacctcacacacttcgaggaggatgtagaatcaaaggagtaacagcccctgtggcaaaccaggaaggccaaggctgcggggcagggaagcctggcaagaggaaggcgcctggggtcaagctcagagccactccacttggctccaggggggagacggggattaggcatcccagaggggcagaggaagagccgctggctgcgaagagtcaataaacagccttgatacctgaaaaaaaaaaaaaaaa

SEQ ID NO: 676 - DNA, 1943 bp, Homo Sapiens
  NM_001004310
gtttctgacctgtgttccctccgctgtgccagaacaggccccatgctgctctggacggctgtgctgctctttgttccctgtgttgggaaaactgtctggctgtacctccaagcctggccaaaccctgtgtttgaaggagatgccctgactctgcgatgtcagggatggaagaatacaccactgtctcaggtgaagttctacagagatggaaaattccttcatttctctaaggaaaaccagactctgtccatgggagcagcaacagtgcagagccgtggccagtacagctgctctgggcaggtgatgtatattccacagacattcacacaaacttcagagactgccatggttcaagtccaagagctgtttccacctcctgtgctgagtgccatcccctctcctgagccccgagagggtagcctggtgaccctgagatgtcagacaaagctgcaccccctgaggtcagccttgaggctccttttctccttccacaaggacggccacaccttgcaggacaggggccctcacccagaactctgcatcccgggagccaaggagggagactctgggctttactggtgtgaggtggcccctgagggtggccaggtccagaagcagagcccccagctggaggtcagagtgcaggctcctgtatcccgtcctgtgctcactctgcaccacgggcctgctgaccctgctgtgggggacatggtgcagctcctctgtgaggcacagaggggctcccctccgatcctgtattccttctaccttgatgagaagattgtggggaaccactcagctccctgtggtggaaccacctccctcctcttcccagtgaagtcagaacaggatgctgggaactactcctgcgaggctgagaacagtgtctccagagagaggagtgagcccaagaagctgtctctgaagggttctcaagtcttgttcactcccgccagcaactggctggttccttggcttcctgcgagcctgcttggcctgatggttattgctgctgcacttctggtttatgtgagatcctggagaaaagctgggccccttccatcccagataccacccacagctccaggtggagagcagtgcccactatatgccaacgtgcatcaccagaaagggaaagatgaaggtgttgtctactctgtggtgcatagaacctcaaagaggagtgaagccaggtctgctgagttcaccgtggggagaaaggacagttctatcatctgtgcggaggtgagatgcctgcagcccagtgaggtttcatccacggaggtgaatatgagaagcaggactctccaagaaccccttagcgactgtgaggaggttctctgctagtgatggtgttctcctatcaacacacgcccacccccagtctccagtgctcctcaggaagacagtggggtcctcaactctttctgtgggtccttcagttcccaagcccagcatcacagagccccctgagcccttgtcctggtcaggagcacctgaaccctgggttcttttcttagcagaagaccaaccaatggaatgggaagggagatgctcccaccaacacacacacttaggttcaatcagtgacactggacacataagccacagatgtcttctttccatacaagcatgttagttcgccccaatatacatatatatatgaaatagtcatgtgccgcataacaacatttcagtcagtgatagactgcatacacaacagtggtcccataagactgtaatggagtttaaaaattcctactgcctagtgatatcatagttgccttaacatcataacacaacacatttctcacgcgtttgtggtgatgctggtacaaacaagctacagcgccgctagtcatatacaaatatagcacatacaattatgtacagtacactatacttgataatgataataaacaactatgttactggtttatgta

SEQ ID NO: 677 - DNA, 2181 bp, Homo Sapiens
  NM_001004321
gtcgacctcaccaggcccagctcatgcttctttgcagcctctccaggcccagctcctgcatcttggtggcccctccaggcccagcctctgcctcccgtcagcctctacagtcccaacgtctgcctcacagcagattcttcacgcccagcatctacctcactgtggaccccccaagccaagctcccaacctttcagcagcttctacacacccagctcccgcctgccagtggcctcttcaggcccatggggctcattcctgacaacggcctttccaggcccagtttttcccttccggcggcctctccgggcccagaacctcctcaagtcagcctctccagacccacttgcaccctccgggcgttctctccgggcccagctcttcttcctggttgggtctccaggcccgattcctgcctctcaacaacctctttggactcagtgcctacccatctcctggcggccttggtcggcccacagcttcctcaagccaagctccccaggcccaggtcaggcctcacggtggcctctccaggatgagctcctgccctccgatggcatctccaggccccaaatggtctccggtcggtgggctcctccacgccaaggttgggcctcccggcgactgccgcaggcccaagttgtcctgaagtcgggctctcccggccctgcctcccagcaagtaagcaagctcttttggctcaactcctgcccagctcccaaccgcctttgtaggccccgaactttctccagccaagctctgagggcccacctcctgcctcctggtggcctgtacagttctagcactggttggagaacagcctctgcaggccccgcccttgcctcccaggggcctctccaggcccagctcttgcccccacggcggcctcccggggccaagtccctgctgggaggtaggcagggacttgggcctgggaggtcgcggtggggcgagagctgggcctggagactcccctgggaggcaacagcggggtctgcagacgcccttctccagccggagctgggactgttcagtcactgggagaagggatgtgggtctgaagagcttggttgcagaaacttcggggtctacaaacgcaggcgggagctgagccaaaagagcttgtttgctgggaggtgggagatgcagccaggaggaacagctgggcaatgcgggaggcagaggccaggcctcctcaagttggcctctcagacccacttgcagcctcccggcgccccctccgggcccagctcttcctcccggctgcatctccaggccggactctggcccgactccaggtcccaacaacgtctttggactcagctcctgcccagctcccagcggccctggtaggcccacaacttccctaagccaagctccccaggcccagctcaggcctcgcggtggcctctccaggctcagctcctggccctccgatgacatctgcaggccccaaatggcctccggtcggtgggctcctctaggcccagcttgggcctcccggcggcctccgcaggcccaaatcgtcccgaagtcagtctctccaggcttagctccagcctcccggcggcctctgcaggcccaagtcgtcctcaagtcggcctggaagtgggcctggaagagcagcaagtcggcctccctgggcccagctccgtcctctcgacggcctctccaggtgcaaaacttcctcgagtcagcctctccaggcccagctcctcctgcctcccagtggcctctttcagcccagcccagctcatggctctcggcggccttcgcaggccctgcttttgacttttggcagcctcttcaggcgcagaacttgatctccagtcggcctttgcaggcccggcctcctgcctctcgaaggcctgcacgggcccggcctcggcctcggcctcacagcggactctccacgcccagctagctctcgcctcactgcggcctccccagtccaaagctcctgcctttcggccacttcggcaggtccagctcctgcctgccagtggcctctttaggcccagctcattcctcacgtcggccattccaggccccgtttttcccttccggcagcctcttggcctctaatttgtttatcttttgtgtataaatcccaaaatattgaattttggaatatttccaccattatgtaaaaaaaaaaaaaaaaaaaaaaaaaaaaaaaaaaa

SEQ ID NO: 678 - DNA, 830 bp, Homo Sapiens
  NM_001004333
aacaaaccggaggccctcgctcttccaatactcacgccctagctacagaggtcaaggaaggtttccccaggagcagttttggtttcagacggcgccgtctcccgcgaaagtcctgagaggagcccagccttttccgcctgccgcccccggatgggatggttgaggccggggccacgccccctctgcccccctgcgagggcatcctgggctttctcccaccgctttccgagcccgcttgcacctcggcgatccccgactcccttctttatggcgtcgctcctgtgctgtgggccgaagctggccgcctgcggcatcgtcctcagcgcctggggagtgatcatgttgataatgctcggaatatttttcaatgtccattccgctgtgttgattgaggacgttcccttcacggagaaagattttgagaatggcccccagaacatatacaacctttacgagcaagtcagctacaactgtttcatcgctgcaggcctttacctcctcctcggaggcttctctttctgccaagttcggctcaataagcgcaaggaatacatggtgcgctagggccccggcgcgtttccccgctccagcccctcctctatttaaagactccctgcaccgtgtcacccaggtcgcgtcccacccttgccggcgccctctgcgggactgggtttcccgggcgagagactgaatcccttctcccatctctggcatccggcccccgtggagagggctgaggctggggggctgttccgtttctccacccttcgctgtgtcccgtatctcaataaagagaatctgctctcttcagaaaaaaaaaaaaaaaaaaa

SEQ ID NO: 679 - DNA, 863 bp, Homo Sapiens
  NM_001004340
aatatcttgcatgttacagatttcactactcccaccagcttggagacaacatgtggttcttgacaactctgctcctttggggctggctactactgcaggtctccagcagagtcttcatggaaggagaacctctggccttgaggtgtcatgcgtggaaggataagctggtgtacaatgtgctttactatcgaaatggcaaagcctttaagtttttccactggaattctaacctcaccattctgaaaaccaacataagtcacaatggcacctaccattgctcaggcatgggaaagcatcgctacacatcagcaggaatatcacaatacactgtgaaaggcctccagttaccaactcctgtctggtttcatgtccttttctatctggcagtgggaataatgtttttagtgaacactgttctctgggtgacaatacgtaaagaactgaaaagaaagaaaaagtggaatttagaaatctctttggattctggtcatgagaagaaggtaatttccagccttcaagaagacagacatttagaagaagagctgaaatgtcaggaacaaaaagaagaacagctgcaggaaggggtgcaccggaaggagccccagggggccacgtagcagcggctcagttggtggccatcgatctggaccgtcccctgcccacttgctccccgtgagcactgcgtacaaacatccaaaagttcaacaacaccagaactgtgtgtctcatggtatataactcttaaagcaaataaatgaactgacttcaactgggatacatttggaaatgtggtcatcaaagatgacttgaaatgaggcctactctaaagaattcttgaaaaacttaaaaaaaaaaaaaaaaaa

SEQ ID NO: 680 - DNA, 1814 bp, Homo Sapiens
  NM_001004420
actcatagaaactggaggcaaaatgcatgacagtaacaatgtggagaaagacattacaccatctgaattgcctgcaaacccaggttgtctgcattcaaaagagcattctattaaagctaccttaatttggcgcttatttttcttaatcatgtttctgacaatcatagtgtgtggaatggttgctgctttaagcgcaataagagctaactgccatcaagagccatcagtatgtcttcaagctgcatgcccagaaagctggattggttttcaaagaaagtgtttctatttttctgatgacaccaagaactggacatcaagtcagaggttttgtgactcacaagatgctgatcttgctcaggttgaaagcttccaggaactggtaagaaaatagttctggccagaatcaaagattcagccctacaaggatatgttttcctgtgaaattatctaagagaatttcctgttgagatataaaggcccatctgatcactggattgggctgagcagagaacaaggccaaccatggaaatggataaatggtactgaatggacaagacagtttcctatcctgggagcaggagagtgtgcctatttgaatgacaaaggtgccagtagtgccaggcactacacagagaggaagtggatttgttccaaatcagatatacatgtctagatgttacagcaaagccccaactaatctttagaagcatattggaactgataactccattttaaaatgagcaaagaatttatttcttataccaacaggtatatgaaaatatgctcaatatcactaataactgggaaaatacaaatcaaaatcatagtaaaatattacctgttttcatggtgctaatattacctgttctcccactgctaatgacatacccgagactgagtaatttataaataaaagagatttaattgactcatagttccacatggctggggaggtcttgcaatcatgacagaaggcaaatgggaagcaaagtcatgtcttatgtggtggcaggcagggggacttgtgcacaggaactcctatttatacaaccatcagatatcttgagacaagaacagtatggggctccctggtgtgattccgtcctgcgcggctgttctctggagcagcattcatttatcttcgtctgccttgtctcctacctaagtgtgtgtcgccacccgatggaagattcgatggacatggacatgagccccctgaggccccagaactatcttttcagttgtgaactaaaggccgacaaagatgatcactttaaggtggataatgatgaaaatgagaccagttatctttaagaacggtcagctcaggggctggtgcaaaggatgaactgcacattgttgaagcagaggccatgaatgacgaaggcagtccaattaaagtaacactggcaactttgaaaatgtctgtacagccaacggtttctcttgggggctttgaaataacaccaccagtggacttaaggttgaagtgtggttcagggccagtgcatattagtggacagcacttagtagctgtgaaggaaggtgcagagtcagaagatgaagaagaggaggatgtgaaactcttaagtatatctggaaagcagtctgcccctggaggtgggcagaaaaaagtaaaacttgctgctgctgctgatgatgatgatgatgaagatgatgatgatgatgatgacgaggaagctgaagaaaaagcgccagtgaagaaatctatacgagatactccagccaaaaatgcacaaaagtcaaatcagaatggaaaagactcaaaaccatcatcaacaccaagatcaaaa

SEQ ID NO: 681 - DNA, 3077 bp, Homo Sapiens
  NM_001004426
gggggtccgttccccaacttcctcggcgctccggactcccaagtctccgccggaccctcctttggatattcctcgtgtctccgattctgagacagagggggaagacggtggggcctccccacctgccccgcagaagatgcagttctttggccgcctggtcaataccttcagtggcgtcaccaacttgttctctaacccattccgggtgaaggaggtggctgtggccgactacacctcgagtgaccgagttcgggaggaagggcagctgattctgttccagaacactcccaaccgcacctgggactgcgtcctggtcaaccccaggaactcacagagtggattccgactcttccagctggagttggaggctgacgccctagtgaatttccatcagtattcttcccagctgctacccttctatgagagctcccctcaggtcctgcacactgaggtcctgcagcacctgaccgacctcatccgtaaccaccccagctggtcagtggcccacctggctgtggagctagggatccgcgagtgcttccatcacagccgtatcatcagctgtgccaattgcgcggagaacgaggagggctgcacacccctgcacctggcctgccgcaagggtgatggggagatcctggtggagctggtgcagtactgccacactcagatggatgtcaccgactacaagggagagaccgtcttccattatgctgtccagggtgacaattctcaggtgctgcagctccttggaaggaacgcagtggctggcctgaaccaggtgaataaccaagggctgaccccgctgcacctggcctgccagctggggaagcaggagatggtccgcgtgctgctgctgtgcaatgctcggtgcaacatcatgggccccaacggctaccccatccactcggccatgaagttctctcagaaggggtgtgcggagatgatcatcagcatggacagcagccagatccacagcaaagacccccgttacggagccagccccctccactgggccaagaacgcagagatggcccgcatgctgctgaaacggggctgcaacgtgaacagcaccagctccgcggggaacacggccctgcacgtggcggtgatgcgcaaccgcttcgactgtgccatagtgctgctgacccacggggccaacgcggatgcccgcggagagcacggcaacaccccgctgcacctggccatgtcgaaagacaacgtggagatgatcaaggccctcatcgtgttcggagcagaagtggacaccccgaatgactttggggagactcctacattcctagcctccaaaatcggcagacaactacaggatctcatgcacatctcacgggcccggaagccagcgttcatcctgggctccatgagggacgagaagcggacccacgaccacctgctgtgcctggatggaggaggagtgaaaggcctcatcatcatccagctcctcatcgccatcgagaaggcctcgggtgtggccaccaaggacctgtttgactgggtggcgggcaccagcactggaggcatcctggccctggccattctgcacagtaagtccatggcctacatgcgcggcatgtactttcgcatgaaggatgaggtgttccggggctccaggccctacgagtcggggcccctggaggagttcctgaagcgggagtttggggagcacaccaagatgacggacgtcaggaaacccaaggtgatgctgacagggacactgtctgaccggcagccggctgaactccacctcttccggaactacgatgctccagaaactgtccgggagcctcgtttcaaccagaacgttaacctcaggcctccagctcagccctcagaccagctggtgtggcgggcggcccgaagcagcggggcagctcctacttacttccgacccaatgggcgcttcctggacggtgggctgctggccaacaaccccacgctggatgccatgaccgagatccatgagtacaatcaggacctgatccgcaagggtcaggccaacaaggtgaagaaactctccatcgttgtctccctggggacagggaggtccccacaagtgcctgtgacctgtgtggatgtcttccgtcccagcaacccctgggagctggccaagactgtttttggggccaaggaactgggcaagatggtggtggactgttgcacggatccagacgggcgggctgtggaccgggcacgggcctggtgcgagatggtcggcatccagtacttcagattgaacccccagctggggacggacatcatgctggatgaggtcagtgacacagtgctggtcaacgccctctgggagaccgaggtctacatctatgagcaccgcgaggagttccagaagctcatccagctgctgctctcaccctgagggtccccagcctctcaccggccccagctgacctcgtccattcagcccctgccaggccaagcccagccactgccctcccgggcagatctgggcccaggcacctctgagtccatagaccaggcctgggagaatgccaagctgcctgcccgaggctggtcctgaaggcctgtctcccactaaccccgccttccagcactttctgtcattccaggctgggaaagtctagagccccctttggcccctttccctgactgtcaaggacaactgactcccccatcagctcaaacattaagggtacccgggcacaaccgtacccctgcccccagccccagcctccctgagggcctgccgggctgcctctgccccagcccccagcaagggcactcccaggcttcctggtgggtgcagcccactccctctgccctctgctccgttccctgggggctgggactaaagaaatgggtgtcccccaccccatcagctgggaaagcccaggccgcaggagtgggatgcccgttggactttgcccctcacactggcccagcccctcacactgccccaccccgagaaccctcagctctcaaaggtcactcctgggagtttcttcttcccaatggaagtggcttaagagccaaaactgaaataaatcatttggattcaagttcaaaaaaaaaaaaaaaaa

SEQ ID NO: 682 - DNA, 1348 bp, Homo Sapiens
  NM_001004431
gcggggggcgcgcgacgtgaccacccggactcgaagcccgccccgcccccgcccggctcgccggctccggggtctgctccgggggtcgcggacgcggggccgggcggcggagccggcgccagagcatgcggggcgcggcgcgggcggcctgggggcgcgcggggcagccgtggccgcgaccccccgccccgggcccgcccccgccgccgctcccgctgctgctcctgctcctggccgggctgctgggcggcgcgggcgcgcagtactccagcgaccggtgcagctggaaggggagcgggctgacgcacgaggcacacaggaaggaggtggagcaggtgtatctgcgctgtgcggcgggtgccgtggagtggatgtacccaacaggtgctctcatcgttaacctgcggcccaacaccttctcgcctgcccggcacctgaccgtgtgcatcaggtccttcacggactcctcgggggccaatatttatttggaaaaaactggagaactgagactgctggtaccggacggggacggcaggcccggccgggtgcagtgttttggcctggagcagggcggcctgttcgtggaggccacgccgcagcaggatatcggccggaggaccacaggcttccagtacgagctggttaggaggcacagggcgtcggacctgcacgagctgtctgcgccgtgccgtccctgcagtgacaccgaggtgctcctagccgtctgcaccagcgacttcgccgttcgaggctccatccagcaagttacccacgagcctgagcggcaggactcagccatccacctgcgcgtgagcagactctatcggcagaaaagcagggtcttcgagccggtgcccgagggtgacggccactggcaggggcgcgtcaggacgctgctggagtgtggcgtgcggccggggcatggcgacttcctcttcactggccacatgcacttcggggaggcgcggctcggctgtgccccacgcttcaaggacttccagaggatgtacagggatgcccaggagagggggctgaacccttgtgaggttggcacggactgactccgtgggccgctgcccttcctctcctgatgagtcacaggctgcggtgggcgctgcggtcctggtggggccgtgcggtgagggccgcgcgctgggagccgcatgccctgggcccaggcctgaccctggtaccgaagctgtggacgttctcgccacactcaaccccatgagcttccagccaaggatgccctggccgattggaaatgctgtaaaatgcaaactaagttattatatttttttttggtaaaaaagaaatgtccataggaaacaaaaaaaaaaaaaaaaaa

SEQ ID NO: 683 - DNA, 3952 bp, Homo Sapiens
  NM_001004441
tgctggcccccctgggtccagaggagccttgccgccctcacctgcgcagagcctggagccgacgcgtcacccccagcggaagcgcctcgctgcccgggcgtctggcgaggtgtgcgctccgggtcccagctccagcgcttcgcggcagtcgcccgcctctttccgcaagcagggcggggactgggcggcatctaccgagatctgcgattcgaggcgccgaggagccgaagaccacagctcagctcagacggcgccctagggccgcacagagggtcgggcagtgccggagagaggtttgaaagcgccgccgccaactcgacagcgcgtcccagcgccttgagctcgcttcctcctgctctcaggaaaaactgaggaaacgcgcctggttccaggggtcggcggggaccgtggagacgctgccagcatcctcaacagcttggaaatcccatcaccttggttccctgagacttggaggactagtaggaactgacagctggctgacagaaaacttatccagggagagaagagacaaaagtgaagtgtgaaattttgaataatgttttcagatgctttgcattcagaatagacctctgagttgggacccaagctgtcaactgatcccaaattcctaagttcctgacttgcaggtattgagttctaacctccgaagatggatgaaggtatggaaatttcaagtgaaggaaattccttgatcaaagcagtccatcagagccggcttcgcctcacaagacttttgctagaaggcggtgcctacattaatgagagcaacgaccgtggggaaacccctttaatgatcgcttgtaagaccaaacatgtcgatcaccagagtgtcagtaaagccaaaatggtgaaatacctgttagagaacaatgccgatcccaacatacaggacaaatctgggaaaacggctctgatgcatgcttgcttagaaaaagctggccctgaagttgtttccttgctcctcaagagtggggctgacctcagcttgcaagaccattctagttactcagctcttgtttatgctataaattcagaagatacagagaccctgaaagttcttcttagtgcttgcaaggcaaaagggaaagaggtcatcatcatcacaacagcaaagttgccctgtgggaagcatactactaaacaatacttaaatatgcctcctgtggatatagatgggtgtcattccccagctacctgcaccactccttcagaaatagacatcaaaactgcctcatcgccactttcacattcttctgaaacggaactgacgctttttggctttaaagatcttgagcttgctggaagcaatgatgatacctgggacccaggttcccctgtgaggaaacctgcattggcccctaaggggcccaagctcccccacgctccaccctgggtcaagagtcccccattattaatgcaccagaacagagtggcttcattgcaagaggagctccaggatattacaccagaggaagaactatcctataaaaccaatgggctggcactttccaagcggttcatcactaggcaccaaagcattgatgtaaaagacactgcacatttgctaagagcctttgatcaggccagctcaaggaagatgtcatatgatgaaataaattgtcaatcttatctttcagaaggaaatcagcaatgcattgaagtccctgttgaccaggacccagattctaaccagacaatatttgcttccaccttaagaagtatagttcaaaaaagaaacttgggggcaaatcactacagctctgattcccagctctcagctggccttacccctccaacttcagaagacggcaaagcacttataggaaagaaaaagatcctctcaccatctccttcccaattgtcagagtccaaagaattgttggagaatatccccccaggtcccctgagcaggagaaatcatgcagttttagaaaggcgaggttcaggagctttccctttagatcacagtgttacccaaaccagacaagggtttctcccacccttaaatgtaaattctcaccctcccatctcagatatcaatgtcaacaacaagatttgcagccttctttcttgtggtcaaaaagtgcttatgccaacagttccgattttccctaaagaattcaaaagtaagaaaatgttgttaaggagacaatcattgcaaactgaacaaattaagcaattagtaaacttctaggagatgggtataaaacacatcttcttcaaatgtttatatcagagaaacaaagaactagagaagaaatcttaaatgttcattcttttaaatctcgtgattggttagtccataatggctagatggattaaaatgtaatgtgatttgtactaggcgtcatgagcataaaaaataatacatagtttctgttaagggaattctctcaaacaaaaggaaagcgatttttctcaatgcttctaatatttaacaatctccatgtagtccaaatttgtcattaaaaaaaaatcaaagaaagaaggccacgtatgttggggtaatttttaaaaattttcagattggctaaatattttattaggaaacagttttcaagtcaataatttttttaacatttcatgttaataaatgagattgaaattttttatgatctctaaaccataaaagaaaacaccgacagctgtaaaatgttctaagataaaaaaactcgagctacaaagaaagaatgaactaattctttacaaatgttgactgaagatagataaaactctaattaaaaatttaaaaggttaaacactgtattagaatgggcaactaaaatattcgtggtgtcagtttaattagtgtcaaactggcaagtcagagttttacaacctactagtaatctatgccgggtcttgttgtttgtgcactgtgttttgctttgctttgttttggtttttaaacagacttacctgtaaagttatcttacggaattattctttctccatatcttttaaggaattattctttctccatatcatcttttaattcctgttattagttttggaagcttatccataagtttccaaagacaagatgatataaaagttaaaaagcattcctctttacttatatcaaattattcttgtctttcaaaaagaaccaaaaaaaaaaaattcatcatggataaaaactaagcgcttgccttcttttaaaaagaaaaactgatgattagattaggttagctaaaattaatagaggcagtagaaacttaatcacaaaatgtactaaatatttggcaatattaaacaatgcctttttatttctgatatgtagttattagacatttatatattaaggataacttccttagtgtgacattccaatcatttagtattttaggacctgtgaataacttccaacaaaattaatgaataccatattagtattataaaatattataaagtaataattatatcatctatataacttcaaagtatgatgtttatacaaagaatccttatttcagtctagcagcttaacaacaaaggataaatcagactatacaaaacctaagtgtattaatttgatgattgtcacgtacaactttctttgccttccaagtagaggtgatcctaacaattggcatgatgcttttcttggtaatttgatataagcaagttgtaatgtacatagtaattatttaattactgtggcttttattttaaaaagtaattagaggtttttccatttcatgtcttgaacaacattaatattaattacactagaaatattttttgattcagaacttagaattgtacctgatatttataggtatttaaatgctttctgcaagttaaatatcgagaaaagtacttgacttcaagttgtaaggatacaatttggaagggtatgtaaatagattagttcataaacaaaatggtatcaataaagattttaaatatcaaaaaaaaaaaaaaaaaa

SEQ ID NO: 684 - DNA, 933 bp, Homo Sapiens
  NM_001004701
atgcaactgaataataatgtgactgagttcattctgcttggattgacacaggatcctttttggaagaaaatagtgtttgttatttttttgcgtctctacttgggaacactgttgggtaatttgctaatcattattagtgtcaagaccagccaggcacttaagaacccaatgttcttcttccttttctacttatccttatctgatacttgcctctctacttccataacccctagaatgattgtggatgcccttttgaagaagacaactatctccttcagcgagtgcatgatccaagtcttttcatcccatgtctttggctgcctggagatcttcatcctcatcctcacggctgttgaccgctatgtggacatctgtaagcccctgcactacatgaccatcataagccagtgggtctgtggtgttttgatggctgtggcctgggtgggatcctgtgtgcattctttagttcagatttttcttgccctgagtttgccattctgtggccccaatgtgatcaatcactgtttctgtgacttgcagcccttgttgaaacaagcctgttcagaaacctatgtggttaacctactcctggtttccaatagtggggccatttgtgcagtgagttatgtcatgctaatattctcctatgtcatcttcttgcattctctgagaaaccacagtgctgaagtgataaagaaagcactttccacatgtgtctcccacatcattgtggtcatcttgttctttggaccttgcatatttatgtacacatgccttgcaaccgtattccccatggataagatgatagctgtattttatacagttggaacatcttttctcaaccctgtgatttacacgctgaagaatacagaagtgaaaagtgccatgaggaagctttggagcaagaaattgatcacagatgacaaaagataa

SEQ ID NO: 685 - DNA, 855 bp, Homo Sapiens
  NM_001005
cctttcctttcagcggagcgcggcggcaagatggcagtgcaaatatccaagaagaggaagtttgtcgctgatggcatcttcaaagctgaactgaatgagtttcttactcgggagctggctgaagatggctactctggagttgaggtgcgagttacaccaaccaggacagaaatcattatcttagccaccagaacacagaatgttcttggtgagaagggccggcggattcgggaactgactgctgtagttcagaagaggtttggctttccagagggcagtgtagagctttatgctgaaaaggtggccactagaggtctgtgtgccattgcccaggcagagtctctgcgttacaaactcctaggagggcttgctgtgcggagggcctgctatggtgtgctgcggttcatcatggagagtggggccaaaggctgcgaggttgtggtgtctgggaaactccgaggacagagggctaaatccatgaagtttgtggatggcctgatgatccacagcggagaccctgttaactactacgttgacactgctgtgcgccacgtgttgctcagacagggtgtgctgggcatcaaggtgaagatcatgctgccctgggacccaactggtaagattggccctaagaagcccctgcctgaccacgtgagcattgtggaacccaaagatgagatactgcccaccacccccatctcagaacagaagggtgggaagccagagccgcctgccatgccccagccagtccccacagcataacagggtctccttggcagctgtattctggagtctggatgttgctctctaaagacctttaataaaattttgtacaaagacaaaaaaaaaaaaaaa

SEQ ID NO: 686 - DNA, 4677 bp, Homo Sapiens
  NM_001005158
atattggaatgagtcggagcgcggagcgccgccgccgcctccgccggagcgcgggtggaggggggcggggagagctgccggccgccccgctccgccgaacccagcaggaaggagggcgcgagcgggcgagcgcgggcagcacgggaggaaaaagcttccgcgcgggggagcgaaaagacggaaagaaagaaagaaaacgagcgcgagagggggaaaagcgagcgatcgagcgagcgcgcgcgcgaaaactccgggcaggaaggtggacttttaaatattctccactgaagcaaatgctgcaacaatttgcatttccttcaccaatgtcgtcttgtgccttttcttgttcctactgtaaaggagatgggttagatgttcactttcatttggacccgtggatacccattgaacagatgcttgaaacctgcaagtaatcttcagatcctagcagaaccataggcctttcctttgttttgggaggatatagcctgcctatatgctgtggaaatgaacggggagcagcagcttgatgcagatgccggctctggtatggaagaggtagaattaagctgggaagattatctagaagaaacagggtccacagcagttccctatgggtcttttaaacatgtggacacacgtttgcaaaatggatttgctcctgggatgaagctggaggtggctgtgagaacagatcctgagacctactgggttgccaccgttatcactacctgtgagcagttgctccttctccgctatgatggctatggggaggatcggagagcagatttctggtgtgacatcaggaaggctgatctctaccccattgggtggtgtgagcagaataagaagacccttgaagccccagaaggcatcagagataaagtatctgactgggatgagtttctgcggcagaccctgataggagcatgtagtcctcctgttccgctgctagagggcctccgtaatgggaggaatcctttagatctcattgctccaggatccagactagaatgtcaagctttccaggactctttaagcacttggattgttactgtagtagaaaacattggaggaaggctgaagctacgttatgaaggacttgaaagttctgacaattatgaacattggttgtattacttggatccatttcttcatcacgttggttgggctgctcaacagggatatgagcttcagcccccttcagccattagacatctaaaaaatgaagctgagtggcaagagattttggccaaagtgaaagaggaagaggaagagccattaccatcttacttatttaaggacaaacaagttattggcattcatacattctctgtaaacatgaaattggaagctgtagacccctggtctccttttgggatctctcctgctacagttgttaaggtttttgatgagaagtactttctggtggaaatggatgacttgcgtcctgagaaccacgcacggcgatcctttgtgtgccacgccgacagtcctggcatcttccctgtgcagtggagtctgaagaatggcctacacatcagcccccctccaggctacccaagccaggactttgactgggctgactacctcaaacagtgtggtgctgaagctgctccccagaggtgcttccctccgttaatttctgaacatgaatttaaggagaacatgaagctcgaggcggtgaaccccattctccctgaagaagtgtgtgttgctaccatcactgcagtgagaggctcctacctgtggctccagctggagggttctaagaagcctatacctgaatgtattgtgagtgtggaatccatggatatatttcctttgggctggtgtgaaaccaacggccaccccctcagcactcctcgccgagcacgagtatataaacagaggaaaattgcagtggttcagccagaaaaacaagtaccatcctcgaggactgtccacgagggcctgaggaatcaggagctgaactccacagagtcagttatgattaatggaaaatattgctgtccaaagatatacttcaaccaccgttgcttctcagggccatatcttaacaaaggaagaattgctgagctgcctcaatgtgtaggacctgggaactgtgttctggtccttagagaggtcctcactttacttatcaatgcagcctacaaacccagccgtgtccttcgggagctccagctggacaaagactctgtgtggcacggatgtggggaagtcctaaaagccaaatataaaggaaagagttatcgggctactgttgagatagtgaaaacagcagatcgggtgactgaattctgccggcaaacctgtatcaaactggaatgctgtcctaacctcttcggtccacggatggttctggataagtgttctgagaactgttctgtacttacaaagaccaaatacacacactattacggaaagaagaaaaataaaagaattgggaggccacctggtgggcatagtaacttagcttgtgccctgaaaaaagccagtaagaggagaaagaggcggaaaaatgtttttgttcataagaagaaacgctcctctgcatctgttgataataccccagcgggctctccccagggaagtgggggtgaagatgaggatgacccagatgaaggggatgatgattccctaagtgaaggcagtacatccgagcagcaggatgagctacaggaagaatcagaaatgtcagaaaaaaagtcatgctcctcttctcccacccaaagtgagatatccacatcgctgcctccagatagacaaaggagaaaaagggagcttcgcaccttttcattttctgacgatgaaaataaacctccttcaccaaaggaaataaggatcgaagttgctgaaaggcttcacctggacagtaaccccttgaagtggagtgtggcagacgttgtgcggttcatcagatccactgactgtgctccattagcaagaatattcctagaccaggaaattgatgggcaggccctgttgctccttacccttcccactgttcaagaatgcatggacttaaaattgggccctgccatcaaactttgccatcacatagagaggatcaagtttgctttttatgagcagtttgccaactgagaaggacaaccaaagtgagctggatctttgaagcacaaatgcagcaaatccttcaccctgctttataagtggagctggaatagtcctggggctctggggcctgcaggtatcagcttgctctctttgcactttcggggaaggaggactcacagtgaggaagcaaaaactgtgcacagaagtggatcacctgctggtggaaatgtggacatctcttgttcagcagatggcagtttttaaaaaataaaggttgtgaggaaaagacttatataagaagaaaagcatttccagtggtgtggcctgaaaacaaagaataacctaggctgctggaaagcacccttttggttgttttcattctgttccctcccattgtagattgaactttgttctctgctttctttttcttggaaagagaggacttagctttaagtcagcactgatttgggactgttcctaaggcatatcagtgcttcattgtcattgtgtttttaaactttttaaaattaaaacagttcattttggggatgattatgtggctctagggttttgaatgtatagtcacactttgatcattttaaaatcgattcttaggagttcctttgtttactacctctgttgataattgagcttacagccatgtatgaggttttttgtatgatgccatttttaagctacataaacactaaaattatgacagaatttggagggggggaaactgtttgctttcttaaaaacattatatggggcacttacaccagttccttaactgacctgatctgagaactctactgttactgttctccatcttgacccagccgaggctgcctgtgttaagtaacatcaccaagactgttagtatttctgtttaattgccctcttcctattcattctcagagggacttcagtgacttttattttgtgtttacttttctctagagttgtttgtctacctctgtttcatttctaaggtctttactttgggtgaaaatcagtaagtgttccatggacccacagcgaagcccatttgtccttctttccaggtgtctccagtgtagaagcacagcacagaaaacatgttttggagggtaacgcagagcatggagtttctgttagcagtgtcctcagtggcaggataaatactgagatgtggttaaggattctggaaacctctttgcctagccacacttagacttttttcagctaatcctttaaattgaatataatctttagtccgaggattcccatttaaacaactcagtattcttttaagtgtgtcttttagcccagctcaagttaacatgaaactccaggtgaattttcacttactattccattgctagctattatagaataatagcgtttgctgcactattctagtcatgaggagtgaggaaaaacatacataggttgtctcccttaaatggtttgctttgctgaattttttttatcctaatcacctgcaaatttataacccaatcattcttcctcaagatttgaaaatgttttaatcctgcaaactgggtgaattctaaacagctctacaaatataaggaaatattacagcaaatttta

SEQ ID NO: 687 - DNA, 854 bp, Homo Sapiens
  NM_001005176
acttttcttttcctctttgactgagcaccgaggggcagttggcagcttcacctcagagctgcaggaaggaacggggcagtgaaaatcgaatcgggtgtgatcctaggccaagctcatggcccagcagggccagcaggggcagatggcaagtggagacagcaatctcaacttcaggatggtcgcagagatccagaacgtagagggtcagaacctgcaggagcaggtttgccctgagcccattttcaggttcttcagagaaaacaaggtggagattgcaagtgcaataacaaggccatttcctttccttatgggcctccgagaccgctccttcatctccgagcagatgtatgaacattttcaagaagcttttagaaacctggtcccagtgacaagagtgatgtattgtgtactcagtgaactggagaagacatttggctggtcacatctggaagcattgttcagcaggattaacctgatggcctatcctgatttaaacgagatttacagaagcttccagaatgaaaatttatcatccagtgcagtcctgtgtcaacttgtttctccaaacaaagactggagaagtcacgaagagagcctagcacatactggtacactgaggaggagctgcatgtgaaagctatgaagacagaaaagggggttggtgggggcctttccgaaccatgtggttgaattgcagactgtgggaggcagggtgtgagagctgactctggagaaagaagttgaagtggattctggaaggcttgacaccctgtgctaaggaatctggagtttaatttttggaaaataaagaaggaataaagggcatttaaacgggaaaaaaaaaaaaaaaaaaa

SEQ ID NO: 688 - DNA, 4307 bp, Homo Sapiens
  NM_001005242
aggggcggggccggactcgagcggggcggggctcgcgccagcgcccccagctccgtggcggcttcgcccgcgagtccagaggcaggcgagcagctcggtcgcccccaccggccccatggcagcccccggcgccccagctgagtacggctacatccggaccgtcctgggccagcagatcctgggacaactggacagctccagcctggcgctgccctccgaggccaagctgaagctggcggggagcagcggccgcggcggccagacagtcaagagcctgcggatccaggagcaggtgcagcagaccctcgcccggaagggccgcagctccgtgggcaacggaaatcttcaccgaaccagcagtgttcctgagtatgtctacaacctacacttggttgaaaatgattttgttggaggccgttcccctgttcctaaaacctatgacatgctaaaggctggcacaactgccacttatgaaggtcgctggggaagaggaacagcacagtacagctcccagaagtccgtggaagaaaggtccttgaggcatcctctgaggagactggagatttctcctgacagcagcccggagagggctcactacacgcacagcgattaccagtacagccagagaagccaggctgggcacaccctgcaccaccaagaaagcaggcgggccgccctcctagtgccaccgagatatgctcgttccgagatcgtgggggtcagccgtgctggcaccacaagcaggcagcgccactttgacacataccacagacagtaccagcatggctctgttagcgacaccgtttttgacagcatccctgccaacccggccctgctcacgtaccccaggccagggaccagccgcagcatgggcaacctcttggagaaggagaactacctgacggcagggctcactgtcgggcaggtcaggccgctggtgcccctgcagcccgtcactcagaacagggcttccaggtcctcctggcatcagagctccttccacagcacccgcacgctgagggaagctgggcccagtgtcgccgtggattccagcgggaggagagcgcacttgactgtcggccaggcggccgcagggggaagtgggaatctgctcactgagagaagcactttcactgactcccagctggggaatgcagacatggagatgactctggagcgagcagtgagtatgctcgaggcagaccacatgctgccatccaggatttctgctgcagctactttcatacagcacgagtgcttccagaaatctgaagctcggaagagggttaaccagcttcgtggcatcctcaagcttctgcagctcctaaaagttcagaatgaagacgttcagcgagctgtgtgtggggccttgagaaacttagtatttgaagacaatgacaacaaattggaggtggctgaactaaatggggtacctcggctgctccaggtgctgaagcaaaccagagacttggagactaaaaaacaaataacaggtttgctgtggaatttgtcatctaatgacaaactcaagaatctcatgataacagaagcattgcttacgctgacggagaatatcatcatccccttttctgggtggcctgaaggagactacccaaaagcaaatggtttgctcgattttgacatattctacaacgtcactggatgcctaagaaacatgagttctgctggcgctgatgggagaaaagcgatgagaagatgtgacggactcattgactcactggtccattatgtcagaggaaccattgcagattaccagccagatgacaaggccacggagaattgtgtgtgcattcttcataacctctcctaccagctggaggcagagctcccagagaaatattcccagaatatctatattcaaaaccggaatatccagactgacaacaacaaaagtattggatgttttggcagtcgaagcaggaaagtaaaagagcaataccaggacgtgccgatgccggaggaaaagagcaaccccaagggcgtggagtggctgtggcattccattgttataaggatgtatctgtccttgatcgccaaaagtgtccgcaactacacacaagaagcatccttaggagctctgcagaacctcacggccggaagtggaccaatgccgacatcagtggctcagacagttgtccagaaggaaagtggcctgcagcacacccgaaagatgctgcatgttggtgacccaagtgtgaaaaagacagccatctcgctgctgaggaatctgtcccggaatctttctctgcagaatgaaattgccaaagaaactctccctgatttggtttccatcattcctgacacagtcccgagtactgaccttctcattgaaactacagcctctgcctgttacacattgaacaacataatccaaaacagttaccagaatgcacgcgaccttctaaacaccgggggcatccagaaaattatggccattagtgcaggcgatgcctatgcctccaacaaagcaagtaaagctgcttccgtccttctgtattctctgtgggcacacacggaactgcatcatgcctacaagaaggctcagtttaagaagacagattttgtcaacagccggactgccaaagcctaccactcccttaaagactgaggaaaatgacaaagtattctcggctgcaaaaatccccaaaggaaaacacctatttttctactacccagcccaagaaacctcaaaagcatgccttgtttctatccttctctatttccgtggtcccctgaatccagaaaacaaatagaacataattttatgagtcttccagaagacctttgcaagtttgccaccagtagataccggccacaggctcgacaaatagtggtctttgttattagggcttatggtacatggcttcctggaatcaaaatgtgaattcatgtggaagggacattaatccaataaataaggaaagaagctgttgcattactgggattttaaaagtttgatttacatttatattccttttctggttcccatgttttgtcactcatgtgcacattgcttcgccattgggcctccagtgtattgttctgcagtgttgaaacagaatggaaatgacaagaaatatctgcagttatccaggagaaagtataatggcaaaattattggtttctttctttactttgtgcttgtttttatccccttgggttgtttttctctgatttttaaataaacttaagaaatttagattacagagtatgcatgactgtaagaaaaagaaattgagaggaagtgatcatagcaaattaaagaagtcttttcctcccagaacttaaagtaaaataaaaaataaataaataaataaaatcttttccacagagaaaggcaactgtgatgataaaatttaacgttcccccaaacactgagtcaatgagatttttctcaggagatactttacctataacaacgccgttaaatccaaatctcttctaaacgatggcattctatgtaatgcctttcctggacttttttggccactgccctggactagtgaaagaatggactctatctttatctgcaagaggaactaaggccttctctcagactgcctggccagcctggggcactgaaaatacggctcatgttaatgagttacattatcagccagcccagccttgcccaccatttaagaaatatcacagagccactagatctcatatgatcttcttcaagccattattttaactcaagaaaactctagagaagaaaagtgaagaagtcatgttgaagaagatgtaagaatgtgtcaagaccatccagaaatgatatgagaaatactgatattttaaatggttgacatcatccagcgaaatgaatctacattaaatgttgttttaactgcgctatgattaaaaccattcatatagagttagtctttacaactactattctgttatttttttttttaatctgacaacatttgtcctaagtaagataagcaaaaaaattcttcaactccttttggcaagaaaactgtaacagaaaataaattttgaatgtgtacttaagtctttattatatttgaagcaattttttttcaattttaaaagctgaatgaagacaacttaggttgctaacctagttcaaaatgaaattatttagataccaatttttaaaatactggagagaatttatatgtctttttccagagttctgatgataagcatttggagtgcatttattcctccagataataaatgtgtgttcagaactttttgtgttttttaaggcattaataaagccttcgataatattaaatacaaaatgagaccaa

SEQ ID NO: 689 - DNA, 7343 bp, Homo Sapiens
  NM_001005273
atatggaggtgaagggtgagatcgggaaacaaagggtatggccccctagttcccaaagggagcagggagatgggaatagaattgaaggtaggttttaggctacttgggaggaggaatatttaggtaattgtggagactttctcctgtgtgatgaaggcggcagacactgtgatcctgtgggcaagaagtaaaaatgaccagctgaggatttcttttcctccaggactgtgttggggtgacaggatgcctgataaggatgacattcggctgctgccgtcagcattgggtgtgaagaagagaaaacgaggacccaagaagcagaaggagaacaagccaggaaaaccccgaaaacgcaagaagcgtgacagtgaggaggaatttggttctgagcgagatgagtaccgggagaagtcagagagtgggggcagtgaatatggaaccggaccgggtcggaaacgaagaaggaagcaccgagaaaaaaaggagaagaagacaaagcggcggaaaaagggggagggagatggggggcaaaagcaagtggaacagaagtcatcagcaactctgcttctgacctggggcctggaggatgtggagcatgtgttctctgaggaggattaccacacgctcaccaactacaaagccttcagccagttcatgaggcccctaattgctaagaagaatcctaagatcccaatgtctaagatgatgaccatccttggggccaaatggagagagttcagtgccaacaaccccttcaaggggtcagcagctgctgtggcggcggcagcggcagcagcagcagcagctgtagctgagcaggtgtcagctgctgtctcgtcggccacccccatagcaccctccggaccccccgcccttccaccaccccctgctgctgatatccagcccccacccatccgaagagccaaaaccaaagagggcaaaggtccaggccataagaggcggagtaagagcccccgagtgcctgatggacgcaagaagcttcggggaaagaaaatggcaccactcaaaataaaactagggcttctgggtggcaagaggaagaaaggaggctcgtatgtttttcagagcgacgaaggtcctgaaccagaggctgaggaatcagacctggacagtggcagtgtccacagtgcctcaggccggcctgatggccctgtccgcaccaagaaactaaagagaggccggccaggaaggaagaagaagaaggtcctgggctgtcctgcagtggccggggaggaggaggttgatggctacgagacggatcaccaggattactgtgaggtgtgccagcagggtggggaaattattctgtgtgacacctgccctcgtgcctaccacctcgtctgccttgatcctgagcttgaccgggctccagagggcaaatggagctgccctcactgtgagaaggagggggtccagtgggaggccaaggaggaagaagaagaatacgaagaggagggagaggaagaaggggagaaggaggaggaggatgatcacatggagtactgccgcgtatgcaaggacggcggggagctcctgtgctgtgacgcgtgcatctcctcctaccacattcattgtctaaaccctcccctgcctgacattcccaatggtgaatggctgtgtccccgatgcacatgccccgtgctgaagggtcgagtgcagaagatcctacattggcggtggggggagccacctgtagcagtgccagcccctcaacaggcagatggaaatccagatgtcccacccccccgtcctcttcaaggcagatcagagcgagagttctttgtcaagtgggtaggactatcctactggcactgctcctgggccaaggagcttcagctggaaatcttccatttggttatgtatcgaaactaccagcggaagaatgacatggatgagcccccacccctggactatggctccggcgaggatgatgggaagagcgacaagcgtaaagtgaaagacccgcactatgctgagatggaggagaagtactatcgttttggcatcaagccagagtggatgaccgtccaccgcatcatcaaccacagtgtggataaaaaggggaattaccactatctagtaaaatggagggacttaccatatgaccagtccacgtgggaggaagatgaaatgaatatccctgaatacgaagaacataagcaaagctactggagacaccgagaactaattatgggggaagaccctgcccagccccgcaagtataagaagaagaagaaggagctacagggtgatgggcctcccagttctcccactaatgatcctaccgtgaaatatgagactcagccacggtttatcacagccactggaggcaccctgcacatgtatcagttggaagggctgaactggctacgcttctcctgggcccagggcactgacaccattctagctgatgagatggggctaggcaagaccatacaaaccatcgtcttcctctactcactctacaaggagggccacacaaaaggtcccttcctggtgagtgccccactctctaccatcattaactgggagcgggagttccagatgtgggcacccaaattctatgtggtgacatacacgggtgacaaggacagccgggccatcattcgtgagaatgaattctcctttgaggacaatgccatcaaagggggcaagaaagcttttaagatgaagagggaggcacaggtgaagttccatgttctcctgacatcgtatgagctgatcaccattgatcaggcagcacttggttccatccgctgggcctgtcttgtggtagatgaggcccatcgactcaagaacaaccagtccaagtttttcagggttctcaatggttacaagatagatcataagttgctgctgacaggaaccccattgcagaataatctggaggagctcttccatctcctgaacttcctcaccccagagagatttaacaacttggagggcttcctggaggagtttgctgacatatccaaagaggaccagatcaagaaactgcatgatttgctggggccacacatgctgcggagactcaaggcagatgtctttaagaacatgccagccaagacagagctcatcgttcgggtggagctaagccccatgcagaagaaatactacaaatacatcctgactcgaaattttgaggccttgaattcacgaggtggtgggaaccaggtgtcgctgcttaatatcatgatggatcttaagaagtgctgcaaccatccatacctttttcccgtggctgctatggagtcccccaaactccccagtggggcttatgagggtggggcacttattaagtcgtctgggaagctcatgctgctccagaagatgctgcgaaagctgaaggagcaaggacaccgagtgctcatcttctcgcagatgaccaaaatgttagacttgcttgaggacttcttagactatgaaggctacaagtatgagcgcatcgatggtggtatcacgggtgccctgaggcaggaggccatcgatcggtttaatgctcctggggcccaacaattctgcttcctcctgtccacccgagctgggggcctgggcatcaatctggccactgctgacactgtcatcatctttgattctgactggaacccccataatgacatccaggcctttagccgggctcatcggattggccaggccaacaaagtgatgatttaccggtttgtgactcgcgcgtcagtggaagagcgaatcacacaagtggccaagagaaagatgatgctgacacacctggttgtgcggcctgggctgggctccaaggcaggctccatgtccaagcaggagcttgacgacattctcaaatttggcactgaagagctattcaaggatgaaaacgagggggagaacaaggaggaggacagcagtgtgattcattatgacaatgaggccatcgctcggctgttggaccggaaccaggatgcaactgaggacactgacgtgcagaacatgaatgagtatctcagctccttcaaggtggcacagtacgtcgtgcgggaagaagacaagattgaggaaattgagcgagagatcatcaagcaggaggagaatgtggaccctgactactgggagaagctgctgaggcatcactatgagcaacagcaggaagacctagcccggaatctaggcaagggcaagcgggttcgcaagcaagttaactacaatgatgctgctcaggaagaccaagacaaccagtcagagtactcggtgggttcagaggaggaggatgaagacttcgatgaacgtcctgaagggcgtagacagtcaaagaggcagctccggaatgagaaagataagccactgcctccactgctggcccgagtcgggggcaacattgaggtgctgggcttcaacacccgtcagcggaaggctttcctcaatgctgtgatgcgctgggggatgccaccacaggatgccttcaccacacagtggctggtgcgggacctgaggggcaagactgagaaggagtttaaggcctatgtgtctttgttcatgcgccatctgtgtgagcctggggcagacggctctgaaacctttgccgatggggtccctcgggagggactgagtcgccagcaggtgttgacccgcattggagtcatgtctctcgtcaaaaagaaggtgcaggagtttgagcacatcaatgggcgttggtcaatgccggaactgatgcctgaccccagcgccgattctaagcgctcctccagagcctcctctcctaccaaaacgtctcccaccactcctgaggcttctgctaccaacagtccctgcacctctaaacctgctactccagctccaagtgagaaaggagaaggcataaggacacctcttgagaaggaggaagctgaaaaccaggaggaaaagccagagaagaacagcagaattggggagaagatggagacagaggctgatgcccccagcccagccccatcacttggggagcggctggagccaaggaagattcctctagaggatgaggtgccaggggtgcctggagagatggagcctgaacctgggtaccgtggggacagagagaagtcagccacagagtcgacgccaggagaaaggggggaggagaagccgttggatggacaggaacacagggagaggccggagggggaaacaggggatttgggcaagagagaagatgtaaaaggtgaccgggagcttcgaccagggcctcgagatgagccacggtccaatgggcgacgagaggaaaagacagagaagccccggttcatgttcaatatcgccgatggtggcttcacagagcttcacacactgtggcagaatgaggaacgggcagctatttcctcggggaaactcaatgagatctggcacagaagacatgactattggcttctggctgggattgtcctccatggctatgcacggtggcaggacatccagaatgatgctcaatttgccattatcaacgagccatttaaaactgaagccaataaggggaactttctggagatgaaaaataagttcctggcccggaggttcaagctcctggagcaggcgctggtgattgaggagcagctgcggcgggcggcctacctgaacctgtcgcaggagccggcgcaccccgccatggccctccacgcccgcttcgccgaggccgagtgcctggccgagagccaccagcacctctccaaggagtcgctggcggggaacaagccggccaacgccgtcctgcacaaggttctgaaccagctggaggagttgctgagcgacatgaaggcggacgtgacccgcctgccagccacgctgtcccgaataccccccatcgcagcccgccttcagatgtccgagcgcagcatcctcagccggctggccagcaagggcacggagcctcaccccacaccggcctacccgccgggtccctacgctacacctccggggtacggggcggccttcagcgccgcacccgtaggggccctggccgccgcaggcgccaattacagccagatgcctgcagggtccttcatcacagccgccaccaacggccctccagtgcttgtgaagaaggagaaggaaatggtgggggcattggtgtcagacgggctggatcggaaggagccccgagccggggaggtgatctgtatagacgactgactggatcccaggcctgcccttcacccaggccccgtccccgaggccgacccccagctcaagcgctggggcctgctgccagccctccaccttccccaccccttgggccatcactgggctaggaacccctttgcccctctctgcagctcctctcttcaagaagggccctttgtctttctccactcccacacacctttcccaccaagccttgaagactgtgctggtgagaagaagtctgggtgggagatggctggcagggtcttccaagtaccttcctcccacactgccaagtatacacaacttcccagtaaatggttgtggggaggaaagaggtggagcctccccagccgtttccctgcagaatcagctctgtctcatgtggaagtggagaatcagccttgcctggcctttaggaacttttgtggggaagagagctttgaagagaggagggggactttagagagggatgaaaatgagccctgggagggaggaagggacgaggaggggtggctgcatgttaccgtcccctacctctccccacgtggagggtggagcagttatgagggaggaagtcaactgctgttcagcctcagaataaaggtgccgttcactggctcagttacctcctgtgtaccggcatcttgtgttgggaatgttcccccctccctagggaccaaggaccacccctacaaaaagagtaatggttgggtgatactccctcaagccaaagaggagctccccaacctgttctagggacccaggtaacctagaagggtgggagagaatacaatgggccagatgtggtggaagcccagctctggggctcaggttcctggaagacttctactaccctccctcctcaaggcctggatacagactaaatttgtataagtcaggcaggggacctagtcagggtcttgggagctaccttgtcgttgggaccagagcaaaatagtggagggcaggctagggaaatgtgggcacatcccccctcccaggaggggccggggagagtggcagtttgcatggcgaaccccccacttcctctttgctgccccttcactttcttgctgcccctttcccagtctctcttcacacccactcctggtctgtcctgatcccctcttctgtatcaggtttattggttgtacatataaattatactttcctttctgaaaaaaaaaaaaaaaaaa

SEQ ID NO: 690 - DNA, 5012 bp, Homo Sapiens
  NM_001005291
agcagagctgcggccgggggaacccagtttccgaggaacttttcgccggcgccgggccgcctctgaggccagggcaggacacgaacgcgcggagcggcggcggcgactgagagccggggccgcggcggcgctccctaggaagggccgtacgaggcggcgggcccggcgggcctcccggaggaggcggctgcgccatggacgagccacccttcagcgaggcggctttggagcaggcgctgggcgagccgtgcgatctggacgcggcgctgctgaccgacatcgaaggtgaagtcggcgcggggaggggtagggccaacggcctggacgccccaagggcgggcgcagatcgcggagccatggattgcactttcgaagacatgcttcagcttatcaacaaccaagacagtgacttccctggcctatttgacccaccctatgctgggagtggggcagggggcacagaccctgccagccccgataccagctccccaggcagcttgtctccacctcctgccacattgagctcctctcttgaagccttcctgagcgggccgcaggcagcgccctcacccctgtcccctccccagcctgcacccactccattgaagatgtacccgtccatgcccgctttctcccctgggcctggtatcaaggaagagtcagtgccactgagcatcctgcagacccccaccccacagcccctgccaggggccctcctgccacagagcttcccagccccagccccaccgcagttcagctccacccctgtgttaggctaccccagccctccgggaggcttctctacaggaagccctcccgggaacacccagcagccgctgcctggcctgccactggcttccccgccaggggtcccgcccgtctccttgcacacccaggtccagagtgtggtcccccagcagctactgacagtcacagctgcccccacggcagcccctgtaacgaccactgtgacctcgcagatccagcaggtcccggtcctgctgcagccccacttcatcaaggcagactcgctgcttctgacagccatgaagacagacggagccactgtgaaggcggcaggtctcagtcccctggtctctggcaccactgtgcagacagggcctttgccgaccctggtgagtggcggaaccatcttggcaacagtcccactggtcgtagatgcggagaagctgcctatcaaccggctcgcagctggcagcaaggccccggcctctgcccagagccgtggagagaagcgcacagcccacaacgccattgagaagcgctaccgctcctccatcaatgacaaaatcattgagctcaaggatctggtggtgggcactgaggcaaagctgaataaatctgctgtcttgcgcaaggccatcgactacattcgctttctgcaacacagcaaccagaaactcaagcaggagaacctaagtctgcgcactgctgtccacaaaagcaaatctctgaaggatctggtgtcggcctgtggcagtggagggaacacagacgtgctcatggagggcgtgaagactgaggtggaggacacactgaccccacccccctcggatgctggctcacctttccagagcagccccttgtcccttggcagcaggggcagtggcagcggtggcagtggcagtgactcggagcctgacagcccagtctttgaggacagcaaggcaaagccagagcagcggccgtctctgcacagccggggcatgctggaccgctcccgcctggccctgtgcacgctcgtcttcctctgcctgtcctgcaaccccttggcctccttgctgggggcccgggggcttcccagcccctcagataccaccagcgtctaccatagccctgggcgcaacgtgctgggcaccgagagcagagatggccctggctgggcccagtggctgctgcccccagtggtctggctgctcaatgggctgttggtgctcgtctccttggtgcttctctttgtctacggtgagccagtcacacggccccactcaggccccgccgtgtacttctggaggcatcgcaagcaggctgacctggacctggcccggggagactttgcccaggctgcccagcagctgtggctggccctgcgggcactgggccggcccctgcccacctcccacctggacctggcttgtagcctcctctggaacctcatccgtcacctgctgcagcgtctctgggtgggccgctggctggcaggccgggcagggggcctgcagcaggactgtgctctgcgagtggatgctagcgccagcgcccgagacgcagccctggtctaccataagctgcaccagctgcacaccatggggaagcacacaggcgggcacctcactgccaccaacctggcgctgagtgccctgaacctggcagagtgtgcaggggatgccgtgtctgtggcgacgctggccgagatctatgtggcggctgcattgagagtgaagaccagtctcccacgggccttgcattttctgacacgcttcttcctgagcagtgcccgccaggcctgcctggcacagagtggctcagtgcctcctgccatgcagtggctctgccaccccgtgggccaccgtttcttcgtggatggggactggtccgtgctcagtaccccatgggagagcctgtacagcttggccgggaacccagtggaccccctggcccaggtgactcagctattccgggaacatctcttagagcgagcactgaactgtgtgacccagcccaaccccagccctgggtcagctgatggggacaaggaattctcggatgccctcgggtacctgcagctgctgaacagctgttctgatgctgcgggggctcctgcctacagcttctccatcagttccagcatggccaccaccaccggcgtagacccggtggccaagtggtgggcctctctgacagctgtggtgatccactggctgcggcgggatgaggaggcggctgagcggctgtgcccgctggtggagcacctgccccgggtgctgcaggagtctgagagacccctgcccagggcagctctgcactccttcaaggctgcccgggccctgctgggctgtgccaaggcagagtctggtccagccagcctgaccatctgtgagaaggccagtgggtacctgcaggacagcctggctaccacaccagccagcagctccattgacaaggccgtgcagctgttcctgtgtgacctgcttcttgtggtgcgcaccagcctgtggcggcagcagcagcccccggccccggccccagcagcccagggcaccagcagcaggccccaggcttccgcccttgagctgcgtggcttccaacgggacctgagcagcctgaggcggctggcacagagcttccggcccgccatgcggagggtgttcctacatgaggccacggcccggctgatggcgggggccagccccacacggacacaccagctcctcgaccgcagtctgaggcggcgggcaggccccggtggcaaaggaggcgcggtggcggagctggagccgcggcccacgcggcgggagcacgcggaggccttgctgctggcctcctgctacctgccccccggcttcctgtcggcgcccgggcagcgcgtgggcatgctggctgaggcggcgcgcacactcgagaagcttggcgatcgccggctgctgcacgactgtcagcagatgctcatgcgcctgggcggtgggaccactgtcacttccagctagaccccgtgtccccggcctcagcacccctgtctctagccactttggtcccgtgcagcttctgtcctgcgtcgaagctttgaaggccgaaggcagtgcaagagactctggcctccacagttcgacctgcggctgctgtgtgccttcgcggtggaaggcccgaggggcgcgatcttgaccctaagaccggcggccatgatggtgctgacctctggtggccgatcggggcactgcaggggccgagccattttggggggcccccctccttgctctgcaggcaccttagtggcttttttcctcctgtgtacagggaagagaggggtacatttccctgtgctgacggaagccaacttggctttcccggactgcaagcagggctctgccccagaggcctctctctccgtcgtgggagagagacgtgtacatagtgtaggtcagcgtgcttagcctcctgacctgaggctcctgtgctactttgccttttgcaaactttattttcatagattgagaagttttgtacagagaattaaaaatgaaattatttataatctgggttttgtgtcttcagctgatggatgtgctgactagtgagagtgcttgggccctcccccagcacctagggaaaggcttcccctccccctccggccacaaggtacacaacttttaacttagctcttcccgatgtttgtttgttagtgggaggagtggggagggctggctgtatggcctccagcctacctgttccccctgctcccagggcacatggttgggctgtgtcaacccttagggcctccatggggtcagttgtcccttctcacctcccagctctgtccccatcaggtccctgggtggcacgggaggatggactgacttccaggacctgttgtgtgacaggagctacagcttgggtctccctgcaagaagtctggcacgtctcacctcccccatcccggcccctggtcatctcacagcaaagaagcctcctccctcccgacctgccgccacactggagagggggcacaggggcgggggaggtttcctgttctgtgaaaggccgactccctgactccattcatgcccccccccccagcccctcccttcattcccattccccaacctaaagcctggcccggctcccagctgaatctggtcggaatccacgggctgcagattttccaaaacaatcgttgtatctttattgacttttttttttttttttttctgaatgcaatgactgttttttactcttaaggaaaataaacatcttttagaaacaaaaaaaaaaaa

SEQ ID NO: 691 - DNA, 2665 bp, Homo Sapiens
  NM_001005332
gccaaacaaaagaggacagcacttccggtcacgccatcgttgctgccttcttcgtcaagcccccaggctccgctcttgccagagggacaggagccatggctcagaaaatggactgtggtgcgggcctcctcggcttccaggctgaggcctccgtagaagacagcgccttgcttatgcagaccttgatggaggccatccagatctcagaggctccacctactaaccaggccaccgcagctgctagtccccagagttcacagcccccaactgccaatgagatggctgacattcaggtttcagcagctgccgctaggcctaagtcagcctttaaagtccagaatgccaccacaaaaggcccaaatggtgtctatgatttctctcaggctcataatgccaaggatgtgcccaacacgcagcccaaggcagcctttaagtcccaaaatgctaccccaaagggtccaaatgctgcctatgatttttcccaggcagcaaccactggtgagttagctgctaacaagtctgagatggccttcaaggcccagaatgccactactaaagtgggcccaaatgccacctacaatttctctcagtctctcaatgccaatgacctggccaacagcaggcctaagacccctttcaaggcttggaatgataccactaaggccccaacagctgatacccagacccagaatgtaaatcaggccaaaatggccacttcccaggctgacatagagaccgacccaggtatctctgaacctgacggtgcaactgcacagacatcagcagatggttcccaggctcagaatctggagtcccggacaataattcggggcaagaggacccgcaagattaataacttgaatgttgaagagaacagcagtggggatcagaggcgggccccactggctgcagggacctggaggtctgcaccagttccagtgaccactcagaacccacctggcgcaccccccaatgtgctctggcagacgccattggcttggcagaacccctcaggctggcaaaaccagacagccaggcagaccccaccagcacgtcagagccctccagctaggcagaccccaccagcctggcagaacccagtcgcttggcagaacccagtgatttggccaaacccagtaatctggcagaacccagtgatctggccaaaccccattgtctggcccggccctgttgtctggccgaatccactggcctggcagaatccacctggatggcagactccacctggatggcagaccccaccgggctggcagggtcctccagactggcaaggtcctcctgactggccgctaccacccgactggccactgccacctgattggccacttcccactgactggccactaccacctgactggatccccgctgattggccaattccacctgactggcagaacctgcgcccctcgcctaacctgcgcccttctcccaactcgcgtgcctcacagaacccaggtgctgcacagccccgagatgtggcccttcttcaggaaagagcaaataagttggtcaagtacttgatgcttaaggactacacaaaggtgcccatcaagcgctcagaaatgctgagagatatcatccgtgaatacactgatgtttatccagaaatcattgaacgtgcatgctttgtcctagagaagaaatttgggattcaactgaaagaaattgacaaagaagaacacctgtatattctcatcagtacccccgagtccctggctggcatactgggaacgaccaaagacacacccaagctcggtctcctcttggtgattctgggtgtcatcttcatgaatggcaaccgtgccagtgaggctgtcctctgggaggcactacgcaagatgggactgcgtcctggggtgagacatcccctccttggagatctaaggaaacttctcacctatgagtttgtaaagcagaaatacctggactacagacgagtgcccaacagcaaccccccggagtatgagttcctctggggcctccgttcctaccatgagactagcaagatgaaagtgctgagattcattgcagaggttcagaaaagagaccctcgtgactggactgcacagttcatggaggctgcagatgaggccttggatgctctggatgctgctgcagctgaggccgaagcccgggctgaagcaagaacccgcatgggaattggagatgaggctgtgtctgggccctggagctgggatgacattgagtttgagctgctgacctgggatgaggaaggagattttggagatccctggtccagaattccatttaccttctgggccagataccaccagaatgcccgctccagattccctcagacctttgccggtcccattattggtcctggtggtacagccagtgccaacttcgctgccaactttggtgccattggtttcttctgggttgagtgagatgttggatattgctatcaatcgcagtagtctttcccctgtgtgaggctgaagcctcagattccttctaaacacagctatctagagagccacatcctgttgactgaaagtggcatgcaagataaatttatttgctgttccttgtctactgctttttttccccttgtgtgctgtcaagttttggtatcagaaataaacattgaaattgcaaagtgaaaaaaaaaaaaaaaaaa

SEQ ID NO: 692 - DNA, 1113 bp, Homo Sapiens
  NM_001005354
tttgttgtctaatcatcagtcgagcggccacataattaccaattaggcagtagcagaggcgggtgccgaagcacggggtctgggtgactaggaagagccgagactgcgaaggagaacgcagcaagcccaggcggcggtggaaaggctggaggacacacctaaacatgtggaatcccaatgccggtgggccccctcatcctgtgccacagccagggtatccaggatgccaaccgttgggtccctaccctcctccatacccaccgcctgcccctggaatccctcctgtgaatcccttggctcctggcatggttggaccagcagtgatagtagacaagaagatgcagaagaaaatgaagaaagctcataaaaagatgcacaagcaccaaaagcaccacaagtaccacaagcatggcaagcattcctcctcttcctcctcctcttccagcagtgattctgactgaatacaggccctggacccttccctcaagtctcaccagttctgctctcccatcaagcttcagatgccatgttgtactgggggaatgtagcccttgtgctccccaccccctacctccacctgagcctcaccctgctgttgagccctgagtggctaggggaaatgggaagaggattgccatggcctggccatcttgttgctgcttggttagatcatatagctaatgaattaggcaggggagctattttttgaagatgatgaactaaatgttgaagacaagtttgagatctgtaaaatgtgattttttacttccacttataatacttgtgattggggaggtttgtggaaattcaattatgatgaaaaacctatcttttttgtaatgttggcatacttggggaatttagtggcaaatacattccccagcaggccttttgttggttgcactaactgcaaggttgctgggaagtagagtccatttggttgatgagctttgactgcggttttggaaccttacctctcctccttagcccaatatgctgtcttgggtcctattcaaataaagttatttctcctggtctcagctcaaaaaaaaaaaaaaaaaaaaaaaaaaaaaaaaaaaaaaaaaaaaaaaaaaaaaaaaaaaaaaaaaaaaa

SEQ ID NO: 693 - DNA, 3684 bp, Homo Sapiens
  NM_001005361
gaggtcgctcgggtcgggtgtcgcctgagaaccggatgaggcggcgaccgtgaggccgagccgggagcgggcgtcttgccgaggcccgggcgggcggggagcaacggctacagacgccgcggggccaggtcgttgagggtcggcggcgggcgaggagcgcagggcgctcgggccgggggccgccggcgccatgggcaaccgcgggatggaagagctgatcccgctggtcaacaaactgcaggacgccttcagctccatcggccagagctgccacctggacctgccgcagatcgctgtagtgggcggccagagcgccggcaagagctcggtgctggagaacttcgtgggccgggacttccttccccgcggttcaggaatcgtcacccggcggcctctcattctgcagctcatcttctcaaaaacagaacatgccgagtttttgcactgcaagtccaaaaagtttacagactttgatgaagtccggcaggagattgaagcagagaccgacagggtcacggggaccaacaaaggcatctccccagtgcccatcaaccttcgagtctactcgccacacgtgttgaacttgaccctcatcgacctcccgggtatcaccaaggtgcctgtgggcgaccagcctccagacatcgagtaccagatcaaggacatgatcctgcagttcatcagccgggagagcagcctcattctggctgtcacgcccgccaacatggacctggccaactccgacgccctcaagctggccaaggaagtcgatccccaaggcctacggaccatcggtgtcatcaccaagcttgacctgatggacgagggcaccgacgccagggacgtcttggagaacaagttgctcccgttgagaagaggctacattggcgtggtgaaccgcagccagaaggatattgagggcaagaaggacatccgtgcagcactggcagctgagaggaagttcttcctctcccacccggcctaccggcacatggccgaccgcatgggcacgccacatctgcagaagacgctgaatcagcaactgaccaaccacatccgggagtcgctgccggccctacgtagcaaactacagagccagctgctgtccctggagaaggaggtggaggagtacaagaactttcggcccgacgaccccacccgcaaaaccaaagccctgctgcagatggtccagcagtttggggtggattttgagaagaggatcgagggctcaggagatcaggtggacactctggagctctccgggggcgcccgaatcaatcgcatcttccacgagcggttcccatttgagctggtgaagatggagtttgacgagaaggacttacgacgggagatcagctatgccattaagaacatccatggagtcaggacggggctcttcacccccgacatggcctttgaagccattgtgaaaaaacagattgtaaaactcaaagagccgagtttgaagtgtgttgatctcgtggtctcagagctggccacggtcataaaaaagtgtgccgagaagctcagttcctacccccggttgcgagaggagacagagcgaatcgtcaccacttacatccgggaacgggaggggagaacgaaggaccagattcttctgctgatcgacattgagcagtcctacatcaacacgaaccatgaggacttcatcgggtttgccaatgcccagcagaggagcacgcagctgaacaagaagagagccatccccaatcagggggagatcctggtgatccgcaggggctggctgaccatcaacaacatcagcctgatgaaaggcggctccaaggagtactggtttgtgctgactgccgagtcactgtcctggtacaaggatgaggaggagaaagagaagaagtacatgctgcctctggacaacctcaagatccgtgatgtggagaagggcttcatgtccaacaagcacgtcttcgccatcttcaacacggagcagagaaacgtctacaaggacctgcggcagatcgagctggcctgtgactcccaggaagacgtggacagctggaaggcctcgttcctccgagctggcgtctaccccgagaaggaccaggcagaaaacgaggatggggcccaggagaacaccttctccatggacccccaactggagcggcaggtggagaccattcgcaacctggtggactcatacgtggccatcatcaacaagtccatccgcgacctcatgccaaagaccatcatgcacctcatgatcaacaatacgaaggccttcatccaccacgagctgctggcctacctatactcctcggcagaccagagcagcctcatggaggagtcggctgaccaggcacagcggcgggacgacatgctgcgcatgtaccatgccctcaaggaggcgctcaacatcatcggtgacatcagcaccagcactgtgtccacgcctgtacccccgcctgtcgatgacacctggctccagagcgccagcagccacagccccactccacagcgccgaccggtgtccagcatacacccccctggccggcccccagcagtgaggggccccactccagggccccccctgattcctgttcccgtgggggcagcagcctccttctcggcgcccccaatcccatcccggcctggaccccagagcgtgtttgccaacagtgacctcttcccagccccgcctcagatcccatctcggccagttcggatccccccagggattcccccaggagtgcccagcagaagaccccctgctgcgcccagccggcccaccattatccgcccagccgagccatccctgctcgactaggcctcgaggggggcgtgctctcgggggggcctcacgcacccgcggcgcaggagcttcagtggtctggggccctccgccgcccctatgctgggaccaggctcccagtgggcagccctggcctcttccttaacgctggccccggtccagggccggcccctgtgcctggctggacaccgcactgcgcaaaggggccctggagctccaggcagggggcgctggggtgttgcactttgggggatggagtctcagggtggcagaggggggaccagaacccttgacaccatcctgaatgaggggtccagcctgggggggactctaccaaggtcttcttgggctgggaaagcccatgtagggcaggccttctataagtgcgggcaccaagggcgcctacatccccaggccttgctggggtgcaggggtatatcaacttcccattagcaggagctccccagcggcaagcctggcccagtgggctcggtagtgcccagctggcaggcctgaggtgtacatagtccttcccggccatattaaccacacagcctgagcctggcccagcctcggctgccagaggtgcctttgctaggcccggagccgttggcccgggccggccttgccctattcctctcctcctcctcctcctgggtcccccagggtggctgggcttgggctatgtgggtggtggtggcggggggtcttgggggcctctcagctcccgcccatgcctccctgatgggtgggcccagggcggcctctctctgaggagacctcacccactcctcgctcagtttgaccactgtaagtgcctgcactctgtattctattaataaactaaaataaagggaagacgctgctggtggctgctgaaaaaaaaaaaaaaaaaa

SEQ ID NO: 694 - DNA, 1219 bp, Homo Sapiens
  NM_001005368
gcggccgccaaggaaatgagcaggcctggccggcccgggccccgagggaggccagccgcgagcggagaggtcggcggtccgcagagcagggtcccgtggaccggagagcgggatgccgaggtgctcaggaacagcccatggaagaatcatatgaagaggtggtgactgaggtcgtaagcaggagtggacatgtttggatttccaacagctaccctgctggactgtcatggaagatatgcccagaatgtagcgttcttcaatgtgatgactgaagcccaccacaaatatgaccactctgaggctacaggatcctcaagctgggatatccaaaattctttcagaagagagaagctggaacaaaaatccccagattcgaagacactacaggaagattcacctggagtgagacaaagggtctatgagtgccaggagtgtggaaaatccttccggcaaaaaggtagtctaacgttacatgagagaatccacactggtcaaaagccttttgagtgcacccactgtggaaaaagcttcagggccaaaggcaatcttgttacacatcaacggatacacacgggagagaagccttatcagtgcaaggagtgtgggaaaagcttcagtcaacgaggtagtctcgctgtccacgagagactccacactggacagaaaccctacgagtgtgctatttgtcagagaagcttcaggaatcagagtaaccttgctgttcacaggagagttcacagtggtgagaagccctatagatgtgatcagtgtggaaaagccttcagtcagaaaggaagcttaattgttcacatcagagtccacacaggcctgaagccctatgcctgtacccagtgcaggaagagtttccacaccagggggaattgtattctgcatggcaaaatccacacaggagagacaccctatctgtgcggccagtgtggaaaaagcttcacccagagagggagtctggctgtgcaccagcgaagctgctcacagaggctcaccctttgaccactttcctgaagagaagttctctttatgaattaagagtacaaaatcctctgagatgaagcaacctatccagttctatggaatgaatggagaatctttcagaaagaccatcattgggtagggcaaactgatttttttcctttcccccaaaagagtatgaaaaataaatgtcttgtttattatcattatcaaaaaaaaaaaaaaaaaa

SEQ ID NO: 695 - DNA, 2965 bp, Homo Sapiens
  NM_001005369
cggggctgtaggtaggagttaagtgggtaggatcccttaaccagggttgtccggtgcaggtggtgtgtgttgtttcgcctaacgtgtcagtggcacaaatcacgcgaacttcataaacattgtgcgttcggaagcctttccaagatgcatttaatccctgcgtgagcccacgttaggcattcacgaaggcatgtgcactgttctctcggaagcggctggccggcttcccctcctcgcgcgcggctgtgggtgcaggtcctcacttcccagcctcccatgggcccaaggccttctgggctccaatttgaggcgagccaccccagatccgtaatttttctgcagtgatttatttttacctttctgattccttgacaaggatatcctagcggcgaaacaacaccgtactgggagtcagaacgtctgggttctagtcttgactgccattaactagcggtatgacattggagaagcttttttgacccttctggatttccgtttccttttctgtaaaatgaggagcttggaagatccggaaaatgaggcccataggaaacaagtgacttgctgagtccagataacactgactgtcagaagtctcgctctgtctccccggctggagtgcagtggcgtgatcttggctcactgcaacctctgtctcccgggttcaagaaattctcctgcctcagcctcccaagtagctgggactacaggcatgtgccaccacgcccaggagaaacatgaaccagaagctactgaagttggagaacttgctacgatttcacactatttataggcaactgcacagtctgtgtcaaagaagagcattaagacagtggaggcatgggttttcatctgcttaccctgtgtggacagctcaactgtgtgcctggccctggccaacagatgtgctcactggggctgctttatctcagtataggcttctagtaacaaaaaaggaagaaggaccatggaaatctcagttatcttcaacaaaatctaaaaaggtggtagaagtatggattggaatgactattgaggaactggccagggcaatggaaaaaaacacagattatgtatatgaagctttattgaacactgatattgacatagattcactggaagcagactcacatttagatgaagtctggatcaaagaagtgataacgaaggcagggatgaagttaaagtggagtaaattaaaacaggacaaagtcagaaaaaataaagatgctgtaagaaggccccaggcagatccagctttattaaccccaaggtccccagttgttactataatgggccatgttgatcacgggaaaacgacattacttgacaaatttcgaaaaactcaagtggcagcagtggaaactggaggcatcactcagcacattggtgcctttcttgtctctctgccttctggggaaaagataacttttcttgatactccaggacatgctgctttctcagcaatgagagccagaggtgctcaggtcactgacattgtcgtattggttgtagctgcagatgatggagtgatgaaacaaactgtagaatctattcagcatgccaaagatgcacaggttcctattatccttgccgtaaataaatgtgacaaagctgaggctgatcctgagaaagtgaaaaaagagctgctggcttacgatgtggtatgtgaagattatggaggtgatgttcaagcagtgcctgtctccgcacttacgggcgataatctgatggctttggcagaagcaacagttgctcttgcagaaatgttagaattgaaagcagatcccaatggtccagtggaaggaacagtaatagagtctttcacagacaaaggaagaggtcttgttactacagctataattcaaagaggaactttaagaaaaggctctgttctggttgctggaaaatgttgggcaaaagtacgcttaatgtttgatgaaaatggaaaaacaattgatgaggcctatcccagcatgccagtgggaattacaggctggagagaccttccttctgcaggagaagaaattcttgaagtagaatctgagccaagggcacgtgaagttgttgactggaggaaatatgaacaagaacaggagaaaggtcaggaggatctgaaaataatagaagaaaagcgaaaggaacacaaagaagcacatcagaaagcccgtgagaagtatggccatctactgtggaagaagagatcaattctacggtttttagaaagaaaagaacaaatacccttaaagccaaaagagaaaagggaaagagattcaaatgtactttctgtgattattaaaggtgatgttgatggttctgttgaggccattttgaacattatagatacctatgatgcttcacacgagtgtgaactagaattagtacattttggagtgggtgatgtaagtgcaaatgatgttaaccttgctgaaacatttgatggtgttatatatggctttaatgtgaatgcaggcaatgttatccaacagtcagctgcaaaaaaaggagtaaaaattaaacttcacaaaataatttaccgtcttgttgaagatttgcaagaggaactgagcagcagattaccctgtgctgtggaagagcacccagtaggtgaggcatctatactagctaccttctctgtaacagaagggaagaaaaaagttcctgtggctggctgcagagtccaaaagggacagttagaaaaacaaaaaaaatttaaactaacccgtaatggacatgtaatttggaagggctcattaacctcattgaaacaccataaagatgacatttcaattgtcaaaacgggaatggattgtggtctcagtttagatgaagacaatatggaatttcaagtgggagacagaattgtttgttatgaagaaaagcaaattcaagccaagacttcttgggatccaggattttaaaattacattaaaaatgtaaataactcaaaaaaaaaaaaaaaaaa

SEQ ID NO: 696 - DNA, 3944 bp, Homo Sapiens
  NM_001005386
gagctcaccgctgccagtcgcgctgcctgcccgtcccacccttttcgtgcaggcattcagctaaatgacgggcggagcccggcggcggcttccggtcgggggaaaaaagttgggccgaaggaggggccgggaagacgcaagaggaagaagagaaaacggccgggcggcggtggctgtaggttgtgcggctgcagcggctcttccctgggcggacgatggacagccagggcaggaaggtggtggtgtgcgacaacggcaccgggtttgtgaagtgtggatatgcaggctctaactttccagaacacatcttcccagctttggttggaagacctattatcagatcaaccaccaaagtgggaaacattgaaatcaagaataacaaaaagatggatcttatggttggtgatgaggcaagtgaattacgatcaatgttagaagttaactaccctatggaaaatggcatagtacgaaattgggatgacatgaaacacctgtgggactacacatttggaccagagaaacttaatatagataccagaaattgtaaaatcttactcacagaacctcctatgaacccaaccaaaaacagagagaagattgtagaggtaatgtttgaaacttaccagttttccggtgtatatgtagccatccaggcagttctgactttgtacgctcaaggtttattgactggtgtagtggtagactctggagatggtgtgactcacatttgcccagtatatgaaggcttttctctccctcatcttaccaggagactggatattgctgggagggatataactagatatcttatcaagctacttctgttgcgaggatacgccttcaaccactctgctgattttgaaacggttcgcatgattaaagaaaaactgtgttacgtgggatataatattgagcaagagcagaaactggccttagaaaccacagtattagttgaatcttatacactcccagatggacgtatcatcaaagttgggggagagagatttgaagcaccagaagctttatttcagcctcacttgatcaatgttgaaggagttggtgttgctgaattgctttttaacacaattcaggcagctgacattgataccagatctgaattctacaaacacattgtgctttctggagggtctactatgtatcctggcctgccatcacggttggaacgagaacttaaacagctttacttagaacgagttttgaagggtgatgtggaaaaactttctaaatttaagatccgcattgaagacccaccccgcagaaagcacatggtattcctgggtggtgcagttctagcggatatcatgaaagacaaagacaacttttggatgacccgacaagagtaccaagaaaagggtgtccgtgtgctagagaaacttggtgtgactgttcgataaactccaaagcttgttcccgtcatacccgtaatgctttcttttttcctttattgccaatctttgaactcattcaactccaggacatggaagaggcctctctctgccctttgactggaaaggtcaagttttattctggtgtcttggggaagctttgttaaatttttgttaatgtgggtaaatctgagtttaattcaactgcttccctacatagactagagggctaaggattctgtctgctgctttgtttcttctaagtaggcatttagatcattcctataggcttcctattttcactttactgctctaatgctgctagtcgtagtctttagcacactaggtggtatgcctttattagcataaaacaaaaaaaactttaacaggagcttttacatattactgggatggggggtggttcgggatgggtgggcagctgctgaaccctttagggcatttcctctgtaatgtggcgctttcaactgtactgctgcagctttaagtaccttaaagcttctcctgtgaacttcttagggaaatgttaggttcagaactaaagtgttttgggtgggttttgttgcgggggggagggtaacaatgggtggtcttctgatttttatttttgaggttttgtcaactggagtacgtagaggaactttatttacagtactttgatttggcaggttttcttctacttgtgctctgcctggagctgtttccatatgatataaaaagcaagtgtagtattccattactatgtggcttagggatttatttgttttttaaaatcaaccatgttagctgggattagactccctacagtccttcaatggaaaagtaacatttaaaaatcctttgggtaattcgaattacagatttaaaagagcttaagatctggtgttttgttaatgcttctgtttattccagaagcattaaggtaacccattgccaagtatcattcttgcaaattattcttttatataactgaccagtgcttaataaaacaagcaggtacttacaaataattactggcagtaggttataattggtggtttaaaaataacattggaatacaggacttgttgccaattgggtaattttcattagttgttttgtttgttttgatttgaaacctggaaatacagtaaaatttgactgtttaaaatgttggccaaaaaaatcaagatttaatttttttatttgtactgaaaaactaatcataactgttaattctcagccatctttgaagcttgaaagaagagtctttggtattttgtaaacgttagcagactttcctgccagtgtcagaaaatcctatttatgaatcctgtcggtattccttggtatctgaaaaaaataccaaatagtaccatacatgagttatttctaagtttgaaaaataaaaagaaattgcatcacactaattacaaaatacaagttctggaaaaaatatttttcttcattttaaaacttttttttaactaataatagctttgaaagaagaggcttaatttgggggtggtaactaaaatcaaaagaaatgattgacttgagggtctctgtttggtaagaatacatcattagcttaaataagcagcagaaggttagttttaattatgtagcttctgttaatattaagtgttttttgtctgttttacctcaatttgaacagataagtttgcctgcatgctggacatgcctcagaaccctgaatagcccgtactagatcttgggaacatggatcttagagtcactttggaataagttcttatataaatacccccagccttttgagaacggggcttgttaaaggacgcgtatgtagggcccgtacctactggcagttgggttcagggaaatgggattgacttggccttcaggctcctttggtcataattttaaaatatgggagtagaaaacaacaaagaatggaatggactcttaaaacaatgaaagagcatttatcgtttgtcccttgaatgtagaatttgtttttgatttcataattctgctggtaaatgtgacagttaaaatggtgcattatgtatatatattataatttagaaataccattttataattttactattccagggtgacataatgcatttaaatttgggatttgggtggagtattatgtttaactggagttgtcaagtatgagtccctcaggaaaaaaaaaaaattctgttttaaaaagcaatctgattcttagctcttgaaactattgctacttaaatttccaataattaaaaatttaaaatttttaaattagaattgccaatacttctacatttgagaagggtttttttagaaatacatttagtaaagtccccaagacattagtcttacatttaaacttttttctttaaaacatggttttggtggttaacttttacacagttctgagtactgttaatatctggaaagtatcttgagatatcagtggaaagctaaacagtctaaattaacatgaaatacttcattttgattgagaaaataaaatcagattttttcaaagtcaaaaaaaaaaaa

SEQ ID NO: 697 - DNA, 4941 bp, Homo Sapiens
  NM_001005409
accttcgcggccgcaactcgctcggccgccgccatcttgcgagctcgtcgtactgaccgagcggggaggctgtcttgaggcggcaccgctcaccgacaccgaggcggactggcagccctgagcgtcgcagtcatgccggccggacccgtgcaggcggtgcccccgccgccgcccgtgcccacggagcccaaacagcccacagaagaagaagcatcttcaaaggaggattctgcaccttctaagccagttgtggggattatttaccctcctccagaggtcagaaatattgttgacaagactgccagctttgtggccagaaacgggcctgaatttgaagctaggatccgacagaacgagatcaacaaccccaagttcaactttctgaaccccaatgacccttaccatgcctactaccgccacaaggtcagcgagttcaaggaagggaaggctcagtttgtggccaggaatgggcgccagtttctgacccagctgatgcagaaagagcagcgcaactaccagtttgactttctccgcccacagcacagcctcttcaactacttcacgaagctagtggaacagtacaccaagatcttgattccacccaaaggtttattttcaaagctcaagaaagaggctgaaaacccccgagaagttttggatcaggtgtgttaccgagtggaatgggccaaattccaggaacgtgagaggaagaaggaagaagaggagaaggagaaggagcgggtggcctatgctcagatcgactggcatgattttgtggtggtggaaacagtggacttccaacccaatgagcaagggaacttccctccccccaccacgccagaggagctgggggcccgaatcctcattcaggagcgctatgaaaagtttggggagagtgaggaagttgagatggaggtcgagtctgatgaggaggatgacaaacaggagaaggcggaggagcctccttcccagctggaccaggacacccaagtacaagatatggatgagggttcagatgatgaagaagaagggcagaaagtgcccccacccccagagacacccatgcctccacctctgcccccaactccagaccaagtcattgtccgcaaggattatgatcccaaagcctccaagcccttgcctccagcccctgctccagatgagtatcttgtgtcccccattactggggagaagatccccgccagcaaaatgcaggaacacatgcgcattggacttcttgaccctcgctggctggagcagcgggatcgctccatccgtgagaagcagagcgatgatgaggtgtacgcaccaggtctggatattgagagcagcttgaagcagttggctgagcggcgtactgacatcttcggtgtagaggaaacagccattggtaagaagatcggtgaggaggagatccagaagccagaggaaaaggtgacctgggatggccactcaggcagcatggcccggacccagcaggctgcccaggccaacatcaccctccaggagcagattgaggccattcacaaggccaaaggcctggtgccagaggatgacactaaagagaagattggccccagcaagcccaatgaaatccctcaacagccaccgccaccatcttcagccaccaacatccccagctcggctccacccatcacttcagtgccccgaccacccacaatgccacctccagttcgtactacagttgtctccgcagtacccgtcatgccccggcccccaatggcatctgtggtccggctgcccccaggctcagtgatcgcccccatgccgcccatcatccacgcgcccagaatcaacgtggtgcccatgcctccctcggcccctcctattatggccccccgcccaccccccatgattgtgccaacagcctttgtgcctgctccacctgtggcacctgtcccagctccagccccaatgccccctgtgcatcccccacctcccatggaagatgagcccacctccaaaaaactgaagacagaggacagcctcatgccagaggaggagttcctgcgcagaaacaagggtccagtgtccatcaaagtccaggtgcccaacatgcaggataagacggaatggaaactgaatgggcaggtgctggtcttcaccctcccactcacggaccaggtctctgtcattaaggtgaagattcatgaagccacaggcatgcctgcagggaaacagaagctacagtatgagggtatcttcatcaaagattccaactcactggcttactacaacatggccaatggcgcagtcatccacctggccctcaaggagagaggcgggaggaagaagtagacaagaggaacctgctgtcaagtccctgccattttgcctctcctgtctcccaccccctgccccagacccaggagcccccctgaggctttgccttgcctgcatatttgtttcgctcttactcagtttgggaattcaaattgtcctgcagaggttcattcccctgaccctttccccacattggtaagagtagctgggttttctaagccactctctggaatctctttgtgttagggtctcgatttgaggacattcatttcttcagcagcccattagcaactgagagcccagggatgtcctacaggatagtttcatagtgacaggtggcacttggctaatagaatatggctgatattgtcattaatcattttgtaccttgacatgggttgtctaataaaactcggacccttcttgtgaaatcagttaaataagacttgtctcggtcacctgtgccctgtccagactcgaggcagtggtaacactgcacagtgctatgtggcttctctttgaggatttttgggttttgtaactaaattcttgctgccctcatactttttatgtattagaatcatattcgtattgcccttttaaaacattgggatcctccaaaggcctgccccatgtatttaacagtaatacaggaagcatggcaggcaccatgcaaaccaaggatggatggtgcagtccctgtgtcagtgggcggtggtttcctgctggcctggaatcactcatcacctgattgattggctctgtggtcctgggcaggtgcctcataggtgtgtggatatgatgacgtttctttaaaatgtatgtatttaacaaatacttaattgtattaaggtcatgtaccaaggatttgataaagtttaaataatttactctctacttttatccattttatccattttaactcatgtaatcctcatgtgagtattcctgtttaacacttgagtaaactgaggcacagagaacataagttgcatgccatagtcacacactgtgaaagtgaaaagagaatgtgtgcaaaacacgtcacagtcctggtttctgagtaaaggcaggctgttatctttagaatcaagctatcacagggagataggcaatgctgtgggtgttggaggaaggtgagagcctgttgctaacaatttcctggttttaaagctaaggctgattttattgggaagatctcacatgtgtgtggcccctgagagttcccagtgccttttatttgcagtccttccatttggacctcctagctgccccatcaggtcatctccagggctcagaggggtgagaccatttcccaaggtcacagaaccagctctctagtcaccaccctgcctctccctctcacccagagtcagtaccagttttatggctttattacaaactgctgggtccctcccattttcaacttgattgatgggatgtcatcccttatcctgtctgacatttgcctctggcctggttgctagaagtttgccccaggggcaagagttgaaatttggcttcctgaggtgggctttgtggtttgcgtccctaaagtgagcccactactggttgcttgtccatggccaacaccagaaatcccctgagcactacctgggtctcattccaagaaggaagagggtcaggagacctggggagtctcatattccaagttcttctttctttctgggagcagtgggcagttcatggtgttagggcactcacccccacagactggcaaaccctgcaggacttccgtggctgaggctgtgaccggaggccaggaatgccgttgggtggattgtgagtgaatgggccctttgagctgccctctagagagcaaatccagtttcctggagctcctgaatgaatatctgtactggctcgctcagatgcagaagctccattgaccatgaggccttgtgaacatcagtggccacaggcccagtgtgctgcttggcactgcactagtttaggacctgcagcatgtaggtagcgtcctagtgtttataatacaaagctgctctgcacagcttttctgattcttcttgcaatctcctgaggattatctgccccatttttaaaacgaggtggaatacccaaggtcatgtagccagtgagtgctctggaaagccaaagcagctcatcccttcctggggaccacactgctctgctccaccagaccacactatgaaataggaataagtgctcctgttgcaggactgctgggaaaacaggtggtgtgggacttaagtcaccataattttgaagacttgcatgcagagggctccaggaattgtagacattaaggaatttcactttcagttctacccactacttaagtacttgtcatgtactcttagaggaggccagtaatgatcagaaccattttactttaaaattaataatattgtattagagaatatattaaatggttatattgggttatgttaggatatatacttgaatggaaatacatgtactattagcaatcatatttcatttatccctgtaattagacaagaaagcataatatagctctactcatgggtacacataccagtgtataagatttttagaagtttactttttaaaaataaaagcaaaatgtaagatcttaaaaaaaaaaaaaaaaaa

SEQ ID NO: 698 - DNA, 1546 bp, Homo Sapiens
  NM_001005413
gattgtgggaaggcagctgaactcggcgcctggaaagatggaggcagcggagacagaggcggaagctgcagccctagaggtcctggctgaggtggcaggcatcttggaacctgtaggcctgcaggaggaggcagaactgccagccaagatcctggttgagtttgtggtggactctcagaagaaagacaagctgctctgcagccagcttcaggtagcggatttcctgcagaacatcctggctcaggaggacactgctaagggtctcgaccccttggcttctgaagacacgagccgacagaaggcaattgcagctaaggaacaatggaaagagctgaaggccacctacagggagcacgtagaggccatcaaaattggcctcaccaaggccctgactcagatggaggaagcccagaggaaacggacacaactccgggaagcctttgagcagctccaggccaagaaacaaatggccatggagaaacgcagagcagtccagaaccagtggcagctacaacaggagaagcatctgcagcatctggcggaggtttctgcagagggtaagctgttgttccctgaggctgaggctgaggcagagaatcttccagatgataaaccccagcagccgactcgaccccaggagcagagtacaggagacaccatggggagagaccctggtgtgtccttcaaggctgttggtctacaacctgctggagatgtaaatttgccatgacttcctggaggacagcagcatggagaaagatcctagaaaaggcctctgacttccctcacctcccaaccatcattacaggaaagactgtgaactcctgagttcagcttgatttctgactacatcccagcaagctctggcatctgtggattaaaatccctggatctctctcagttgtgtatttgttcatcttcatatgctggcaggaacaactattaatacagatactcagaagccaataacatgacaggagctgggactggtttgaacacagggtgtgcagatggggagggggtactggccttgggcctcctatgatgcagacatggtgaatttaattcaaggaggaggagaatgttttaggcaggtggttatatgtgggaagataattttattcatggatccaaatgtttgttgagtcctttctttgtgctaaggttcttgcggtgaaccagaattataacagtgagctcatctgactgttttaggatgtacagcctagtgttaacattcttggtatctttttgtgccttatctaaaacatttctcgatcactggtttcagatgttcatttattatattcttttcaaagattcagagattggcttttgtcatccactattgtatgttttgtttcattgacctctagtgataccttgatctttcccactttctgttttcggattggagaagatgtaccttttttgtcaactcttacttttatcagatgatcaactcacgtatttggatctttatttgttttctcaaataaatatttaaggttatacatttaaaaaaaaaaaaaaaaaaaaaaaaaaa

SEQ ID NO: 699 - DNA, 1224 bp, Homo Sapiens
  NM_001005416
ccggacgcaggtgccggccggagcggagctagtggcgccgacgggccgggccgggccgggaccggggccgaggcgaaccgaggggcctgtgcggccgcccggcccggccgcggatcaggctcctggaaccatgggcctcaggccctgaggatacggggctcccggtggccatgacgacgggtgactgctgccacctccccggctccctgtgtgactgctccggcagccctgccttctccaaggtcgtggaggctacgggcctcggaccgccccagtatgtggcacaggtgacttcaagggatggccggctcctctccaccgtcatccgtgccttggacacaccgagtgatggtcctttctgccggatctgccatgagggagcgaacggggagtgcttgctgtccccgtgtggctgcaccggcacgctgggtgccgtgcataagagctgtctggagaagtggctttcctcatctaacaccagctactgcgagctgtgccacacggagtttgcagtggagaaacggcctcgacccctcacagaggtctccttccgctaccactgccagctgtactccgagtggagaaagaccaaccagaaagttcgcctgaagatccgggaggcggacagccccgagggcccccagcattctccactggcagctggactcctgaagaaggtggcagaggagacaccagtatgaatgctgggctctccggaccctgcagcagagaggccagaggtagctggtgataccctgtcctgtggaaggacttccacttcaacacttccacttcaacagttcccgcacggcctgaacgcttcttaggccaagagacaccatgcagagcctagtctgtgatcctgtgtgaagatattttcagggtttttttttttttttttttgcatatggaggacaggtggacatggtcctgagctctggacggagcaggcaccctgatctcattctgaggtccacatggcaccttctgggccagcagctgtggccggtgtatcaagggcgcccttaaagctggaacattccagcaagcttcttgcgcttctctgcacccggcaggcccactttcctggcaccctcgactttatataaaagttgcactgcgtttcaaaaacccacccctgaatgaataaaaggagccctggctggacaaaaaaaaaaaaaaaaaaaaaaaaaaaaaaaaaaaaaaaaaaaaaaaaaaaaaaaa

SEQ ID NO: 700 - DNA, 1400 bp, Homo Sapiens
  NM_001005472
atcggtctcttctgttccgcgtcctccacctcggtagcccctggtgactctgttacagcctctgttgacctatgatctgcagggagacgcacagccaggacatcctggaacctgggaaaggggactcttgacgtttaggtatgtggccatagaattctctctggaggagtagcagtgcctggacactgcacagcagaatttatagaggaatgttatgaaaacctggccttcctgggtattactgtctctaagccagacctgatcacctatctggagcaagaaaaagagccctggaatatgaagtgacatgagatggtggatgaacccccagtaacaatgctgcagcttttccatgctacctgcagaggggtccatacggcgttgttctggattcccgtcgtaacttaaagggaaactttcacaatgtccggagcccttgatgtcctgcaaatgaaggaggaggatgtccttaagttccttgcagcaggaacccacttaggtggcaccaatcttgacttccagatggaacagtacatctataaaaggaaaagtgatggcatctatatcataaatctcaagaggacctgggagaagcttctgctggcagctcgtgctattgttgccattgaaaaccctgctgatgtcagtgttatatcctccaggaatactggccagagggctgtgctgaagtttgctgctgccactggagccactccaattgctggccgcttcactcctggaaccttcactaaccagatccaggcagccttctgggagccacggcttcttgtggttactgaccccagggctgaccaccagcctctcacggaggcatcttatgttaacctacctaccattgcgctgtgtaacacagattctcctctgcgctatgtggacattgccatcccatgcaacaacaagggagctcactcagtgggtttgatgtggtggatgctggctcgggaagttctgcgcatgcgtggcaccatttcccgtgaacacccatgggaggtcatgcctgatctgtacttctacagagatcctgaagagattgaaaaagaagagcaggctgctgctgagaaggcagtgaccaaggaggaatttcagggtgaatggactgctcccgctcctgagttcactgctactcagcctgaggttgcagactggtctgaaggtgtgcaggtgccctctgtgcctattcagcaattccctactgaagactggagcgctcagcctgccatggaagactggtctgcagctcccactgctcaggccactgaatgggtaggagcaaccactgactggtcttaagctgttcttgcataggctcttaagcagcatggaaaaatggttgatggaaaataaacatcagtttctaaaaaaaaaaaaaaaaaaaaaaa

SEQ ID NO: 701 - DNA, 3801 bp, Homo Sapiens
  NM_001005474
ctcctcttgccacgaggtcagacggcgagttcttagagaaaaaggctgcttagctgctgcttatcatgtaacctcaaaaggaaactgatcgtctttctcatgctgtcacgtacttgggttattatcgctgattacagctggaaacaattgatttgctcttacgtatttgtgtgacttgactcttcaaacacaaaggttaacaggaagatctcgagggccctggctgaacttcaccttttggctttcttggcctgatgctgaactctcgaggttgagccccatatgggggttggcaggcagcagagaggcccctttcaaggtgttcgggtaaagaactcagtgaaggaactcctgttgcacatccgaagtcataaacagaaggcttctggccaagctgtggatgattttaagacacaaggtgtgaacatagaacagttcagagaattgaagaacacagtatcatacagtgggaaaaggaaagggcccgattcgttgtctgatggacctgcttgcaaaaggccagctctgttgcattcccaatttttgacaccacctcaaacaccaacgcccggggagagcatggaagatgttcatctcaatgaacccaaacaggagagcagtgctgatctgcttcagaacattatcaacattaagaatgaatgcagccccgtttccctgaacacagttcaagttagctggctgaaccccgtggtggtccctcagagctcccccgcagagcagtgtcaggacttccatggagggcaggtcttttctccacctcagaaatgccaaccattccaagtcaggggctcccaacaaatgatagaccaggcttccctgtaccagtattctccacagaaccagcatgtagagcagcagccacactacacccacaaaccaactctggaatacagtccttttcccatacctccccagtcccccgcttatgaaccaaacctctttgatggtccagaatcacagttttgcccaaaccaaagcttagtttcccttcttggtgatcaaagggaatctgagaatattgctaatcccatgcagacttcctccagtgttcagcagcaaaatgatgctcacttgcacagcttcagcatgatgcccagcagcgcctgtgaggccatggtggggcacgagatggcctctgactcttcaaacacttcactgccattctcaaacatgggaaatccaatgaacaccacacagttagggaaatcactttttcagtggcaggtggagcaggaagaaagcaaattggcaaatatttcccaagaccagtttctttcaaaggatgcagatggtgacacgttccttcatattgctgttgcccaagggagaagggcactttcctatgttcttgcaagaaagatgaatgcacttcacatgctggatattaaagagcacaatggacagagtgcctttcaggtggcagtggctgccaatcagcatctcattgtgcaggatctggtgaacatcggggcacaggtgaacaccacagactgctggggaagaacacctctgcatgtgtgtgctgagaagggccactcccaggtgcttcaggcgattcagaagggagcagtgggaagtaatcagtttgtggatcttgaggcaactaactatgatggcctgactccccttcactgtgcagtcatagcccacaatgctgtggtccatgaactccagagaaatcaacagcctcattcacctgaagttcaggagcttttactgaagaataagagtctggttgataccattaagtgcctaattcaaatgggagcagcggtggaagcgaaggatcgcaaaagtggccgcacagccctgcatttggcagctgaagaagcaaatctggaactcattcgcctctttttggagctgcccagttgcctgtcttttgtgaatgcaaaggcttacaatggcaacactgccctccatgttgctgccagcttgcagtatcggttgacacaattagatgctgtccgcctgttgatgaggaagggagcagacccaagtactcggaacttggagaacgaacagccagtgcatttggttcccgatggccctgtgggagaacagatccgacgtatcctgaagggaaagtccattcagcagagagctccaccgtattagctccattagcttggagcctggctagcaacactcactgtcagttaggcagtcctgatgtatctgtacatagaccatttgccttatattggcaaatgtaagttgtttctatgaaacaaacatatttagttcactattatatagtgggttatattaaaagaaaagaagaaaaatatctaatttctcttggcagatttgcatatttcatacccaggtatctgggatctagacatctgaatttgatctcaatggtaacattgccttcaattaacagtagcttttgagtaggaaaggactttgatttgtggcacaaaacattattaatatagctattgacagtttcaaagcaggtaaattgtaaatgtttctttaagaaaaagcatgtgaaaggaaaaaggtaaatacagcattgaggcttcatttggccttagtccctgggagttactggcgttggacaggcttcagtcattggactagatgaaaggtgtccatggttagaatttgatctttgcaaactgtatataattgttatttttgtccttaaaaatattgtacatacttggttgttaacatggtcatatttgaaatgtataagtccataaaatagaaaagaacaagtgaattgttgctatttaaaaaaattttacaattcttactaaggagtttttattgtgtaatcactaagtctttgtagataaagcagatggggagttacggagttgttcctttactggctgaaagatatattcgaattgtaaagatgctttttctcatgcattgaaattatacattatttgtagggaattgcatgcttttttttttttttctcccgagacagggtcttgctctggcgcccaggctggagtacagtggcatgatcttggctcacttcagccttgacttgggctcaagtgatcctcctacctgagccttctgagtaactggaactacaggtgtgcactcctcgcctggctaattttttattttttgtacaggcaggatcttgccaccttgcccaggctggtcttgaactcctgagctcatgccatctgcctgccttagtctcccaaaatgctgggattacaggagtgagccaccatgcccggctggcagttgcatggaagagaacacctctttatggcttaccctctagaatttctaatttatgtgttctgttgaaatttttgtttttttacctttattgaaacaacaaaaagtcagtattgaaacatatcttcctgttttctgttgtcaaatgatgataatgtgccatgatgttttatatatatcattcagaaaaagttttattttttaataacattctattaacattattttgcttgccgctggcatgcctgaggaatgtatttggctttgattacacactaagtttttgtaataaatttgactcattaaaaaccttttttttttaaaaaaaaaaaaaaagaaaatctcattagtgaacttatctttgcagctgagtacttaaattctttttaaaaagataccctttggattgatcacattgtttgacccagtatgtcttgtagacacgttagttataatcaccttgtatctctaaatatggtgtgatatgaaccagtccattcacattggaaaaactgatggttttaaataaactaattcactaatattaaaaaaaaa

SEQ ID NO: 702 - DNA, 3453 bp, Homo Sapiens
  NM_001005498
ctgtgagtacccaggaagctgcaccgtgtggcctggagctgtctatctgtccttccagccacctgtctgtccagccacccttccacagactgaggcttgacaccggagcatctgtacagagcaaggagaagacaagaacatgctctaaagcccttcacagcaagacccaggaagccgcgggcaaactcagactcgaagccctcccgcctcctgcccacaatggcctctgctgacaagaatggcgggagcgtgtcctctgtgtccagcagccgcctgcagagccggaagccacccaacctctccatcaccatcccgccacccgagaaagagacccaggcccctggcgagcaggacagcatgctgcctgagaggaagaacccagcctacttgaagagcgtcagcctccaggagccacgcagccgatggcaggagagttcagagaagcgccctggcttccgccgccaggcctcactgtcccagagcatccgcaagggcgcagcccagtggtttggagtcagcggcgactgggaggggcagcggcagcagtggcagcgccgcagcctgcaccactgcagcatgcgctacggccgcctgaaggcctcgtgccagcgtgacctggagctccccagccaggaggcaccgtccttccagggcactgagtccccaaagccctgcaagatgcccaagattgtggatccgctggcccggggccgggccttccgccacccggaggagatggacaggccccacgccccgcacccaccgctgacccccggagtcctgtccctcacctccttcaccagtgtccgttctggctactcccacctgccacgccgcaagagaatgtctgtggcccacatgagcttgcaagctgccgctgccctcctcaaggggcgctcggtgctggatgccaccggacagcggtgccgggtggtcaagcgcagctttgccttcccgagcttcctggaggaggatgtggtcgatggggcagacacgtttgactcctccttttttagtaaggaagaaatgagctccatgcctgatgatgtctttgagtcccccccactctctgccagctacttccgagggatcccacactcagcctcccctgtctcccccgatggggtgcaaatccctctgaaggagtatggccgagccccagtccccgggccccggcgcggcaagcgcatcgcctccaaggtgaagcactttgcctttgatcggaagaagcggcactacggcctcggcgtggtgggcaactggctgaaccgcagctaccgccgcagcatcagcagcactgtgcagcggcagctggagagcttcgacagccaccggccctacttcacctactggctgaccttcgtccatgtcatcatcacgctgctggtgatttgcacgtatggcatcgcacccgtgggctttgcccagcacgtcaccacccagctggtgctgcggaacaaaggtgtgtacgagagcgtgaagtacatccagcaggagaacttctgggttggccccagctcgattgacctgatccacctgggggccaagttctcaccctgcatccggaaggacgggcagatcgagcagctggtgctgcgcgagcgagacctggagcgggactcaggctgctgtgtccagaatgaccactccggatgcatccagacccagcggaaggactgctcggagactttggccacttttgtcaagtggcaggatgacactgggccccccatggacaagtctgatctgggccagaagcggacttcgggggctgtctgccaccaggaccccaggacctgcgaggagccagcctccagcggtgcccacatctggcccgatgacatcactaagtggccgatctgcacagagcaggccaggagcaaccacacaggcttcctgcacatggactgcgagatcaagggccgcccctgctgcatcggcaccaagggcagctgtgagatcaccacccgggaatactgtgagttcatgcacggctatttccatgaggaagcaacactctgctcccaggtgcactgcttggacaaggtgtgtgggctgctgcccttcctcaaccctgaggtcccagatcagttctacaggctctggctgtctctcttcctacatgctggcgtggtgcactgcctcgtgtctgtggtctttcaaatgaccatcctgagggacctggagaagctggccggctggcaccgtatcgccatcatcttcatcctcagtggcatcacaggcaacctcgccagtgccatctttctcccataccgggcagaggtgggcccggccggctcacagttcggcctcctcgcctgcctcttcgtggagctcttccagagctggccgctgctggagaggccctggaaggccttcctcaacctctcggccatcgtgctcttcctgttcatctgtggcctcctgccctggatcgacaacatcgcccacatcttcggcttcctcagtggcctgctgctggccttcgccttcctgccctacatcaccttcggcaccagcgacaagtaccgcaagcgggcactcatcctggtgtcactgctggcctttgccggcctcttcgccgccctcgtgctgtggctgtacatctaccccattaactggccctggatcgagcacctcacctgcttccccttcaccagccgcttctgcgagaagtatgagctggaccaggtgctgcactgaccgctgggccacacggctgcccctcagccctgctggaacagggtctgcctgcgagggctgccctctgcagagcgctctctgtgtgccagagagccagagacccaagacagggcccgggctctggacctgggtgcccccctgccaggcgaggctgactccgcgtgagatggttggttaaggcggggtttttctggggcgtgaggcctgtgagatcctgacccaagctcaggcacacccaaggcacctgcctctctgagtcttgggtctcagttcctaatatcccgctccttgctgagaccatctcctggggcagggtccttttcttcccaggtcctcagcgctgcctctgctggtgccttctcccccactactactggagcgtgcccttgctggggacgtggctgtgccctcagttgcccccagggctgggtgcccaccatgccccttcctctttctcctcctacctctgccctgtgagcccatccataaggctctcagatgggacattgtgggaaaggctttggccatggtctgggggcagagaacaaggggggagacacaagtagacctcaggtagaacgacactgggcggagccaccccagggcctgctcccagggagtgctcgaggcgcatcaggcccgttttttaccagtttatatcacggtcttcatttttaaaagtaacgctaactttgtacggacgatgtctcatggattaaataatattctttatggcagtaaaaaaaaaaa

SEQ ID NO: 703 - DNA, 5695 bp, Homo Sapiens
  NM_001005619
ggaagaggatggcagggccacgccccagcccatgggccaggctgctcctggcagccttgatcagcgtcagcctctctgggaccttggcaaaccgctgcaagaaggccccagtgaagagctgcacggagtgtgtccgtgtggataaggactgcgcctactgcacagacgagatgttcagggaccggcgctgcaacacccaggcggagctgctggccgcgggctgccagcgggagagcatcgtggtcatggagagcagcttccaaatcacagaggagacccagattgacaccaccctgcggcgcagccagatgtccccccaaggcctgcgggtccgtctgcggcccggtgaggagcggcattttgagctggaggtgtttgagccactggagagccccgtggacctgtacatcctcatggacttctccaactccatgtccgatgatctggacaacctcaagaagatggggcagaacctggctcgggtcctgagccagctcaccagcgactacactattggatttggcaagtttgtggacaaagtcagcgtcccgcagacggacatgaggcctgagaagctgaaggagccctggcccaacagtgacccccccttctccttcaagaacgtcatcagcctgacagaagatgtggatgagttccggaataaactgcagggagagcggatctcaggcaacctggatgctcctgagggcggcttcgatgccatcctgcagacagctgtgtgcacgagggacattggctggcgcccggacagcacccacctgctggtcttctccaccgagtcagccttccactatgaggctgatggcgccaacgtgctggctggcatcatgagccgcaacgatgaacggtgccacctggacaccacgggcacctacacccagtacaggacacaggactacccgtcggtgcccaccctggtgcgcctgctcgccaagcacaacatcatccccatctttgctgtcaccaactactcctatagctactacgagaagcttcacacctatttccctgtctcctcactgggggtgctgcaggaggactcgtccaacatcgtggagctgctggaggaggccttcaatcggatccgctccaacctggacatccgggccctagacagcccccgaggccttcggacagaggtcacctccaagatgttccagaagacgaggactgggtcctttcacatccggcggggggaagtgggtatataccaggtgcagctgcgggcccttgagcacgtggatgggacgcacgtgtgccagctgccggaggaccagaagggcaacatccatctgaaaccttccttctccgacggcctcaagatggacgcgggcatcatctgtgatgtgtgcacctgcgagctgcaaaaagaggtgcggtcagctcgctgcagcttcaacggagacttcgtgtgcggacagtgtgtgtgcagcgagggctggagtggccagacctgcaactgctccaccggctctctgagtgacattcagccctgcctgcgggagggcgaggacaagccgtgctccggccgtggggagtgccagtgcgggcactgtgtgtgctacggcgaaggccgctacgagggtcagttctgcgagtatgacaacttccagtgtccccgcacttccgggttcctctgcaatgaccgaggacgctgctccatgggccagtgtgtgtgtgagcctggttggacaggcccaagctgtgactgtcccctcagcaatgccacctgcatcgacagcaatgggggcatctgtaatggacgtggccactgtgagtgtggccgctgccactgccaccagcagtcgctctacacggacaccatctgcgagatcaactactcggcgatccacccgggcctctgcgaggacctacgctcctgcgtgcagtgccaggcgtggggcaccggcgagaagaaggggcgcacgtgtgaggaatgcaacttcaaggtcaagatggtggacgagcttaagagagccgaggaggtggtggtgcgctgctccttccgggacgaggatgacgactgcacctacagctacaccatggaaggtgacggcgcccctgggcccaacagcactgtcctggtgcacaagaagaaggactgccctccgggctccttctggtggctcatccccctgctcctcctcctcctgccgctcctggccctgctactgctgctatgctggaagtactgtgcctgctgcaaggcctgcctggcacttctcccgtgctgcaaccgaggtcacatggtgggctttaaggaagaccactacatgctgcgggagaacctgatggcctctgaccacttggacacgcccatgctgcgcagcgggaacctcaagggccgtgacgtggtccgctggaaggtcaccaacaacatgcagcggcctggctttgccactcatgccgccagcatcaaccccacagagctggtgccctacgggctgtccttgcgcctggcccgcctttgcaccgagaacctgctgaagcctgacactcgggagtgcgcccagctgcgccaggaggtggaggagaacctgaacgaggtctacaggcagatctccggtgtacacaagctccagcagaccaagttccggcagcagcccaatgccgggaaaaagcaagaccacaccattgtggacacagtgctgatggcgccccgctcggccaagccggccctgctgaagcttacagagaagcaggtggaacagagggccttccacgacctcaaggtggcccccggctactacaccctcactgcagaccaggacgcccggggcatggtggagttccaggagggcgtggagctggtggacgtacgggtgcccctctttatccggcctgaggatgacgacgagaagcagctgctggtggaggccatcgacgtgcccgcaggcactgccaccctcggccgccgcctggtaaacatcaccatcatcaaggagcaagccagagacgtggtgtcctttgagcagcctgagttctcggtcagccgcggggaccaggtggcccgcatccctgtcatccggcgtgtcctggacggcgggaagtcccaggtctcctaccgcacacaggatggcaccgcgcagggcaaccgggactacatccccgtggagggtgagctgctgttccagcctggggaggcctggaaagagctgcaggtgaagctcctggagctgcaagaagttgactccctcctgcggggccgccaggtccgccgtttccacgtccagctcagcaaccctaagtttggggcccacctgggccagccccactccaccaccatcatcatcagggacccagatgaactggaccggagcttcacgagtcagatgttgtcatcacagccaccccctcacggcgacctgggcgccccgcagaaccccaatgctaaggccgctgggtccaggaagatccatttcaactggctgcccccttctggcaagccaatggggtacagggtaaagtactggattcagggtgactccgaatccgaagcccacctgctcgacagcaaggtgccctcagtggagctcaccaacctgtacccgtattgcgactatgagatgaaggtgtgcgcctacggggctcagggcgagggaccctacagctccctggtgtcctgccgcacccaccaggaagtgcccagcgagccagggcgtctggccttcaatgtcgtctcctccacggtgacccagctgagctgggctgagccggctgagaccaacggtgagatcacagcctacgaggtctgctatggcctggtcaacgatgacaaccgacctattgggcccatgaagaaagtgctggttgacaaccctaagaaccggatgctgcttattgagaaccttcgggagtcccagccctaccgctacacggtgaaggcgcgcaacggggccggctgggggcctgagcgggaggccatcatcaacctggccacccagcccaagaggcccatgtccatccccatcatccctgacatccctatcgtggacgcccagagcggggaggactacgacagcttccttatgtacagcgatgacgttctacgctctccatcgggcagccagaggcccagcgtctccgatgacactgagcacctggtgaatggccggatggactttgccttcccgggcagcaccaactccctgcacaggatgaccacgaccagtgctgctgcctatggcacccacctgagcccacacgtgccccaccgcgtgctaagcacatcctccaccctcacacgggactacaactcactgacccgctcagaacactcacactcgaccacactgcccagggactactccaccctcacctccgtctcctcccacggcctccctcccatctgggaacacgggaggagcaggcttccgctgtcctgggccctggggtcccggagtcgggctcagatgaaagggttccccccttccaggggcccacgagactctataatcctggctgggaggccagcagcgccctcctggggcccagactctcgcctgactgctggtgtgcccgacacgcccacccgcctggtgttctctgccctggggcccacatctctcagagtgagctggcaggagccgcggtgcgagcggccgctgcagggctacagtgtggagtaccagctgctgaacggcggtgagctgcatcggctcaacatccccaaccctgcccagacctcggtggtggtggaagacctcctgcccaaccactcctacgtgttccgcgtgcgggcccagagccaggaaggctggggccgagagcgtgagggtgtcatcaccattgaatcccaggtgcacccgcagagcccactgtgtcccctgccaggctccgccttcactttgagcactcccagtgccccaggcccgctggtgttcactgccctgagcccagactcgctgcagctgagctgggagcggccacggaggcccaatggggatatcgtcggctacctggtgacctgtgagatggcccaaggaggagggccagccaccgcattccgggtggatggagacagccccgagagccggctgaccgtgccgggcctcagcgagaacgtgccctacaagttcaaggtgcaggccaggaccactgagggcttcgggccagagcgcgagggcatcatcaccatagagtcccaggatggaggacccttcccgcagctgggcagccgtgccgggctcttccagcacccgctgcaaagcgagtacagcagcatcaccaccacccacaccagcgccaccgagcccttcctagtggatgggctgaccctgggggcccagcacctggaggcaggcggctccctcacccggcatgtgacccaggagtttgtgagccggacactgaccaccagcggaacccttagcacccacatggaccaacagttcttccaaacttgaccgcaccctgccccacccccgccacgtcccactaggcgtcctcccgactcctctcccggagcctcctcagctactccatccttgcacccctgggggcccagcccacccgcatgcacagagcaggggctaggtgtctcctgggaggcatgaagggggcaaggtccgtcctctgtgggcccaaacctatttgtaaccaaagagctgggagcagcacaaggacccagcctttgttctgcacttaataaatggttttgctactgctaaaaaaa

SEQ ID NO: 704 - DNA, 1921 bp, Homo Sapiens
  NM_001005738
gaagcacacaggaaaaggagcttagctgctggtgctgctggcaagatggaaaccaacttctccactcctctgaatgaatatgaagaagtgtcctatgagtctgctggctacactgttctgcggatcctcccattggtggtgcttggggtcacctttgtcctcggggtcctgggcaatgggcttgtgatctgggtggctggattccggatgacacgcacagtcaccaccatctgttacctgaacctggccctggctgacttttctttcacggccacattaccattcctcattgtctccatggccatgggagaaaaatggccttttggctggttcctgtgtaagttaattcacatcgtggtggacatcaacctctttggaagtgtcttcttgattggtttcattgcactggaccgctgcatttgtgtcctgcatccagtctgggcccagaaccaccgcactgtgagtctggccatgaaggtgatcgtcggaccttggattcttgctctagtccttaccttgccagttttcctctttttgactacagtaactattccaaatggggacacatactgtactttcaactttgcatcctggggtggcacccctgaggagaggctgaaggtggccattaccatgctgacagccagagggattatccggtttgtcattggctttagcttgccgatgtccattgttgccatctgctatgggctcattgcagccaagatccacaaaaagggcatgattaaatccagccgtcccttacgggtcctcactgctgtggtggcttctttcttcatctgttggtttccctttcaactggttgcccttctgggcaccgtctggctcaaagagatgttgttctatggcaagtacaaaatcattgacatcctggttaacccaacgagctccctggccttcttcaacagctgcctcaaccccatgctttacgtctttgtgggccaagacttccgagagagactgatccactccctgcccaccagtctggagagggccctgtctgaggactcagccccaactaatgacacggctgccaattctgcttcacctcctgcagagactgagttacaggcaatgtgaggatggggtcagggatattttgagttctgttcatcctaccctaatgccagttccagcttcatctacccttgagtcatattgaggcattcaaggatgcacagctcaagtatttattcaggaaaaatgcttttgtgtccctgatttggggctaagaaatagacagtcaggctactaaaatattagtgttattttttgttttttgacttctgcctataccctggggtaagtggagttgggaaatacaagaagagaaagaccagtggggatttgtaagacttagatgagatagcgcataataaggggaagactttaaagtataaagtaaaatgtttgctgtaggttttttatagctattaaaaaaaatcagattatggaagttttcttctatttttagtttgctaagagttttctgtttctttttcttacatcatgagtggactttgcattttatcaaatgcattttctacatgtattaagatggtcatattattcttcttcttttatgtaaatcattataaataatgttcattaagttctgaatgttaaactactcttgaattcctggaataaaccacacttagtcctgatgtactttaaatatttatatctcacaggagttggttagaatttctgtgtttatgtttatatactgttatttcactttttctactatccttgctaagttttcatagaaaataaggaacaaagagaaacttgtaatggtctctgaaaaggaattgagaagtaattcctctgattctgttttctggtgttatatctttattaaatattcagaaaaattcaccagtgaaaaaaaaaa

SEQ ID NO: 705 - DNA, 3958 bp, Homo Sapiens
  NM_001005739
gcgggggcgggaacccgggctcgggcccggccgggcgccgggcggcggcggccgtggagcagcagcctcggtgcgacgtggagggctggaggcggcggcgatgcactaggcctcgctcagggcggctgccccgggacccgcagttgagtggtgattttatgcaatggcttcaagccacagttcttcaccagtgcctcaaggaagcagcagtgatgttttctttaaaatagaggtagatccgtcaaaacacattcgacctgtgccatcactgccagatgtgtgtcccaaggaacccacagttacagatcaacatagatggactgtatatcattccaaagtaaatctcccagcagcattaaacgatcctagattagcaaaaagagaatctgacttcttcacaaaaacatggggattggactttgtggacactgaagtcataccttcattctacctcccacagatcagcaaggaacattttacagtatatcaacaggaaatctctcagagagagaagattcatgagagatgcaagaatatttgtcctcctaaagataccttcgaaaggactcttttacatactcatgataaatccaggacagatctggagcaagtacctaagatttttatgaaaccagattttgccttggatgattccttaacttttaattcagttttaccatggtctcattttaatactgctggtggaaaaggaaatcgtgatgcagcttcctcaaagttgcttcaagaaaagctgagccattatctggatattgtggaagtaaacattgctcaccagatctctctacgttcagaagcattttttcatgcaatgacctctcaacacgagttgcaggactacctcaggaaaacttcccaggctgtaaaaatgcttcgagataaaattgcacagattgataaagtaatgtgtgaaggatcactccacattttaagactggcacttaccagaaataattgtgttaaagtatacaataagctgaagttaatggccactgtacaccagactcagcctacagtacaggtgttattatctacttctgaatttgttggagcattggacttaatagcaacaacacaagaggttctacagcaggaacttcagggcattcacagtttccggcatttgggatcacagctttgtgaattagaaaaactgatagataaaatgatgattgcagaattttctacttattctcacagtgacttaaatagaccactggaagatgactgtcaagttttagaagaggaaagactaatatctcttgtatttggacttttaaaacaaagaaagcttaattttttagaaatctatggtgaaaaaatggttattacagcaaagaatatcattaaacagtgtgtgattaataaagtttcacaaacagaagaaatagacacagatgttgttgtgaagcttgcagatcagatgagaatgttgaattttccccagtggtttgatctgctcaaggatattttctctaagtttacaattttcctacagagagtgaaggcaacattaaatatcattcacagtgttgttctctcagttcttgacaaaaaccaaaggactagagaattggaagagatttcacaacagaagaatgctgcaaaagataattcactggacacagaggtggcttatttaatccatgaaggcatgtttataagtgatgcattcggtgagggtgagctaacacctatagcagttgacactacctctcaaagaaatgcatctccaaatagtgagccctgcagcagtgattctgtatccgagccagaatgtactactgattcttcatccagcaaagagcacacatcatcatctgctattccaggaggtgtggatattatggtcagtgaagatatgaaattaactgactcagagctaggaaagctggcaaataatatccaggaattattatatagtgcctcagatatatgccatgatcgagctgtcaaatttctcatgtcaagagcaaaggatggttttcttgagaagctaaattccatggaattcataacactttctagattaatggaaacattcattttagacaccgaacagatctgtggaagaaaaagcacgtcattacttggagcacttcagagccaagctattaagtttgtaaataggtttcatgaagagagaaaaaccaagctcagcctcctcttagacaatgagcgctggaagcaagcagatgttcctgcagaatttcaggatcttgttgattctctgtcagatgggaagattgctttacctgaaaaaaaatcaggagccacagaagaaaggaaaccagctgaagttcttattgtcgagggacaacagtatgcagttgttggaaccgtattgctgttaataagaattatccttgaatattgccagtgtgtggataacatcccatctgttactactgacatgcttactcgtctgtcagatttattgaagtacttcaattcaagaagttgccagttagttcttggagctggtgcactgcaagttgttggactaaaaacgataactacaaaaaatttggctctttcttcacgatgtttgcagttaattgtgcactacattcctgtgatccgggctcattttgaagctcgactaccacctaagcaatatagcatgcttaggcattttgatcatatcactaaggactaccatgatcacatagctgaaatatcagctaagcttgtagcgataatggatagcttatttgacaagctgttatctaagtatgaagtgaaggctcctgttccttctgcctgtttcaggaatatttgtaagcaaatgacaaaaatgcacgaagctatatttgatctccttccagaagaacaaacacagatgttatttttaagaattaatgcaagttataaactccacttgaaaaagcagttatctcacttaaatgtgataaatgatggaggacctcaaaatgggttggtcacagcagatgtagctttttacactggaaatcttcaagccttaaaaggccttaaagatttggacctaaatatggccgaaatttgggagcagaagaggtgatgtcatcctggaaaactgggtagttcatctgaccatgggatgtgtttgttatgaagaaaatctggatgcctgtgattcgagaattgaacctgaaacccaaagtgaactggggtgggggaagggaaaaaggaaagtatcaagtgttgggaaactggattcagtgggatctacaaggaatgtcatttttgtgcatcctacagtgaggagtaactgatcaggtgtctataacatttttcattctctctggaaacagactcaggtttctttggaccaaatccaaaagaacacatagctgtaacacagctgtagttgactagaatgctctgtatactttatattaaaaaatgctttgcatttcttccagtgcaatgaaattcatatggtgtcccaccttatttaatgatggtacaatttaaaatcttagtcaacttctgtagaaagttttctctatgaaagtaaagctgtttgaaaaattattatttttttacagatctttctataaaaaataaacatcttttgattgcttggatttaggaattcaatttttgtttcagtgaccaatgtcaagttgcaggctttgtgtgttgcatatttaatatttctactaccaccgtatgtcaactgggtaaagccttccagagctctctaaatacctgaaagacttaagcctttttttaagtaattaatacttaaaaaaaaagatcctggcatctatttatgcaactaaatacttttcagaaatggtatataaaaggctacagtttaatatctgtatttttataaaagtatgatgaagggtttggggtgtttttatttgtagcagaggtaagaatatgtattcatataatctgcctacttttgagttctcatattaacatttagataacatatgaagta

SEQ ID NO: 706 - DNA, 2564 bp, Homo Sapiens
  NM_001005742
ctctctctctctcgctcgctctctcgctctctcgctctctctcgctcgctctctcgctctcgctctctctctctctccggctcgccagcgacacttgttcgttcaacttgaccaatgagacttgaggaagggctctgagtcccgcctctgcatgagtgaccgtctcttttccaatccaggtcccgccccgactccccagggctgcttttctcgcggctgcgggtggtcgggctgcatcctgccttcagagtcttactgcgcggggccccagtctccagtcccgcccaggcgcctttgcaggctgcggtgggatttcgttttgcctccggttggggctgctgtttctcttcgccgacgagactctggaacccctgtggtcttctcttcatctaatgaccctgaggggatggagttttcaagtccttccagagaggaatgtcccaagcctttgagtagggtaagcatcatggctggcagcctcacaggattgcttctacttcaggcagtgtcgtgggcatcaggtgcccgcccctgcatccctaaaagcttcggctacagctcggtggtgtgtgtctgcaatgccacatactgtgactcctttgaccccccgacctttcctgcccttggtaccttcagccgctatgagagtacacgcagtgggcgacggatggagctgagtatggggcccatccaggctaatcacacgggcacaggcctgctactgaccctgcagccagaacagaagttccagaaagtgaagggatttggaggggccatgacagatgctgctgctctcaacatccttgccctgtcaccccctgcccaaaatttgctacttaaatcgtacttctctgaagaaggaatcggatataacatcatccgggtacccatggccagctgtgacttctccatccgcacctacacctatgcagacacccctgatgatttccagttgcacaacttcagcctcccagaggaagataccaagctcaagatacccctgattcaccgagccctgcagttggcccagcgtcccgtttcactccttgccagcccctggacatcacccacttggctcaagaccaatggagcggtgaatgggaaggggtcactcaagggacagcccggagacatctaccaccagacctgggccagatactttgtgaagttcctggatgcctatgctgagcacaagttacagttctgggcagtgacagctgaaaatgagccttctgctgggctgttgagtggataccccttccagtgcctgggcttcacccctgaacatcagcgagacttcattgcccgtgacctaggtcctaccctcgccaacagtactcaccacaatgtccgcctactcatgctggatgaccaacgcttgctgctgccccactgggcaaaggtggtactgacagacccagaagcagctaaatatgttcatggcattgctgtacattggtacctggactttctggctccagccaaagccaccctaggggagacacaccgcctgttccccaacaccatgctctttgcctcagaggcctgtgtgggctccaagttctgggagcagagtgtgcggctaggctcctgggatcgagggatgcagtacagccacagcatcatcacgaacctcctgtaccatgtggtcggctggaccgactggaaccttgccctgaaccccgaaggaggacccaattgggtgcgtaactttgtcgacagtcccatcattgtagacatcaccaaggacacgttttacaaacagcccatgttctaccaccttggccacttcagcaagttcattcctgagggctcccagagagtggggctggttgccagtcagaagaacgacctggacgcagtggcactgatgcatcccgatggctctgctgttgtggtcgtgctaaaccgctcctctaaggatgtgcctcttaccatcaaggatcctgctgtgggcttcctggagacaatctcacctggctactccattcacacctacctgtggcgtcgccagtgatggagcagatactcaaggaggcactgggctcagcctgggcattaaagggacagagtcagctcacacgctgtctgtgactaaagagggcacagcagggccagtgtgagcttacagcgacgtaagcccaggggcaatggtttgggtgactcactttcccctctaggtggtgccaggggctggaggcccctagaaaaagatcagtaagccccagtgtccccccagcccccatgcttatgtgaacatgcgctgtgtgctgcttgctttggaaactgggcctgggtccaggcctagggtgagctcactgtccgtacaaacacaagatcagggctgagggtaaggaaaagaagagactaggaaagctgggcccaaaactggagactgtttgtctttcctggagatgcagaactgggcccgtggagcagcagtgtcagcatcagggcggaagccttaaagcagcagcgggtgtgcccaggcacccagatgattcctatggcaccagccaggaaaaatggcagctcttaaaggagaaaatgtttgagcccagtca

SEQ ID NO: 707 - DNA, 3503 bp, Homo Sapiens
  NM_001005744
gttgtcatgggggaggtggtggcgcttggtggccactggcggccgaggtagaggcagtggcgcttgagttggtcgggggcagcggcagatttgaggcttaagcaacttcttccggggaagagtgccagtgcagccactgttacaattcaagatcttgatctatatccatagattggaatattggtgggccagcaatcctcagacgcctcacttaggacaaatgaggaaactgaggcttggtgaagttacgaaacttgtccaaaatcacacaacttgtaaagggcacagccaagattcagagccaggctgtaaaaattaaaatgaacaaattacggcaaagttttaggagaaagaaggatgtttatgttccagaggccagtcgtccacatcagtggcagacagatgaagaaggcgttcgcaccggaaaatgtagcttcccggttaagtaccttggccatgtagaagttgatgaatcaagaggaatgcacatctgtgaagatgctgtaaaaagattgaaagctgaaaggaagttcttcaaaggcttctttggaaaaactggaaagaaagcagttaaagcagttctgtgggtctcagcagatggactcagagttgtggatgaaaaaactaaggacctcatagttgaccagacgatagagaaagtttctttctgtgccccagacaggaactttgatagagccttttcttacatatgccgtgatggcaccactcgtcgctggatctgtcactgcttcatggctgtcaaggacacaggtgaaaggttgagccatgcagtaggctgtgcttttgcagcctgtttagagcgcaagcagaagcgggagaaggaatgtggagtgactgctacttttgatgctagtcggaccacttttacaagagaaggatcattccgtgtcacaacagccactgaacaagcagaaagagaggagatcatgaaacaaatgcaagatgccaagaaagctgaaacagataagatagtcgttggttcatcagttgcccctggcaacactgccccatccccatcctctcccacctctcctacttctgatgccacgacctctctggagatgaacaatcctcatgccatcccacgccggcatgctccaattgaacagcttgctcgccaaggctctttccgaggttttcctgctcttagccagaagatgtcaccctttaaacgccaactatccctacgcatcaatgagttgccttccactatgcagaggaagactgatttccccattaaaaatgcagtgccagaagtagaaggggaggcagagagcatcagctccctgtgctcacagatcaccaatgccttcagcacacctgaggaccccttctcatctgctccgatgaccaaaccagtgacagtggtggcaccacaatctcctaccttccaagggaccgagtggggtcaatcttctggtgctgcctctccaggtctcttccaggccggtcatagacgtactccctctgaggccgaccgatggttagaagaggtgtctaagagcgtccgggctcagcagccccaggcctcagctgctcctctgcagccagttctccagcctcctccacccactgccatctcccagccagcatcacctttccaagggaatgcattcctcacctctcagcctgtgccagtgggtgtggtcccagccctgcaaccagcctttgtccctgcccagtcctatcctgtggccaatggaatgccctatccagcccctaatgtgcctgtggtgggcatcactccctcccagatggtggccaacgtatttggcactgcaggccaccctcaggctgcccatccccatcagtcacccagcctggtcaggcagcagacattccctcactacgaggcaagcagtgctaccaccagtcccttctttaagcctcctgctcagcacctcaacggttctgcagctttcaatggtgtagatgatggcaggttggcctcagcagacaggcatacagaggttcctacaggcacctgcccagtggatccttttgaagcccagtgggctgcattagaaaataagtccaagcagcgtactaatccctcccctaccaaccctttctccagtgacttacagaagacgtttgaaattgaactttaagcaatcattatggctatgtatcttgtccataccagacagggagcagggggtagcggtcaaaggagcaaaacagactttgtctcctgattagtactcttttcactaatcccaaaggtcccaaggaacaagtccaggcccagagtactgtgaggggtgattttgaaagacatgggaaaaagcattcctagagaaaagctgccttgcaattaggctaaagaagtcaaggaaatgttgctttctgtactccctcttcccttacccccttacaaatctctggcaacagagaggcaaagtatctgaacaagaatctatattccaagcacatttactgaaatgtaaaacacaacaggaagcaaagcaatctccctttgtttttcaggccattcacctgcctcctgtcagtagtggcctgtattagagatcaagaagagtggtttgtgctcaggctggggaacagagaggcacgctatgctgccagaattcccaggagggcatatcagcaactgcccagcagagctatattttgggggagaagttgagcttccattttgagtaacagaataaatattatatatatcaaaagccaaaatctttatttttatgcatttagaatattttaaatagttctcagatattaagaagttgtatgagttgtaagtaatcttgccaaaggtaaaggggctagttgtaagaaattgtacataagattgatttatcattgatgcctactgaaataaaaagaggaaaggctggaagctgcagacaggatccctagcttgttttctgtcagtcattcattgtaagtagcacattgcaacaacaatcatgcttatgaccaatacagtcactaggttgtagttttttttaaataaaggaaaagcagtattgtcctggttttaaacctatgatggaattctaatgtcattattttaatggaatcaatcgaaatatgctctatagagaatatatcttttatatattgctgcagtttccttatgttaatcctttaacactaaggtaacatgacataatcataccatagaagggaacacaggttaccatattggtttgtaatatgggtcttggtgggttttgttttatcctttaaattttgttcccatgagttttgtggggatggggattctggttttattagctttgtgtgtgtcctcttcccccaaacccccttttggtgagaacatccccttgacagttgcagcctcttgacctcggataacaataagagagctcatctcatttttacttttgaacgttggccttacaatcaaatgtaagttatatatatttgtactgatgaaaatttataatctgctttaacaaaaataaatgttcatggtagaagcttttaaa

SEQ ID NO: 708 - DNA, 3133 bp, Homo Sapiens
  NM_001005753
gcatgcgcaacatcccctagtgccgccgctccctactctgggggttgggactacctccttttccgcgggccccgcccaggcggctgcccgtgacctgcctgggcgcggggaactgaaagccggaaggggcaagacgggttcagttcgtcatggggctgtttggaaagacccaggagaagccgcccaaagaactgatatccaaagagaagaagaaaaagtgaaacgatctgtgaaagatgctgccaagaagggccagaaggatgtctgcatagttctggccaaggagatgatcaggtcaaggaaggctgtgagcaagctgtatgcatccaaagcacacatgaactcagtgctcatggggatgaagaaccagctcgcggtcttgcgagtggctggttccctgcagaagagcacagaagtgatgaaggccatgcaaagtcttgtgaagattccagagattcaggccaccatgagggagttgtccaaagaaatgatgaaggctgggatcatagaggagatgttagaggacacttttgaaagcatggacgatcaggaagaaatggaggaagaagcagaaatggaaattgacagaattctctttgaaattacagcaggggccttgggcaaagcacccagtaaagtgactgatgcccttccagagccagaacctccaggagcgatggctgcctcagaggatgaggaggaggaggaagaggctctggaggccatgcagtcccggctggccacactccgcagctaggggctgcctaccccgctgggtgtgcacacactcctctcaagagctgccattttatgtgtctcttgcactacacctctgttgtgaggactaccattttggagaaggttctgtttgtctcttttcattctctgcccaggttttgggatcgcaaagggattgttcttataaaagtggcataaataaatgcatcatttttaggagtatagacagatatatcttattgtggggaggggaaagaaatccatctgctcatgaagcacttctgaaaatataggtgattgcctgaatgtcgaagactctacttttgtctataaaacactatataaatgaattttaataaatttttgctttagcacttggccccattgtagattgccctgtgcagtaaactttcaaggtgtcggctgccccagattgcttcatttgctgggtgtggaaagagttgctatggccaggcatatgggatttggaagctcagcagaagtgacttctgctctgtggttgctgctccccggctttcacagacatggtatggcagccattcttttatctatttaaccaagaggatgctggggaattgtgctgcttgtcctgttggctggtggctgcattatgtcctggggtgtgcatgtgggtctatttagagcttctgtcccttccttcccattgcaagttgcacccagatgagacagctgtagtactaggtctctttcacctctcattgcctgtccctgcttcgagctggttgtcttgtgcgtgggacatgggccttcctatctgtgttttctcaaagtcaggagctgaccaggagcacactaaggtgtggtcatgcatcataaccaacattcactcatctgggacattcttaagatacatttataaatcatttcagcagtagtactttgtatgtgttgagagtttacagagctctttgacatacgcgatcttagtctttacaaataaggaaaacagctcagtttgggaagtatcagagatgggattcaaacccagatcctctggtccaagttgtatgtgcactgaactaatcaggcaggaaaaaagcccagccactgtctcacagattgttttttgtatattgtagcaaaatcctgaaacaatggggtccttccagtctcatcatacaaaatggcaatcttggctgggtgcggtggttcatgcctataatcccagtgctttacaaggctgaggcaggaggctctcttgagaataggagttcaagaccagcctgggcaacatagcaagatcctgtctctccaaaaaaaaaaaaaaaaaaaaaaaaaaatttcatttttgagtccagaggaccctcctattactcttgatttcatcttcagagtgtagttaaaaaattattttaaataattatttttttaaatcagttgtaggttcacagcaaaagtggacaaaaagaaatttctcatatatcccctgccctcacacatgcatagcctcccaccactatcagtatcccacaccagagtggtacatttgttacaatcaataaacctccattgacacatcattatcacccaaagtccatagtttacatgaagattcactctggtgttgtacattgtatgggcttagacaaatgtatgatgatatctacaattatagaatcatacagaatagtttcactgccctaaaacttctctatgcttcacctgttcatccctttcttccctaatcccctggcaaccactttaaaaaaaaaattaggttcagggggtacatgtgcaggtaaactcgtgacaagggggtttgttatacagattatttagtgacccaggtactaagcctagtacccaatagttacttttctggtcctgtcccttttcccaccctccaccctcaggtaggccccagtatgttattcctttgtgtccatgttatttcactcccacttgtgagaacatggaatatttggtttcctgttcctatgttagtttgttaaggataatggcctccagccccatccatgttcctgcaaaggacatgatctttctttggcaaccactttttactgtcgccatagttcttccttttctagaatgtcatattggaatcatatagtatgtagccttttcagactggcttctttcacttaataatatgcaattaaggttcctccatgtcatttcatggcttaatagtgcatttatttttagcactgaataatactccattgtctagatgaatagtttatccattcacctattgaaagacttcttggtggtttccaagttttggcaattatgaataaagctgttgtaaacatctttgtgcaggtttttctatgggcatgtttttaattcatttgaataaataccaagagcttcagtgctggatcataaa

SEQ ID NO: 709 - DNA, 2942 bp, Homo Sapiens
  NM_001005861
cggctcggggctgtgagcggctcggggccgggggtgggcggcggtgcggcgggcggccgacgctcctcttcggcggcggcggcggcggccatgcgtggggcggcgcggctggggcggccgggccggagttgcctcccgggggcccgcggcctgagggccccgccgccgccgccgctgctgcttctgcttgcgctgttgccgctgctgcccgcgcctggcgctgccgccgcccccgccccgcggcccccggagctgcagtcggcttccgcggggcccagcgtgagtctctacctgagcgaggacgaggtgcgccggctgatcggtcttgatgcagaactttattatgtgagaaatgaccttattagtcactacgctctatcctttagtctgttagtacccagtgagacaaatttcctgcacttcacctggcatgcgaagtccaaggttgaatataagctgggattccaagtggacaatgttttggcaatggatatgccccaggtcaacatttctgttcagggggaagttccacgcactttatcagtgtttcgggtagagctttcctgtactggcaaagtagattctgaagttatgatactaatgcagctcaacttgacagtaaattcttcaaaaaattttaccgtcttaaattttaaacgaaggaaaatgtgctacaaaaaacttgaagaagtaaaaacttcagccttggacaaaaacactagcagaactatttatgatcctgtacatgcagctccaaccacttctacgcgtgtgttttatattagtgtaggggtttgttgtgcagtaatatttctcgtagcaataatattagctgttttgcaccttcatagtatgaaaaggattgaactggatgacagcattagtgccagcagtagttcccaagggctgtctcagccatccacccagacgactcagtatctgagagcagacacgcccaacaatgcaactcctatcaccagctccttaggttatcctaccttgcggatagagaagaacgacttgagaagtgtcactcttttggaggccaaaggcaaggtgaaggatatagcaatatccagagagaggataactctaaaagatgtactccaagaaggtacttttgggcgtattttccatgggattttaatagatgaaaaagatccaaataaagaaaaacaagcatttgtcaaaacagttaaagatcaagcttctgaaattcaggtgacaatgatgctcactgaaagttgtaagctgcgaggtcttcatcacagaaatcttcttcctattactcatgtgtgtatagaagaaggagaaaagcccatggtgatattgccttacatgaattgggggaatcttaaattgtttttacgacagtgcaagttagtagaggccaataatccacaggcaatttctcagcaagacctggtacacatggctattcagattgcctgtggaatgagctacctggccagaagggaagtcatccacaaagacctggctgccaggaactgtgtcattgatgacacacttcaagttaagatcacagacaatgccctctccagagacttgttccccatggactatcactgtctgggggacaatgaaaacaggccagttcgttggatggctcttgaaagtctggttaataacgagttctctagcgctagtgatgtgtgggcctttggagtgacgctgtgggaactcatgactctgggccagactccctacgtggacattgaccccttcgagatggccgcatacctgaaagatggttaccgaatagcccagccaatcaactgtcctgatgaattatttgctgtgatggcctgttgctgggccttagatccagaggagaggcccaagtttcagcagctggtacagtgcctaacagagtttcatgcagccctgggggcctacgtctgactcctctccaatcccacaccatcaggaagaaggtgcctgtcggggctcacttgaagcctgtcagggatgctttgtatctaacacaacgccaacagaagcacatttgtcttccagaacaccgtgccttagaaatgctttagaatctgaactttttaagacagacttaataatgtggcatattttctagatatcacttttattaggttgaactgaaagggtttttgtaaattttttggccaaaattttttaaaacatacttactttggactaggggtacattcttacaaaataaataaacagtttttaaaattgtttagacacagatatttggaattagctatcttagtgccaactgctttttatttttttacttcatcaaggtgatgtaagtgactcacctttaaagtttttttagtgttattttttatcactactctgggaaatggtttgtcttcaagatgcaatacttttcttagtaaaggaaaaacagcataaaaagatacctggtctgccttgtacaagaaaaggcaatattagaggaagaaaatttaaagaaaagctagaggaaaaaaaaatttttttaaaaatacttattagaagcaaactgcccttgcatggaaaactgtttatttttttcagtgaaaaggaattctgctttcgtgtttttgggaaagcaggaactgagttcattacatctttaatttggcagaaattagcctttctgtgaaccagatgtggtttggggcagatctgtagtaaacaatggtgattttatttatttttactctctggaaaaggagataatacaattccagaaagtgaactcatatttctaaggttaagattcccttttattgcacctagaatagtgctatgcacagagcgggtgcttgagttgttgtcgttttttgtttgttttttaaatgtaaactggtaaattttgtgcttatcttcaaggctggcttaagtataaaattgttttttaaacacttgaaaaattaaaggatttgttttatatt

SEQ ID NO: 710 - DNA, 2074 bp, Homo Sapiens
  NM_001005920
acttccggggtccgtcccggttcccggccgttgccacgacgacgaagctgccggccaatggctggcggatgggcccaaggttcccggcgtgcagcgcggctgcctgagggcggcaggctcatggcgccggcgtcgcggttgctcgcgctctgggcgctggcggctgtggctctacccggctccggggcggagggcgacggcgggtggcgcccgggcgggccgggggccgtggcggaggaggagcgctgcacggtggagcgtcgggccgacctcacctacgcggagttcgtgcagcagtacgccttcgtcaggcccgtcatcctgcagggactcacggacaactcgaggttccgggccctgtgctcccgcgacaggttgctggcttcgtttggggacagagtggtccggctgagcaccgccaacacctactcctaccacaaagtggacttgcccttccaggagtatgtggagcagctgctgcacccccaggaccccacctccctgggcaatgacaccctgtacttcttcggggacaacaacttcaccgagtgggcctctctctttcggcactactccccacccccatttggcctgctgggaaccgctccagcttacagctttggaatcgcaggagctggctcgggggtgcccttccactggcatggacccgggtactcagaagtgatctacggtcgtaagcgctggttcctttacccacctgagaagacgccagagttccaccccaacaagaccacgctggcctggctccgggacacatacccagccctgccaccgtctgcacggcccctggagtgtaccatccgggctggtgaggtgctgtacttccccgaccgctggtggcatgctacgctcaaccttgacaccagcgtcttcatctccaccttcctcggctagccaaaacagctggcaggactgccggtcacacaccagcacgtcccacctcgtgctcacggattttattacacagatagtggcggcaatggcctcagcccagcccaccctcacctgcttttccagcccacaaagggggacgatcacggcccagcaaaagcgatgctgagaggggaaacagtccagagtccaacagcagaacttgggggaagcggtcggggtggccaggaacataaactatgtataggggccgggggcttctgcccagggctcccctggaccaggacgccaggtagggcagggaacctcagtagtcctccacccagccattctcagagatgaatgcgtcaataacctccttcatagccaagttggggatgagctgttcctgggtcagggggctccgggtcacggggtcaaaatgacccacacgctgcagtgacaagaagggcagagggcagtcatggggcccaggaccatgccactggccctgctcccccagccgcaggcctcacctgcaggtgctcctcgatgtccttgcggtcgtaggtgatgccactgggcgtgatgcacggctcccgcatcagctcaaagctgatcttgccacacaggtagtcggggatgtctcgcttctgtggcacaggggcacacggtcagaggctgaaaaggggcactgcacgagcacctgccagccatcggcagcaagcgacacacactcaccttcctcttctcatccacctgagaaaaaagctcgtccatgtccgccatgtacttgtcctgtgaagagttgagtgctgtgcttgggggagacaccccacctccctcctccatggggcacagacccaacacaaggcggggatgctcccacgccacgtgcacacacacagacccacatgtgggtggggggcaccctcacgtgcttggcctcaatgcaggcctgctgggcccggacgtggctgtcgtcctcatcaccctcgtggtttcgctggcactcttccagctccctgggggttgaccaggagccggtcagagatggacctggccagatgtctgaccacaccccaatctcagagctaacatccacacttccccacatttcctgcttgccagtaaagccttcgataaacgctaaaaaaaaaaaaaaaaaaaaaaaaaaaaaaaa

SEQ ID NO: 711 - DNA, 1099 bp, Homo Sapiens
  NM_001006612
actggtgacgtagatctcatgtgaccaggagtcgacgtgtgcagaagtcctggtaatctggtccttgttcccgtctggataccagcttccttcagcagcgcaggcggtggtccctgaggcccgtggaaggagtcaaacttgcgggaattttgcagtttatctgcagggctgttgtttccagcaagacccaaagctagaaaaggaggaggaagaaactgacccgatcagtgccagtcattgtattcaaagaagaataagcaagaaagaaaagaaggaaggaagagaggtagacagatacaagatgaaatcctgtcaaaaaatggaaggaaaaccagaaaatgagagtgaaccaaagcatgaggaagagccaaagcctgaggaaaagccagaagaggaggagaagctagaggaggaggccaaagcaaaaggaacttttagagaaaggctgattcaatctctccaggagtttaaagaagatatacacaacaggcatttaagcaatgaagatatgtttagagaagtggatgaaatagatgagataaggagagtcagaaacaaacttatagtgatgcgttggaaggttaatcgaaaccatccttacccctatttaatgtagtttaccttgatttttatctgatattaacaataccatatagcttgctttttattagcatttcctgatattcctttgtccatatttctacttataacctgttgctattaatggttttagatgtatctcttgttatctgcatctcattgtttattgtattttgaaccaatctacaagtctctgtcttttaataaaagaactttacacatttgtaaaaaagaggttcttggtaagatataaaatggaaaaaggctaagtaatatgtgaatatcatatttttgaaaggtaaaaagtacatttgtatattacatatatggacataacttgtgaaggatgaaagaaagtacagcctctcggtggtgggattatgaatgatttttctccttttgcttgtttgtattttctatattcctaaaattaacacacattattattgctagaataataaaagttttataaaaaagaagcaacaaaaaaaaaaaaaaa

SEQ ID NO: 712 - DNA, 1593 bp, Homo Sapiens
  NM_001006618
tccggaacgccggggtgtggttccgggtcgtgtgcggctcggggtaatagggctgctgctcggccggccggcggcggcgagcagcaggggcatgagggctaacccgggaagcggcagctgagcgggccgggaggagcgccggtccccgtggatcccgagagtgcagagctcggggcaggggccgggaggcgtgggggagccgggccctcccctcaggaacgtgtcccggggccgacccggcccgtagtgtggaagcagcttcaggtaggtgagctcgtgaaacaatatgaagaggagaaaatagccttttaaggaaattggcccacagaaaggatggccttcttggacaatccaactatcattctagctcatattcgacagtcacatgtgaccagtgatgacacgggaatgtgtgagatggttctcattgatcatgatgttgacctagagaagattcatcctccttcaatgcctggagacagtgggtcagaaattcagggaagcaatggtgagactcagggctatgtatatgcccagtcagtcgatattacctcaagttgggactttggtattagaagacgctcaaacacagctcaaagattagaacgactccgaaaagagagacaaaaccagatcaaatgcaaaaatattcagtggaaagaaagaaattctaagcaatcagcccaggagttaaagtcactgtttgaaaaaaaatctctcaaagagaagcctccaatttctgggaagcagtcgatattatctgtacgcctagaacagtgccctctgcagctgaataacccttttaacgagtattccaaatttgatggcaagggtcatgtaggtacaacagcaaccaagaagatcgatgtctacctccctctgcactcgagccaggacagactgctgccaatgaccgtggtgacaatggccagcgccagggtgcaggacctgatcgggctcatctgctggcagtatacaagcgaaggacgggagccgaagctcaatgacaatgtcagtgcctactgcctgcatattgctgaggatgatggggaggtggacaccgatttccccccgctggattccaatgagcccattcataagtttggcttcagtactttggccctggttgaaaagtactcatctcctggtctgacatccaaagagtcactctttgttcgaataaatgctgctcatggattctcccttattcaggtggacaacacaaaggttaccatgaaggaaatcttactgaaggcagtgaagcgaagaaaaggatcccagaaagtttcaggtgcttgtgactaaattcactaatttcactggctgtcaaggctgtgttaaggaaaatgggtttgaactgctgtgggttttgagtactggactggatgtcagaaacctttgccatcacgggaaattctgtcactctggatttactgtctgttccccacagctaaattcctctgcagtgtgatttagcaccctggatccccatcaaccagttttggcatttatttgaatgcattaccccactggtttccataaactattttacaattgtttaaaataaatgactgtttatttccacaaaaaaaa

SEQ ID NO: 713 - DNA, 3183 bp, Homo Sapiens
  NM_001006622
agtgcgtgatgaccccagagcgtgcgttcggtggcccataggggaagatggcggctgctcctttggaggagcgggattgagaggatcggggtggggagaccaaacaagagagacatttctggctctgaaggcgaacgcttcgctggccatttaggagctctgctcaaagccagacgtatcctagaaggaaaacatcaccatggctacagaaattggttctcctcctcgttttttccatatgccaaggttccagcaccaggcacctcgacagctgttttataagcgacctgattttgcacaacagcaagcaatgcaacagcttacttttgatggaaaacgaatgagaaaagctgtgaaccgaaaaaccatagactacaatccatctgtaattaagtatttggagaacagaatatggcaaagagaccagagagatatgcgggcaattcagcctgatgcaggttattacaatgatctggtcccacctataggaatgttgaataatcctatgaatgcagtaacaacaaaatttgttcggacatcaacaaataaagtaaagtgtcctgtatttgttgttaggtggactccagaaggaagacgcttggtcactggagcttctagtggggagtttaccctgtggaatggactcactttcaattttgaaacaatattacaggctcacgacagcccagtgagggccatgacgtggtcacataatgacatgtggatgttgacagcagaccacggaggatatgtgaaatattggcagtcgaacatgaacaacgtcaagatgttccaggcacataaggaggcgattagagaggccaggtttatacacaatataccattttctgtagtccctattgtcatggttaaattattctctaagtgtattctgggtgcagagatgcatgggctctgtcagtttctgggaaactttctgcaccctataaacacaatatttttctttgttttcacacattcaccattttgctggcacctttctgaagtagtgttgtcccggtatcagcctttgcaatatgttagagatgtactgtctgccgcattttgcactggttttctcttttcatttatgattaataatgtgtatacgttattcctttttattatctactgtgtaagacaagaatatttcattccaaataaagaattcagtctttaattatgcaactgaataaaatctaaagcctacagaaaacaacttcagaattcacacaaagtggaaaaaggcttaagtgaagacctggttggcttggttatgccacgacttccaaaggaaagtataggactaaaaccctcacagataactggatgtggcaaacattaacggagtaatgaatgggttcttcaagctttgcagctgtaagcagatcattgtcaagaagactctaggacttttcttctgattcactgttgataacatcacttatgcaaatgtatacaataagtggagtttaaaatattttcagtgagttgtatatttttacacatcagtgaggtatgtatagtaaaactgggggaaaaagttccaaatacaagcctgaagaattgctgcagcctcagaataaagctaagcagcattctttaaggttgtgccacccatgtgtgggaggaggttgacatctttatggaaacatcatccactgtagtcatttgttcatactttcagaatcttaacagaaattgttggatgaacatgcttctgctttgtagattttgccttagtgtcatgcccatacattgagtttacacagctggtccttcataggattccaaagttcaagggagtttttagagttagttgagaaacttgatgatctttcactgctgggaaaaactgactccttcttgcagcagattctttggctttacacacaagtctgaatgtccttattttaaagttttcctcaaaggtgcaacattcatggaatagcttgccaggaagatgtgaaacttttctacagacctttgaaatggatgagaaacattgtatgtagggatgtttagcaatcagtcttttaatagacagcccacattgtttcagcttatttcatgaagtgtctgaggcagaagctgatgataattttgggagcagtattcgtgtgtgatttaaaagactgcaggaatactgcaaaaatagaatccatttattttcaccacttaaggcagcttcatgtgatttcctcgtatcatagaaaatagagaaggaacatggatagcattagcactaataatacacacttgaagttctcagaatactgatgattgaaaactcaaacaactgctctgttgaagtcttcttttgatgagatgcctatgttagctgacgacattcactttaagggcttcttcactggattcttccctctcctgtttataatgcagcacagtgtttttatttttccctgtctgagaagcacagattatctgttaaatgctgacttctttcccctgctgtgtgtcttcatgtaacagtttctcacccacggataataaatttgctacatgctctgatgacggcactgttagaatctgggactttcttcgttgccatgaggaaagaattctccgaggtacgtgtactaacagtactgattggaatatttaaatagggaagacatttgtggttaaatcatcacaaaaccacaatactggcttacacctccattcaattttttttacatatacacaccgtctcaggctcttcaaaaaaacccagcactttctctgactcacagtcattttgtaggtttttactaccagtgttatctttgaatttttcagctgtaaattaaatacaagagtgcctcccccttacttgcttatctgtatgcatcttttagggctgtattccttttccttccttgtagccagggtacttgttcccaacatattgacactgtggtttgatttagatagccgtcattctcctggcagtccttttacaatatgaattaaccgacaagatagaggtatcaaagctacacttcttagtgttactatttttgaaagcagttggtttttcagtacaccacatttgtactacatggccggcttgttactaagttcgggtggcattgctgcttgtttacttttgttgattttataattaataaacctctatgaaattacttcattccgtaactgaaaaaaaaaaaaaaaaaa

SEQ ID NO: 714 - DNA, 3598 bp, Homo Sapiens
  NM_001006623
agtgcgtgatgaccccagagcgtgcgttcggtggcccataggggaagatggcggctgctcctttggaggagcgggattgagaggatcggggtggggagaccaaacaagagagacatttctggctctgaaggcgaacgcttcgctggccatttaggagctctgctcaaagccagacgtatcctagaaggaaaacatcaccatggctacagaaattggttctcctcctcgttttttccatatgccaaggttccagcaccaggcacctcgacagctgttttataagcgacctgattttgcacaacagcaagcaatgcaacagcttacttttgatggaaaacgaatgagaaaagctgtgaaccgaaaaaccatagactacaatccatctgtaattaagtatttggagaacagaatatggcaaagagaccagagagatatgcgggcaattcagcctgatgcaggttattacaatgatctggtcccacctataggaatgttgaataatcctatgaatgcagtaacaacaaaatttgttcggacatcaacaaataaagtaaagtgtcctgtatttgttgttaggtggactccagaaggaagacgcttggtcactggagcttctagtggggagtttaccctgtggaatggactcactttcaattttgaaacaatattacaggctcacgacagcccagtgagggccatgacgtggtcacataatgacatgtggatgttgacagcagaccacggaggatatgtgaaatattggcagtcgaacatgaacaacgtcaagatgttccaggcacataaggaggcgattagagaggccagtttctcacccacggataataaatttgctacatgctctgatgacggcactgttagaatctgggactttcttcgttgccatgaggaaagaattctccgagatacatgttttcatcactgccgttgttacttcctttctgtcaagaggtgaataacagtaggtggacaaagtttagggagccacatttaccaacttctgtgaatatacccaagaagattctggcaaaacatagattcaaattacagttgatgctgtggatggctatgggttaactactcttctactttgacacggattatttgttgcttttatgtttctaaattctcaattaaaaagaagtgtatccttaatctggccaactgaaagtgaacttgttcattcacctctaccttgctttcaaaaggactgcttaccatggaagtgctccagaagaatcatttgaaacatcttttgttttccttcttggttctgcgttttcttccttaccaggggcttcagtcatggcttctctttattcttggcctgggttgtctgctggcactaatacatctattattaacgtagtgtaggtactggcctttctaatagtcttggtatttagtgccagactcccatcaatcttttgaatgtcttttctttttctttttgcacttttctagcttttcaagtgatgactatatactgcttttcttgactgtatatattgttactgaattgtgaatatctgcagaaatgtttactagagaacctgtgactgttgaataacatgtgcccgaacatacacacacacatatgtacacacacacctcagagtactctttcttacagcggactttgctgctgctttctgcatgtgtgggacactggtatctcccgtctcagacaaatggctgatgttctctatgatattggtgttaatatcaaagaattgaatgaatacaacagaattgaggttgaaaaatatttgattgccacattcctttaagcatctttgatgaatactctgcaaagtagcctttaaaaaaatgtaaattttttaaaaagtccacagaggagaatttgctggttagcacaaaacatactgcaaaattgcttctttctggttattataactgaagaatatagaagattgacacacattttatacaccctcaggcagtgttttggaataatattgtaccttttcaaattgttatcaattaactgtttttctccatttcataattctcaagatttttctaaatacagcctttaaatttgactcaaatggaaattgtgcactttcctgtttatacccttccccacgttattgtaaaagagtttaacagcagcctgatatgtaagtttcagcaaaacttatacctgtatatgtttttatttgactcaaaaattagatattttaccatatagtcataagaatttgctcactttgatgccagaagtacttaagaagttacacggcactaattttatgagttgtatgcctaatttcaatttctaacctatttgacagtttcttttaggtcagcctttgttggtcttccatgtaaatacaagttggtacaaatcaatagaaaccattttacctacataggcaaagtaaatgtgtgacttagagactgccagatttatggtgcatctacctttttatccatttgagcttgcttttttatgtttgtgtattggttgctcctgacactatacatttcaaaattttttataacttgaaaaacacttctgtgctaccactcagttctgatcaaatccttacattttgcaacactcatttctgaattttcagtaaagaaatacacattacaaattaaaggttaaaggcccctttacatgcccttccccagtctcctcttcctcccccggaagtgtccattctgctgaattcaggttcatcattgccagacaaatgtagtaagctagtgtttcacatttccaaaatcagccttctggcagacttggaagtactcttgagaaaagaagactcgtgaccaaattctcccacagatttgtaataatgtacatattgaaaggactgaaggctctcagactgggaaagaaacttacccattttaaaattcagcattgctcaacttacctgactgccggaccccttcacccatgattctatgcactgtattgttggaacatacattgtgaaaacactgccctgcctaggcataccccctttccagaattaactttccatttaattctatagtttttcactgatgtaactttctagactggacaacaaagatgactaatagtaatcactccaagttgatgttgactgttgggttgtggtgaaatcattttgcattaaaggaaggtaaaatactaataaattgcatattccttgaccagagcacagattacttatgcttcttaattttttaaaatcttaaatcctctgtccaactggagtatctggctatgggccatgggtactcatataccctttgtcttaaactgatctgttacattttatgttcttgtggctagaagtagcctgagtttgctgttaatgtttaacacattttcttgagtaacagttctgttaatattgtacaagatggtacttgaattctttgtttgccttttttcttcctgtattagaaaatcttggtgctttttataagttttgtataaaagaattttttttaagatttgttcataaaatggtctgatccaggaaaaataaaatgggaacatggacaccatttctgaccttcaaataaaacttattatgtattggttttc

SEQ ID NO: 715 - DNA, 2707 bp, Homo Sapiens
  NM_001006636
ggacttgctggagatatagaaagggacctgacacagtttctggccttaaggagctctcattccagtggggaagaaaaaaactaaaataatgatgtccgagagcatcagaaaagaacctgctctggtcaggtatctctgcattagccagattggacatatgtaaagggacatcagtatatctggatcatcagattgtgcttcaagaagaccatagggaagaacgcattttcatcttgctgcaaaagttgcaatagaagatctgaaggtttgaatgggccaatgagtatcctcatcattgaagcattctatggaggctcccataaacagctggtggatcttcttcaagaagagttaggagactgtgtcgtttatacccttcctgcaaagaaatggcattggagagcccggacatctgctttatatttctctcagaccattcccatcagtgagcattacaggaccctctttgcaagttcagtgcttaacctgaccgaactggctgcccttcggcctgaccttgggaaactgaaaaagattctgtattttcacgagaaccagttgatatatcctgtcaagaaatgtcaggagagggatttccaatatggatacaaccaaattctttcatgcctggtggctgatgtggttgtattcaactcagtttttaatatggaatcatttctcacttccatgggaaaatttatgaagctgattcctgatcacagacccaaggatctggaaagcatcatcagacccaagtgccaagttatttactttcccatcaggtttcctgatgtgagcagattcatgcccaagcacaaaacaacccatttaaagaagatgctcggccttaaaggaaatggcggtgcggttctgtccatggcccttccttttcagccagagcagagagattcagaggatttattgaagaattttaattcagagtgtgatacacactgtggccttgatactgcacgacaagaatatttgggtaactcattaagacaggaatcagacttgaaaaaatccacctcgtcagataattcaagctctcatcatggtgaaaataaacaaaatctgactgttgatccctgtgacattttgggtggagttgataatcagcaaagactgctacacattgtctggcctcacaggtgggagcatgataaagatccagaaagcttttttaaggtattaatgcatcttaaagacttaggactcaatttccacgtgtctgtacttggagaaaccttcacagatgtcccagatattttttcagaggccaaaaaggcattgggatcttctgtcttacactggggctacttacccagcaaagatgactatttccaagtactgtgcatggctgatgttgtcatctcaacagctaagcatgaattctttggagtggcaatgttggaagctgtgtactgtgggtgttacccactttgtcctaaagatttggtttatcccgaaatatttccagctgaatatctgtattctacacctgaacagctttcaaaaaggctccagaatttctgcaagagaccagatattataagaaaacatctctataagggtgaaatcgctccgttttcttgggcagccctacatggtaaattcaggtctctgcttacaacagaacctagggaagatttgtgacagatggggctaagtcacaaacttgcagcctaaggcagaatctgaagaactttccagagtgtgcccatatttacctgatcagagagaaaagaaaatctgcagaggaagctgagcctggctgcttgtcatagctgacacagagccatctgccacaaacctgtggcggcttcagatctccaatccctgccaccaccccaactcaaattaaatacagattcctagagacgttatgatggttacacatgtcctcggcatcacatgtaggagactgttcaaaaaaaatatgtggcctgttgtataaccgcactcatgtatcccatatgtggtgccacattgaatttccggttgaatccgtttttatcctttgtactggatgacatggtgcctgaattctttcttttcgccgacacgatggcagccaaactgcagcttcaaacgctcacacttggctgggtttctacctaggttgccaggttatcatcggagccttcttgtgtcctcaaagggccacgaggcctgaaaggaggatcagaatgctttgggattaattgggcagccatcgcagaattgtttgtgggcaaagggctgctttagcacttttcttttagcaaattaatgactctcaggcacagggggttttaagtgaaggtattaataagaggtctggcaggtattcccatgattcacagagttacatttgcatttaattaatcttaaagttgcaagataaacagctgtaattcggacaaacatgacaaacacagtgaagccaactatcccataaaatgaacactgacatacttgttttaatttttttcccagcgtaaaaatagaaaaatcaaaatactcctaacaaaaccagtgattttgatagaaatatttctccaatatacttgcatccacctacaaatataaccttttcaagataaatcgcttatgatttcaatagtcaaactgctgtgtttgttgatgtaaagatgttttgaatggctagatggtaaaataaattcttaataaagtacccactgcaatttttaaaaaaaaaaaaaaa

SEQ ID NO: 716 - DNA, 1208 bp, Homo Sapiens
  NM_001006639
tcttttttttgcctgtccaccatctccctattaccctttggtcgagagggaaagcagaagaagtctgctggtcacagcggggcacctcgaggagaggacgactaggagcacacggcccggaaaggtccagaataactgtgcttgaagaagaaaattcccaacatggacaaaccacgcaaagaaaatgaagaagagccgcagagcgcgcccaagaccgatgaggagaggcctccggtggagcactctcccgaaaagcagtcccccgaggagcagtcttcggaggagcagtcctcggaggaggagttctttcctgaggagctcttgcctgagctcctgcctgagatgctcctctcggaggagcgccctccgcaggagggtctttccaggaaggacctgtttgaggggcgccctcccatggagcagcctccttgtggagtaggaaaacataagcttgaagaaggaagctttaaagaaaggttggctcgttctcgcccgcaatttagaggggacatacatggcagaaatttaagcaatgaggagatgatacaggcagcagatgagctagaagagatgaaaagagtaagaaacaaactgatgataatgcactggaaggcaaaacggagccgtccttatcctatttaatgtgttcggcctttaattctgttttgcctgctaatagtattgccattgccacctggactttctgtttgcattttcttaatgccttttcccatattctgaattttaactttttgtgaggctttattttagatgtttagcatgtaactcgcttaaagttgaggtttccccctaaaatctacaagtttccctctttcagtcatgagccctacacatttgcatgaaagatgtacattatatattgtgaaacgaaaaaagcaattttcaaatggtatatattgtatcccatttttgtaaaaaaaatgtatatttatatattaatatgcaaagaaaaagctaaaagtatagacttcaaaggcataacagtggttgtgtggtaagataataggtgattttttaaatttttgttttatctgaatttctcattttttcaggacaaacgttttacttgtgttgcaaaaatatataatgaaaaaatcacacaattttgaagaaaactgtcaatcagcttataacgacaatgtggcacttaataaatacttgtcagaactttaaaaaaaaaaaaaaaa

SEQ ID NO: 717 - DNA, 6957 bp, Homo Sapiens
  NM_001006657
cagggcgacgggagctttccggagctgctggtactcccgattggagacgtagaaccgttacttgtcgagggccttagcggccgccgtgaccctctcggggatcccacgatgttcttctacctgagcaagaaaatttccattcccaataacgtgaagctgcagtgtgtatcctggaacaaggaacaagggttcatagcatgcggtggtgaagatggattactgaaagttttgaaattagagacgcagacagatgatgcaaaattgaggggccttgcagcccccagtaacctttctatgaatcagactcttgaaggtcatagtggttctgttcaagttgtaacatggaatgagcagtatcagaagttgactaccagtgatgaaaacgggcttatcattgtgtggatgttatataaaggctcttggattgaggagatgatcaacaatcgaaataaatcagttgttcgcagtatgagctggaatgctgacggacagaagatctgcattgtatatgaagatggggctgtgatagttggttcagtggatggcaatcgtatttggggaaaagacctgaagggtatacagctatcccatgtaacatggtctgcggacagtaaagtcttactttttggaatggcaaatggggaaatacacatttacgataatcaaggaaattttatgataaaaatgaaactgagttgtttggtgaatgtcactggagctatcagcattgctggaattcattggtaccatggcacagaaggctacgtggagcctgattgcccttgccttgctgtttgctttgataatggaagatgccaaataatgagacatgagaatgaccaaaatcccgttttgattgacactggcatgtacgtagtaggcatccagtggaaccacatgggcagcgtgttagctgtggcaggcttccagaaggcagccatgcaggacaaagatgtgaacattgtgcagttttacactccgtttggtgagcatctgggtactttgaaagttcctggaaaggaaatatctgcactatcttgggaaggaggtggactgaaaattgcactagctgttgattcctttatatattttgcaaacattcgacctaattataagtggggttattgctcaaacactgtagtttatgcatataccagacctgatcgtccagaatattgtgttgtcttctgggatacgaaaaacaatgaaaaatatgttaaatatgtgaagggtctcatttctattactacctgtggagatttctgcattttggctacaaaagctgatgaaaatcatcctcaggaggagaacgagatggagacatttggtgcaacgtttgtactagttctttgtaattctattggtacacccttggatcccaaatacattgatattgtaccattgtttgttgcaatgaccaaaacccatgtgatagcagcctcgaaagaagcattttatacctggcaatatcgtgtggcaaagaagctcacagcattggaaattaatcagatcacacggtctcgaaaagaagggagagaaagaatttatcatgttgatgataccccttctggatcaatggatggtgtgcttgattatagtaaaaccattcaaggcacaagggatccaatttgtgccataactgcatcagataagatattgattgtgggtcgtgaatctggcaccattcagagatacagtctacctaatgttggtttgattcaaaaatattcccttaattgtcgagcctaccagttatccttgaattgcaactctagccgtcttgctatcatagacatctcaggagttctgactttctttgacttggatgctcgagtaacggacagtacgggacagcaagtagttggagagttgttaaaattggaacgaagagatgtctgggatatgaagtgggccaaagataatcctgatttgtttgcaatgatggagaagacaagaatgtatgttttcagaaacttggatcctgaggaacccattcagacctctggatatatttgtaattttgaggatttagaaattaaatctgttcttttggatgagatattaaaggatccagaacatccaaacaaggattacctaattaactttgagattcggtctctgcgagatagccgagcactgattgagaaggttggaattaaagatgcatctcagttcatagaggacaatccacacccccgactttggcgcctactggctgaagcagctcttcagaaactggatctatacactgcagagcaagcatttgtgcgctgcaaagattaccaaggcattaagtttgtgaagcgcttgggcaaactactgagtgagtcaatgaaacaggctgaagttgttggctacttcggcaggtttgaagaggctgaaagaacgtatctcgagatggacagaagggatcttgctattggcctccggctgaaattgggggattggtttagagtactccagctcctgaaaactggatctggtgatgcagatgacagtctcctggaacaagccaacaatgccattggagactactttgctgatcgacaaaagtggttgaatgctgtacaatattatgtacaaggacggaaccaggaacgcttagctgaatgttactatatgttagaggattatgaagggttagagaaccttgccatttcacttccagaaaaccacaagttacttccagaaatagcacaaatgtttgtcagagttggaatgtgtgaacaagcagtgactgcatttttgaaatgtagtcaaccaaaggcagcagtagatacctgcgtacatctcaaccaatggaacaaagctgttgaattggctaaaaatcatagtatgaaagaaattggatctctgttagctaggtatgcatctcatttactggaaaagaataaaactcttgatgccatagaactctatcggaaagccaattacttttttgatgcagctaaactgatgtttaagattgcagatgaagaggcaaagaaaggaagtaaacctttacgtgtcaagaagctctatgtactgtcagccttacttatagagcaataccatgaacagatgaagaatgcccagcgaggaaaagttaaaggaaaaagttcagaggccacttctgccttggctggtttgctggaagaagaagttctgtctacaacagatcgtttcacagataatgcatggagaggggcagaggcttaccacttctttatacttgcacagaggcagctctatgagggatgtgtggacactgcactgaagacagctcttcacctgaaagactatgaagacatcatccctcctgtggagatctactctctgctagcactctgcgcatgcgccagcagagcctttgggacttgttcaaaagctttcattaaacttaaatctttagagaccctcagttcagaacagaaacagcagtatgaagaccttgctttagaaatcttcaccaaacatacttcaaaagataacagaaaacctgaattggacagccttatggaaggtggagaagggaaactgccaacatgcgttgccacaggaagcccaatcactgagtatcaattctggatgtgcagtgtatgcaaacacggtgtccttgctcaggaaataagccactacagcttctgccccttatgccatagtccagtgggataaaggaatgataaactgtatataactgtaaaatatatgtagcatatatacatggctatatgctgtatatgtaataaggtttatttctgtgagttttgtatgaaaatcagcctcattatttatagttgaatttttgcacaaaatatatgttaataaaataatttttatggcaatacaactgtgaaataataaggccgattttcatataaatgtatgaaaatcaaccatgttttctctcaccctctctcttttgtttatcttgtttttggttacatgataccatggaaatattccaaataaatttttttctcacagtgtcaaggtaactgaattcattaaaaaatcttgaagggagtagggagtgggggaagcatgggagtggggcaaagttgaatttagagaatttttataacccatgttacaaggaagttaaacaattgtaataatgaaatgagctttctctatagccatatttaattaaataagtgtcgaatgtcttctttattgtattttcagaagtgaggcgatggcattttaagacattttttacaatctgaattgtttctaatagccctattcttctattttaaaacctgtccttttagtctcatttaagagatggcatttggaatttacactttcatatgattgtgcagaaaacttgcctctatttataatgaagataacttaaacagaaatatccattttgtagttatagcttctgttgaaacattgtcactaagttggaccgtttatttacacaagtattgttgagggagtgattttttcttgatatgcgtctgttttcatttattattaatttgaaagataaacagttgtgatccataatggatcatttcttatgtcttttacatagctaataatgttctctgtttatttctcatgaattcccattttgtggctaaagaccagacctttgcactatttcatcaagattattttattgaggtttggcttacatatagtagaggcaatacatagagatacgcaactttgtttttgcagctacaatacactttctcaatctcatatgtttttgtcttgtagagacagagacaagttcagcatgttgcagattgggaatagtgagctatgagaagagatttagagcctagatgagcttaggatagagagtgggctcattggcctaaataaaaagagaagaccagaagtctttgaggtctctgtctctattcatgcgcctcgtggaaaattaccttggtacaatggtagcctctaaatagactgcctcgcaagctattccagaggtcatggaacagaaagccttataaaccaaataaaaattctcaaaatacattggtttattgaaccaatttgcaatacacagtgaggaacaaggagaaagcaatgatagattaacactgttagtgtaacgtgccagtggagtggaaagaccgcaacacctgaatcctgggttttgtaatgtttttatgtcctgactcacattctgtcacatacgctttcccctaatagtcgggttacaaaaaggaccagagtggccgcttgagccagatgactcaatcagatgaaatgtgcctgaggccaacgatgtacacttgctctatagaagggtgtcaggggcaagtacacttcaccacagcaatagcttgcctattagtctgctgagcagtcatgaattttattgtatttcttgggtaaggacaggccagaatgagtgtcaccagtgggtaattgaatcaacttctcacacatactgaaggctttatatgtctcatgcatacttagtgtatcatgaatatttggtatctttgtggcttttcatatttttagtgcttcatgaatatttggtatctcttgctcctttctatctgtggtcacacatacacgctctattaactttgcctaataagtctcctaggttactaacttacttacctaaatgtaacacaatgaattccagctttctcatttgttctataccagaatgggaaatttccccaaatcagaaaatcacatcctaacaaagaagtctgtctaagacagtacatctcctgttgaacttgcatctttccacaggactttctgtttttagggatgagactattctctgcttcatcaaggaaagagaaatgttcagggttgtagggatggcacacttattagttctgcctgtctgaaaggttcctgcaggacagtttggtcagagctgcaattcttagtccatggtctaatgcttgagtatctcttctttccctttcctgtctcaggaatcagctgagaattcattcgattgtcatgcctctagccccttactgtgatttgttggttgcactttcatttgctttagttctagaatcacctgttgactcctcagacttcacctaactttggaaactctcttttggaggcttctcatttccccctaattctgtgctgcctgagccctagaattttcccaccaacgaattattccaggtagatcctaagttgctggatctagttgatatttaaacaatatctagttgatatttctcattcagttggatccagaaaccagtatctctaaaaacaacctctcataccttgtggacctaattttgtgtgcgtgtgtgtgtgcgcgcatatgtatatagacaggcacatcttttttacttttgtaaaagcttatgcctctttggtatctatatctgtgaaagttttaatgatctgccataatgtcttggggacctttgtcttctgtgtaaatggtactagagaaaacacctatattatgagtcaatctagttggttttattcgacatgaaggaaatttccagataacaacactaacaaactctcccttgactagggggacaaagaaaagcaaaactgaccataaaaaacaattacctggtgagaagttgcataaacagaattaggtagtatattgaagacagcatcattaaacagttatgttgttctccttgcaaaaaacatgtactgacttcccgttgagtaatgccaagttgttttttttattataaaacttgcccttcattacatgtttcaaagtggtgtggtgggccaaaatattgaaatgatggaactgactgataaagctgtacaaataagcagtgtgcctaacaagcaacacagtaatgttgacatgcttaattcacaaatgctaatttcattataaattgttttgctaaaatacactttgaaactatttttctgtattccaagagctgagatcttagattttatgtagtattaagtgaaaaaatacgaaaataataaacattgaagaaaaaaaaaaaaaaa

SEQ ID NO: 718 - DNA, 4184 bp, Homo Sapiens
  NM_001006658
atttaagggcccgcctctcctggctcacagctgcttgctgctccagccttgccctcccagagctgccggacgctcgcgggtctcggaacgcatcccgccgcgggggcttcggccgtggcatgggcgccgcgggcctgctcggggttttcttggctctcgtcgcaccgggggtcctcgggatttcttgtggctctcctccgcctatcctaaatggccggattagttattattctacccccattgctgttggtaccgtgataaggtacagttgttcaggtaccttccgcctcattggagaaaaaagtctattatgcataactaaagacaaagtggatggaacctgggataaacctgctcctaaatgtgaatatttcaataaatattcttcttgccctgagcccatagtaccaggaggatacaaaattagaggctctacaccctacagacatggtgattctgtgacatttgcctgtaaaaccaacttctccatgaacggaaacaagtctgtttggtgtcaagcaaataatatgtgggggccgacacgactaccaacctgtgtaagtgttttccctctcgagtgtccagcacttcctatgatccacaatggacatcacacaagtgagaatgttggctccattgctccaggattgtctgtgacttacagctgtgaatctggttacttgcttgttggagaaaagatcattaactgtttgtcttcgggaaaatggagtgctgtcccccccacatgtgaagaggcacgctgtaaatctctaggacgatttcccaatgggaaggtaaaggagcctccaattctccgggttggtgtaactgcaaactttttctgtgatgaagggtatcgactgcaaggcccaccttctagtcggtgtgtaattgctggacagggagttgcttggaccaaaatgccagtatgtgaagaaattttttgcccatcacctccccctattctcaatggaagacatataggcaactcactagcaaatgtctcatatggaagcatagtcacttacacttgtgacccggacccagaggaaggagtgaacttcatccttattggagagagcactctccgttgtacagttgatagtcagaagactgggacctggagtggccctgccccacgctgtgaactttctacttctgcggttcagtgtccacatccccagatcctaagaggccgaatggtatctgggcagaaagatcgatatacctataacgacactgtgatatttgcttgcatgtttggcttcaccttgaagggcagcaagcaaatccgatgcaatgcccaaggcacatgggagccatctgcaccagtctgtgaaaaggaatgccaggcccctcctaacatcctcaatgggcaaaaggaagatagacacatggtccgctttgaccctggaacatctataaaatatagctgtaaccctggctatgtgctggtgggagaagaatccatacagtgtacctctgagggggtgtggacaccccctgtaccccaatgcaaagtggcagcgtgtgaagctacaggaaggcaactcttgacaaaaccccagcaccaatttgttagaccagatgtcaactcttcttgtggtgaagggtacaagttaagtgggagtgtttatcaggagtgtcaaggcacaattccttggtttatggagattcgtctttgtaaagaaatcacctgcccaccaccccctgttatctacaatggggcacacaccgggagttccttagaagattttccatatggaaccacggtcacttacacatgtaaccctgggccagaaagaggagtggaattcagcctcattggagagagcaccatccgttgtacaagcaatgatcaagaaagaggcacctggagtggccctgctcccctgtgtaaactttccctccttgctgtccagtgctcacatgtccatattgcaaatggatacaagatatctggcaaggaagccccatatttctacaatgacactgtgacattcaagtgttatagtggatttactttgaagggcagtagtcagattcgttgcaaagctgataacacctgggatcctgaaataccagtttgtgaaaaaggctgccagtcacctcctgggctccaccatggtcgtcatacaggtggaaatacggtcttctttgtctctgggatgactgtagactacacttgtgaccctggctatttgcttgtgggaaacaaatccattcactgtatgccttcaggaaattggagtccttctgccccacggtgtgaagaaacatgccagcatgtgagacagagtcttcaagaacttccagctggttcacgtgtggagctagttaatacgtcctgccaagatgggtaccagttgactggacatgcttatcagatgtgtcaagatgctgaaaatggaatttggttcaaaaagattccactttgtaaagttattcactgtcaccctccaccagtgattgtcaatgggaagcacacaggcatgatggcagaaaactttctatatggaaatgaagtctcttatgaatgtgaccaaggattctatctcctgggagagaaaaaattgcagtgcagaagtgattctaaaggacatggatcttggagcgggccttccccacagtgcttacgatctcctcctgtgactcgctgccctaatccagaagtcaaacatgggtacaagctcaataaaacacattctgcatattcccacaatgacatagtgtatgttgactgcaatcctggcttcatcatgaatggtagtcgcgtgattaggtgtcatactgataacacatgggtgccaggtgtgccaacttgtatcaaaaaagccttcatagggtgtccacctccgcctaagacccctaacgggaaccatactggtggaaacatagctcgattttctcctggaatgtcaatcctgtacagctgtgaccaaggctacctgctggtgggagaggcactccttctttgcacacatgagggaacctggagccaacctgcccctcattgtaaagaggtaaactgtagctcaccagcagatatggatggaatccagaaagggctggaaccaaggaaaatgtatcagtatggagctgttgtaactctggagtgtgaagatgggtatatgctggaaggcagtccccagagccagtgccaatcggatcaccaatggaaccctcccctggcggtttgcagatcccgttcacttgctcctgtcctttgtggtattgctgcaggtttgatacttcttaccttcttgattgtcattaccttatacgtgatatcaaaacacagagcacgcaattattatacagatacaagccagaaagaagcttttcatttagaagcacgagaagtatattctgttgatccatacaacccagccagctgatcagaagacaaactggtgtgtgcctcattgcttggaattcagcggaatattgattagaaagaaactgctctaatatcagcaagtctctttatatggcctcaagatcaatgaaatgatgtcataagcgatcacttcctatatgcacttattctcaagaagaacatctttatggtaaagatgggagcccagtttcactgccatatactcttcaaggactttctgaagcctcacttatgagatgcctgaagccaggccatggctataaacaattacatggctctaaaaagttttgccctttttaaggaaggcactaaaaagagctgtcctggtatctagacccatcttctttttgaaatcagcatactcaatgttactatctgcttttggttataatgtgtttttaattatctaaagtatgaagcattttctggggttatgatggctttacctttattaggaagtatggttttattttgatagtagcttcctcctctggtggtgttaatcatttcatttttacccttacttggtttgagtttctctcacattactgtatatactttgcctttccataatcactcagtgattgcaatttgcacaagtttttttaaattatgggaatcaagatttaatcctagagatttggtgtacaattcaggctttggatgtttctttagcagttttgtgataagttctagttgcttgtaaaatttcacttaataatgtgtacattagtcattcaataaattgtaattgtaaagaaaacatacaaaaaaaaaaaaaaaa

SEQ ID NO: 719 - DNA, 822 bp, Homo Sapiens
  NM_001006666
ttccctttgcaattgccttgggtcctgccgcacagagcggcctgtctttatcagaggtccctctgccagggggagggccccagagaaaaccagaaagagggtgagagactgaggaagataaagcgtcccagggcctcctacaccagcgcctgagcaggaagggggaggggccatgactacgaggccctgggaggtcactttagggagggctgtcctgaaacctggagcctggagcagaaagtgaaaccctggtgctccagacaaagatcttagtcgggactagccggccaaggatgaagcctcacttcagaaacacagtggagcgaatgtatcgagacacattctcctacaacttttataatagacccatcctttctcgtcggaataccgtctggctgtgctacgaagtgaaaacaaagggtccctcaaggccccgtttggacgcaaagatctttcgaggccaggtgcccaggtctttcatcagagccccatttcaagtgctcagtagcccctttggccagtgcgccccaccacatgggacagcgcaggtccagtggcctccccagctgaccgcaggcagggaacaaggcagaccctagagggccaggccacagcaggggctgaggatgcctggtgaatggatgcctgggagaatggatgccagaattcacgcatgaggctctgaacagggctgggaaaacttccaaacgaagggaagctcatgtcttggtgcactttgtgatgatgcttcaacagcaggactgagatggggacatttacaataaacagaaatgtatgggctcgaaaaaaaaaaaaaaaaaa

SEQ ID NO: 720 - DNA, 1158 bp, Homo Sapiens
  NM_001006684
cgactctcacgtgaccaggagtcgacgtgtgcagaagtccttatagtccagggcctgtttccctgtagcagctccttattgctggagaaggagaaaagtgcccaagatcctttcaggattaatttattcaaaaaggaaataaaaaatactcaatatgcaaaagtcttgtgaagaaaatgagggaaaaccacagaacatgccaaaggccgaggaagatcgccctttggaggatgtaccacaggaggcagaaggaaatcctcaaccttccgaagaaggcgtaagccaggaagcagaaggaaaccccagaggagggccgaatcagcctggccagggatttaaagaggacacacccgttaggcatttggaccctgaagaaatgataagaggagtagatgagcttgaaaggcttagggaagagataagaagagtaagaaacaagtttgtgatgatgcattggaagcaaagacattcacgcagccgtccttatcctgtgtgctttaggccttgaattcatttttgcctaatattaaaatctggccccagctttctttctgttagcattttctgatgtatctttgacctccattttacttttaatcatctgatgaaattttgttttaggtaatttccttggtaccagcatctcattggattttggattttgacccattttccaggtctatttttcaattggaaactttcacacatttgcatgggaatatgttcattccatgttgtaaagtaaaacataacaggttatggcaaagcagcatatttaatatcagctcacatatgtaggataaaattccaaactttgtgtgtgtgcgtgtgtgtatacatacatccatataacatatatcacaaacttaaccaagcttatttctgtgtggtgtgaaattttatttgttttcttctttttgttctttttgcttatatgtactttttaatgaacacgtgtctcacacacaaaaagaattaaggattttttttacaagtaagagtcaaataatttgcaaccagcttatgagggcaatgggggcacctaaactcttgatgaaagaactttaaaaagaaatgtaaacctcaaattacctctggatctcttagccagaggaataaactggcaattattacagataaaaaaaaaaaaaaaaaaaa

SEQ ID NO: 721 - DNA, 1154 bp, Homo Sapiens
  NM_001006933
gtgggcaccagcccccgcgcccgcccgcccgccctgcggtccggtcctggcgcccgcgcagaaccagctgtctgagctgcccgggcagcgggggagcagcgagcgggcttccgcgagccggagaaggcacaggcctgtcccgggtcccggcaggtcagtgtgaaggtctgcgcgtctgttcccagcgctctgcgaggcctaaaaaggaggagcaacctgtccagaatccctgcaggacaggaaaaggaggggaaatctcgacatggaaaaaccctacaataaaaatgaaggaaacctggaaaacgagggaaagccagaagatgaagtagagcctgatgatgaaggaaagtcagacgaggaagaaaagccagacgtggaggggaagacagaatgcgagggaaagagagaggatgagggagagccaggtgatgagggacaactggaagatgagggaagccaggaaaagcagggcaggtccgaaggtgagggcaagccacaaggcgagggcaagccagcctcccaggcaaagccagagagccagccgcgggccgccgaaaagcgcccggctgaagattatgtgccccggaaagcaaaaagaaaaacggacagggggacggacgattcccccaaggactctcaggaggacttacaggaaaggcatctgagcagtgaggagatgatgagagaatgtggagatgtgtcaagggctcaagaggagctaaggaaaaaacagaaaatgggtggttttcattggatgcaaagagatgtacaggatccattcgccccaaggggacaacggggtgtcaggggagtgaggggtggaggtaggggccagaggggcttacacgatatcccatacctttaatgcctttggccttccattctgatttctctgatgagaatattgctggccctgctttccctggtaggtatttgccaggcccaatgctttaaccttaagctgatactttgctttagatgtcagtctcgttaccagcagccttttgacccaactacggcgctctatattttagtagaggattttcacccatgtgcatggaaaagatgttcatggtacattgtaaaaaaataaaattaaaattaaaaaaagtttgcagaaccgcaaaaaaaaaaaaaaaaaaaaaaaaaaaaaa

SEQ ID NO: 722 - DNA, 1293 bp, Homo Sapiens
  NM_001006936
tgggctgcggcattcacgtgatctgcacgggcgcagatgtaggcaccggtccgagtgcctgccctctgtccccgcggctgggtctcgtctgctccggttcctgggctcctaattcttggtccagcttcttccaggtctgcgcgtctgttgttcccagcgctctgcgaagcctgaaaaggaggagcaacctgtccagaatccccgcagacaggaaaaggaggggaaatctcgacatggaaaaactctacagtgaaaatgaaggaatggcttcaaaccaaggaaagatggaaaatgaagaacagccacaagacgagagaaagccagaagtaacttgtactctggaagacaagaagttagaaaacgagggaaagacagaaaacaagggcaaaacaggagatgaggaaatgttaaaggataaaggaaagccagagagtgagggagaggcaaaagaaggaaagtcagagagggagggagagtcagagatggagggaggatcagagagagagggaaaaccagagatagagggaaagccagagagtgaaggagagccagggagtgaaacaagggctgcaggaaagcgcccagctgaggatgatgtacccaggaaagccaaaagaaaaactaataaggggctggctcattacctcaaggagtataaagaggccatacatgatatgaatttcagcaatgaggacatgataagagaatttgacaatatggctaaggtgcaggatgagaagagaaaaagcaaacagaaattgggggcgtttttgtggatgcaaagaaatttacaggaccccttctaccctagaggtccaagggaattcaggggtggctgcagggccccacgaagggacattgaagacattccttatgtgtagtgtccctggcaggcatttaccaggccatgtgctttaacgttacggtaatactttactttaggcatccctcctgttgctagcagccttttgacctatctgcaatgcagtgttctcagtaggaaatgttcatctgttacatggaaaaaatgttgatggtgcattgtaaaattaaaaaacacaacttgcagaaccaaatatatggcatcagtacatttttgtaaaactacaaagatacttacctagtaatatagtatagaaaacaattctgaaagctgtgtccactaaaagattaacagtggttatctctgggtgattttttctgttcttttttgttcatctgtccatttttctcctaaaaacagatttctttagtcataaaaataataaaatataaagtattggaaaaaaaaaa

SEQ ID NO: 723 - DNA, 1289 bp, Homo Sapiens
  NM_001006937
tgggctgcggcattcacgtgatctgcacgggcgcagatgtaggcaccggtccgagtgcctgccctctgtccccgcggctgggtctcgtctgctccggttcctgggctcctaattcttggtccagcttcttccaggtctgcgcgtctgttgttcccagcgctctgcgaagcctgaaaaggaggagcaacctgtccagaatccccgcaggaaaaggaggggaaatctcgacatggaaaaactctacagtgaaaatgaaggaatggcttcaaaccaaggaaagatggaaaatgaagaacagccacaagacgagagaaagccagaagtaacttgtactctggaagacaagaagttagaaaacgagggaaagacagaaaacaagggcaaaacaggagatgaggaaatgttaaaggataaaggaaagccagagagtgagggagaggcaaaagaaggaaagtcagagagggagggagagtcagagatggagggaggatcagagagagagggaaaaccagagatagagggaaagccagagagtgaaggagagccagggagtgaaacaagggctgcaggaaagcgcccagctgaggatgatgtacccaggaaagccaaaagaaaaactaataaggggctggctcattacctcaaggagtataaagaggccatacatgatatgaatttcagcaatgaggacatgataagagaatttgacaatatggctaaggtgcaggatgagaagagaaaaagcaaacagaaattgggggcgtttttgtggatgcaaagaaatttacaggaccccttctaccctagaggtccaagggaattcaggggtggctgcagggccccacgaagggacattgaagacattccttatgtgtagtgtccctggcaggcatttaccaggccatgtgctttaacgttacggtaatactttactttaggcatccctcctgttgctagcagccttttgacctatctgcaatgcagtgttctcagtaggaaatgttcatctgttacatggaaaaaatgttgatggtgcattgtaaaattaaaaaacacaacttgcagaaccaaatatatggcatcagtacatttttgtaaaactacaaagatacttacctagtaatatagtatagaaaacaattctgaaagctgtgtccactaaaagattaacagtggttatctctgggtgattttttctgttcttttttgttcatctgtccatttttctcctaaaaacagatttctttagtcataaaaataataaaatataaagtattggaaaaaaaaaa

SEQ ID NO: 724 - DNA, 3131 bp, Homo Sapiens
  NM_001006944
gaagcgcccgccccggccggagccgccatgtaaccggcgccgcccggagcccgagccgcgcgggccccagcgacccgcccgccatgggggacgaggacgacgatgagagctgcgccgtggagctgcggatcacagaagccaacctgaccgggcacgaggagaaggtgagcgtggagaacttcgagctgctcaaggtgctgggcacgggagcctacggcaaggtgttcctggtgcggaaggcgggcgggcacgacgcggggaagctgtacgccatgaaggtgctgcgcaaggcggcgctggtgcagcgcgccaagacgcaagagcacacgcgcaccgagcgctcggtgctggagctggtgcgccaggcgcccttcctggtcacgctgcactacgctttccagacggatgccaagctgcacctcatcctggactatgtgagcggcggggagatgttcacccacctctaccagcgccagtacttcaaggaggctgaggtgcgcgtgtatgggggtgagatcgtgctggccctggaacacctgcacaagctcggcatcatttaccgagacctgaaactggagaatgtgctgctggactccgagggccacattgtcctcacggacttcgggctgagcaaggagttcctgacggaggagaaagagcggaccttctccttctgtggcaccatcgagtacatggcccccgaaatcatccgtagcaagacggggcatggcaaggctgtggactggtggagcctgggcatcttgctcttcgagctgctgacgggggcctcgcccttcaccctggagggcgagaggaacacgcaggctgaggtgtctcgacggatcctgaagtgctcccctcccttcccccctcggatcgggcccgtggcgcaggacctgctgcagcggctgctttgtaaggatcctaagaagcgattgggcgcggggccccagggggcacaagaagtccggaaccatcccttcttccagggcctcgattgggtggctctggctgccaggaagattccagccccattccggccccaaatccgctcagagctggatgtgggcaactttgcggaggaattcactcggctggagcctgtctactcaccccctggcagccccccacctggggacccccgaatctttcagggatactcctttgtggcaccctccattctctttgaccacaacaacgcggtgatgaccgatgggctggaagcgcctggtgctggagaccggccaggtcgggcagcggtggccaggagcgctatgatgcagcagtacgagctggacctgcgggagcctgcgctgggccagggcagcttttctgtgtgtcgccgctgccgccagcgccagagcggccaggagttcgcagtcaagatcctcagtcgcaggctggaggcgaacacgcagcgcgaagtggctgccctgcgcctgtgccagtcacaccccaacgtggtgaatctgcacgaggtgcatcacgaccagctgcacacgtacctggtcctggagctgctgcggggcggggagctgctggagcacatccgcaagaagcggcacttcagcgagtcggaagcaagccagatcctgcgcagcctcgtgtcggccgtgagcttcatgcacgaggaggcgggcgtggtgcaccgcgacctcaagccggagaacatcctgtacgccgacgacacgcccggggccccggtgaaaatcatcgacttcgggttcgcgcggttgcggccgcagagtcccggggtgcccatgcagacgccctgcttcacgctgcagtacgctgcccccgagctgctggcgcagcagggctacgacgagtcctgcgacctctggagcctgggcgtcattctgtacatgatgctgtcggggcaggtccccttccagggggcctctggccagggcgggcagagccaggcggccgagatcatgtgcaaaatccgcgaggggcgcttctcccttgacggggaggcctggcagggtgtatccgaggaagccaaggagctggtccgagggctcctgaccgtggaccccgccaagcggctgaagctcgagggactgcggggcagctcgtggctgcaggacggcagcgcgcgctcctcgcccccgctccggacgcccgacgtgctcgagtcctctgggcccgcagtgcgctcgggtctcaacgccaccttcatggcattcaaccggggcaagcgggagggcttcttcctgaagagcgtggagaatgcacccctggccaagcggcggaagcagaagctgcggagcgccaccgcctcccgccggggctcccctgcaccagccaacccgggccgagcccccgtcgcctccaaaggggccccccgccgagccaacggccccctgcccccctcctaatccccaccactgtgacccccttccctcataggggctgtgacctgggagcccggctcactcccggaggcctctgcctgcggctgacctgatccccaagggactgtcctttcctctcctaccccaccccactcccagacagagcagaagtatttttataagcagagaattttttatgtcttaccagatagagttgcagggaagggggggcctgctggggagtggggtttggggggccctctcccaggacactgcctcttctgggcagaaggcccctccagggggactgctccaacaggaaagagcccctcccccacttctaagcactgagttaggagtgctaactcctaaactgggaccccctaccctgttctcccctgaggccccgttcctgggaggggcacccctcaactgtcactttatggactgtctgtgcaattacgtccaccaaagacccgtgttgggggtactgaaggagaggccctgggggaccctctgaagcatttctgcctcactttatgtcatctgcttctcccctgttggggctaaggaaggagataggtggctcctaaaagaggaggccatcttctcacccaccccttcctctttggcacagctactcctggctgggggtggggccttgggggtctgggctgggcatccatggtcactgcctcagcccagccaggctgtgcctttgactttaaaataaaagtccacccagtgctgtgtgtggcaaaaaaaaaaaaa

SEQ ID NO: 725 - DNA, 956 bp, Homo Sapiens
  NM_001007
gggcggagcagctgaaaatccggcgcgcgcagtctccagccccaatttctacgcgcaccggaagacggaggtcctctttccttgcctaacgcagccatggctcgtggtcccaagaagcatctgaagcgggtggcagctccaaagcattggatgctggataaattgaccggtgtgtttgctcctcgtccatccaccggtccccacaagttgagagagtgtctccccctcatcattttcctgaggaacagacttaagtatgccctgacaggagatgaagtaaagaagatttgcatgcagcggttcattaaaatcgatggcaaggtccgaactgatataacctaccctgctggattcatggatgtcatcagcattgacaagacgggagagaatttccgtctgatctatgacaccaagggtcgctttgctgtacatcgtattacacctgaggaggccaagtacaagttgtgcaaagtgagaaagatctttgtgggcacaaaaggaatccctcatctggtgactcatgatgcccgcaccatccgctaccccgatcccctcatcaaggtgaatgataccattcagattgatttggagactggcaagattactgatttcatcaagttcgacactggtaacctgtgtatggtgactggaggtgctaacctaggaagaattggtgtgatcaccaacagagagaggcaccctggatcttttgacgtggttcacgtgaaagatgccaatggcaacagctttgccactcgactttccaacatttttgttattggcaagggcaacaaaccatggatttctcttccccgaggaaagggtatccgcctcaccattgctgaagagagagacaaaagactggcggccaaacagagcagtgggtgaaatgggtccctgggtgacatgtcagatctttgtacgtaattaaaaatattgtggcaggattaatagca

SEQ ID NO: 726 - DNA, 1743 bp, Homo Sapiens
  NM_001007027
tttctccgcatgcgcgggatcccggatgtggatcaagttggtgggaagcgtgcggtgccgcagcaatggcggcgctcacaattgccacgggtactggcaattggttttcggctttggcgctcggggtgactcttctcaaatgccttctcatccccacataccattccacagattttgaagtacaccgaaactggcttgctatcactcacagtttgccaatatcacagtggtattatgaggcaacttcagagtggacgttggattacccccctttctttgcatggtttgagtatatcctgtcacatgttgccaaatattttgatcaagaaatgctgaatgtccataatttgaattactccagctcaaggaccttacttttccagagattttccgtcatctttatggatgtactctttgtgtatgctgtccgtgagtgctgtaaatgcattgatggaaaaaaagtgggtaaagaacttacagaaaagccaaaatttattctgtcggtattacttctgtggaacttcgggttattaattgtggaccatattcattttcagtacaatggctttttatttggattaatgctactctccattgcacgattatttcagaaaaggcatatggaaggagcatttctctttgctgttctcctacatttcaagcatatctacctctatgtagcaccagcttatggtgtatatctgctgcgatcctactgtttcactgcaaataaaccagatgggtctattcgatggaagagtttcagctttgttcgtgttatttccctgggactggttgttttcttagtttctgctctttcattgggtcctttcctggccttgaatcagctgcctcaagtcttttcccgactctttcctttcaagaggggcctctgtcatgcatattgggctccaaacttctgggctttgtacaatgctttggacaaagtgctgtctgtcatcggtttgaaattgaaatttcttgatcccaacaatattcccaaggcctcaatgacaagtggtttggttcagcagttccaacacacagtccttccctcagtgactcccttggcaaccctcatctgcacactgattgccatattgccctctattttctgtctttggtttaaaccccaagggcccagaggctttctccgatgtctaactctttgtgccttgagctcctttatgtttgggtggcatgttcatgaaaaagccatacttctagcaattctcccaatgagccttttgtctgtgggaaaagcaggagacgcttcgatttttctgattctgaccacaacaggacattattccctctttcctctgctcttcactgcaccagaacttcccattaaaatcttactcatgttactattcaccatatatagtatttcgtcactgaagactttattcagacggagtttcacccttgttgcccaggctggagtgcaatggcacgatctcagctaactgaaacctccgcctcccagaaaagaaaaacctctttttaattggatggaaactttctacctgcttggcctggggcctctggaagtctgctgtgaatttgtattccctttcacctcctggaaggtgaagtaccccttcatccctttgttactaacctcagtgtattgtgcagtaggcatcacatatgcttggttcaaactgtatgtttcagtattgattgactctgctattggcaagacaaagaaacaatgaataaaggaactgcttagatatg

SEQ ID NO: 727 - DNA, 2170 bp, Homo Sapiens
  NM_001007067
ggctgaaggcgggggcggtgccatgacgcgcctcgggggcggtcctcgggcgcgcaccgctctcttacactcgggcctcagaagtccgtgccagtgaccggaggcggcggcggcgagcggttccttgtgggctagaatcctgcaaaaatgtctctctatccatctctcgaagacttgaaggtagacaaagtaattcaggctcaaactgctttttctgcaaaccctgccaatccagcaattttgtcagaagcttctgctcctatccctcacgatggaaatctctatcccagactgtatccagagctctctcaatacatggggctgagtttaaatgaagaagaaatacgtgcaaatgtggccgtggtttctggtgcaccacttcaggggcagttggtagcaagaccttccagtataaactatatggtggctcctgtaactggtaatgatgttggaattcgtagagcagaaattaagcaagggattcgtgaagtcattttgtgtaaggatcaagatggaaaaattggactcaggcttaaatcaatagataatggtatatttgttcagctagtccaggctaattctccagcctcattggttggtctgagatttggggaccaagtacttcagatcaatggtgaaaactgtgcaggatggagctctgataaagcgcacaaggtgctcaaacaggcttttggagagaagattaccatgaccattcgtgacaggccctttgaacggacgattaccatgcataaggatagcactggacatgttggttttatctttaaaaatggaaaaataacatccatagtgaaagatagctctgcagccagaaatggtcttctcacggaacataacatctgtgaaatcaatggacagaatgtcattggattgaaggactctcaaattgcagacatactgtcaacatctgggactgtagttactattacaatcatgcctgcttttatctttgaacatattattaagcggatggcaccaagcattatgaaaagcctaatggaccacaccattcctgaggtttaaaattcacggcaccatggaaatgtagctgaacgtctccagtttccttctttggcaacttctgtattatgcacgtgaagccttcccggagccagcgagcatatgctgcatgaggacctttctatcttacattatggctgggaatcttactctttcatctgataccttgttcagatttcaaaatagttgtagccttatcctggttttacagatgtgaaactttcaagagatttactgactttcctagaatagtttctctactggaaacctgatgcttttataagccattgtgattaggatgactgttacaggcttagctttgtgtgaaaaccagtcacctttctcctaggtaatgagtagtgctgttcatattactttagttctatagcatacttgcatctttaacatgctatcatagtacatttagaatgattgcctttgattttttttttaaattctgtgtgtgtgtgtgtaaaatgccaattaagaacactggtttcattccatgtaagcattaaacagtgtatgtaggtttcaagagattgtgatgattcttaaattttaactaccttcacttaatatgcttgaactgtcgccttaactatgttaagcatctagactaaaagccaaaatataattattgctgcctttctaaaaacccaaaatgtagttctctattaacctgaaatgtacactagcccagaacagtttaatggtacttactgagctatagcatagctgcttagttgtttttgagattttttagtcaacacataatggaaacttctttcttctaaaagttgccagtgccacttttaagaagtgaatcactatatgtgatgtaaaagttattacactaaacaggataaacttttgactccccttttgttcatttgtggattaagtggtataatacttaattttggcatttgactcttaagattatgtaacctagctactttgggatggtcttagaatatttttctgataacttgttccttttcctgactcctccttgcaaacaaaatgatagttgacactttatcctgatttttttcttctttttggtttatgtctattctaattaaatatgtataaataaagttacattttagtctgtctaaaaaaa

SEQ ID NO: 728 - DNA, 1767 bp, Homo Sapiens
  NM_001007073
aggggttacgacccatcagcccttgcgcgccaccgtcccttctctcttcctcggcgctgcctacggaggtggcagccatctccttctcgctggcgattggaagacactctgcgacagtgttcagtccctgggcaggaaagcctccttccaggattcttcctcacctggggccgcttcttccccaaaaggcatcatggccgccctcagaccccttgtgaagcccaagatcgtcaaaaagagaaccaagaagttcatccggcaccagtcagaccgatatgtcaaaattaagcgtaactggcggaaacccagaggcattgacaacagggttcgtagaagattcaagggccagatcttgatgcccaacattggttatggaagcaacaaaaaaacaaagcacatgctgcccagtggcttccggaagttcctggtccacaacgtcaaggagctggaagtgctgctgatgtgcaacaaatcttactgtgccgagatcgctcacaatgtttcctccaagaaccgcaaagccatcgtggaaagagctgcccaactggccatcagagtcaccaaccccaatgccaggctgcgcagtgaagaaaatgagtaggcagctcatgtgcacgttttctgtttaaataaatgtaaaaactgccatctggcatcttccttccttgattttaagtcttcagcttcttggccaacttagtttgccacagagattgttcttttgcttaagcccctttggaatctcccatttggaggggatttgtaaaggacactcagtccttgaacaggggaatgtggcctcaagtgcacagactagccttagtcatctccagttgaggctgggtatgaggggtacagacttggccctcacaccaggtaggttctgagacacttgaagaagcttgtggctcccaagccacaagtagtcattcttagccttgcttttgtaaagttaggtgacaagttattccatgtgatgcttgtgagaattgagaaaatatgcatggaaatatccagatgaatttcttacacagattcttacgggatgcctaaattgcatcctgtaacttctgtccaaaaagaacaggatgatgtacaaattgctcttccaggtaatccaccacggttaactggaaaagcactttcagtctcctataaccctcccaccagctgctgcttcaggtataatgttacagcagtttgccaaggcggggacctaactggtgacaattgagcctcttgactggtactcagaatttagtgacacgtggtcctgattttttttggagacggggtcttgctctcacccaggctgggagtgcagtggcacactgactacagccttgacctccccaggctcaggtgatcttcccacctcagccttccaagtagctgggactacagatgcacacctccaaacctgggtagtttttgaagtttttttgtagaggtggtctagccatgttgcctaggctcccgaactcctgagctcaagcaatcctgcttcagcctcccaaagtactgggattacaggcatcttctgtagtatataggtcatgagggatatgggatgtggtacttatgagacagaaatgcttacaggatgtttttctgtaaccatcctggtcaacttagcagaaatgctgcgctgggtataataaagcttttctacttctagtctagacaggaatcttacagattgtctcctgttcaaaacctagtcataaatatttataatgcaaactggtcaaaaaaaaaaaaaaaaaa

SEQ ID NO: 729 - DNA, 1787 bp, Homo Sapiens
  NM_001007074
gacctcctgggatcgcatctggagagtgcctagtattctgccagcttcggaaagggagggaaagcaagcctggcagaggcacccattccattcccagcttgctccgtagctggcgattggaagacactctgcgacagtgttcagtccctgggcaggaaagcctccttccaggattcttcctcacctggggccgcttcttccccaaaaggcatcatggccgccctcagaccccttgtgaagcccaagatcgtcaaaaagagaaccaagaagttcatccggcaccagtcagaccgatatgtcaaaattaagcgtaactggcggaaacccagaggcattgacaacagggttcgtagaagattcaagggccagatcttgatgcccaacattggttatggaagcaacaaaaaaacaaagcacatgctgcccagtggcttccggaagttcctggtccacaacgtcaaggagctggaagtgctgctgatgtgcaacaaatcttactgtgccgagatcgctcacaatgtttcctccaagaaccgcaaagccatcgtggaaagagctgcccaactggccatcagagtcaccaaccccaatgccaggctgcgcagtgaagaaaatgagtaggcagctcatgtgcacgttttctgtttaaataaatgtaaaaactgccatctggcatcttccttccttgattttaagtcttcagcttcttggccaacttagtttgccacagagattgttcttttgcttaagcccctttggaatctcccatttggaggggatttgtaaaggacactcagtccttgaacaggggaatgtggcctcaagtgcacagactagccttagtcatctccagttgaggctgggtatgaggggtacagacttggccctcacaccaggtaggttctgagacacttgaagaagcttgtggctcccaagccacaagtagtcattcttagccttgcttttgtaaagttaggtgacaagttattccatgtgatgcttgtgagaattgagaaaatatgcatggaaatatccagatgaatttcttacacagattcttacgggatgcctaaattgcatcctgtaacttctgtccaaaaagaacaggatgatgtacaaattgctcttccaggtaatccaccacggttaactggaaaagcactttcagtctcctataaccctcccaccagctgctgcttcaggtataatgttacagcagtttgccaaggcggggacctaactggtgacaattgagcctcttgactggtactcagaatttagtgacacgtggtcctgattttttttggagacggggtcttgctctcacccaggctgggagtgcagtggcacactgactacagccttgacctccccaggctcaggtgatcttcccacctcagccttccaagtagctgggactacagatgcacacctccaaacctgggtagtttttgaagtttttttgtagaggtggtctagccatgttgcctaggctcccgaactcctgagctcaagcaatcctgcttcagcctcccaaagtactgggattacaggcatcttctgtagtatataggtcatgagggatatgggatgtggtacttatgagacagaaatgcttacaggatgtttttctgtaaccatcctggtcaacttagcagaaatgctgcgctgggtataataaagcttttctacttctagtctagacaggaatcttacagattgtctcctgttcaaaacctagtcataaatatttataatgcaaactggtcaaaaaaaaaaaaaaaaaa

SEQ ID NO: 730 - DNA, 7666 bp, Homo Sapiens
  NM_001007075
ggtcccctacccccacctactcgcccgccccctccggggccacccggggactctgaccccccggcctggcgccgcctgacggagcgggagtggctcgctccgggccggccggcgccggggatgaggctgcccggacgggtctaggggcgcgcgaggggccgagcatcccactcagctcgccggccccggcccccgcctcccccgctcctcccgcctggccgccccggcccgccgtgacccacggccgcctccggagcccgacgcgcagggcatatacttctcttgtcttggttggatgcacaaatctgtgtgcagtgctttttgcccgttgcctagacgatcacttggtttctctgaggatgtctggttctcgtaaagagtttgatgtgaaacagattttgaaaatcagatggaggtggtttggtcatcaagcatcatctcctaattctacagttgacagccagcagggagaattttggaaccgaggacagactggagcaaacggtgggagaaagtttttagatccatgtagcctacaattgcctttggcttcaattggttaccgaaggtccagccaactggattttcagaattcaccttcttggccaatggcatccacctctgaagtccctgcatttgagtttacagcagaagattgtggcggtgcacattggctggatagaccagaagtggatgatggcactagtgaagaagaaaatgaatctgattccagttcatgcaggacttccaatagtagtcagacattatcatcctgtcatactatggagccatgtacatcagatgaatttttccaagcccttaatcatgccgagcaaacatttaaaaaaatggaaaactatttgagacataaacagttgtgtgatgtaattttagtcgctggtgatcgcagaattccagctcacagattggtgctctcctctgtctcagactattttgctgccatgtttactaatgatgtcagagaggcaagacaagaagaaataaaaatggaaggtgtagaaccaaattcgttgtggtccttgatccagtatgcttatacaggccgccttgaattaaaagaagataatattgagtgcctgttatctacagcttgccttcttcagctttcacaggttgtagaagcatgctgtaagtttttaatgaaacagcttcatccatccaactgtcttggaattcgttcttttgctgatgcccaaggttgtacagatttgcataaagtggctcacaattatactatggagcatttcatggaagtaatcagaaaccaggaatttgtattattaccagccagcgaaattgcaaagctcttggctagtgatgacatgaacattcctaatgaggagacaatattgaatgcacttcttacttgggtccgtcatgatttggaacagagacggaaagatctaagtaaacttttggcttatattaggctacctcttcttgcaccacagttcctggcagacatggaaaataatgtactttttcgggatgatatagaatgtcagaaactcattatggaagcaatgaagtaccatttattaccagagagacgacccatgttacaaagtcctcggacaaaacctaggaagtcaactgttggtacattatttgcagttgggggaatggattcaacaaaaggagcaacaagcattgaaaagtatgatctccgtacaaatatgtggactccagtagcaaatatgaatgggaggaggctacagttcggtgttgcagtgctagatgacaaactgtatgtggttggaggaagagatggactgaagactttgaatactgtagagtgctacaaccccaaaacaaaaacttggagtgtgatgccacctatgtccacacatagacatggccttggtgtggctgtactggaaggtcccatgtatgccgtaggaggacatgatggctggagctatctgaacacagtggaaagatgggaccctcaggctcgccagtggaattttgttgccactatgtctacccctaggagtacagtaggtgtggcagtactaagtggaaaactttatgcagttggtggtcgtgatggaagttcttgtctcaaatcagtagaatgttttgatcctcatactaataagtggacactgtgtgcacagatgtcaaaaaggagaggtggcgtaggagtgacgacctggaatggactgctgtatgctataggggggcacgatgctcccgcatccaacttgacttccagactctcagactgtgtggaaagatatgatcccaaaacagacatgtggactgcagtagcatccatgagcatcagcagagatgcagtgggggtctgtttacttggtgataagttatatgctgttggggggtatgatggacaggcataccttaatactgtggaggcttatgatccccagacaaatgagtggacccaggttgctccactgtgcctaggaagagctggagcttgtgttgtgactgtaaaattataatttagtgccccgttttctacatgaagacaccgtcttcctttattaatttagtataattattctatcaatggatacatttttagtaaatgtgcattgtcacaatcctgggcacaaagtgcctgatgtcaaaatgaagatagtaaaacaagggaggaagcagtggatggaccaggattaattcctttcatttcttagtaaattaaaacctgcagctggtggattgtgatcacacattcccgaagtaataagtgaggacgaatgcactgctctggaacataacccagtgctaactgggggtttcatttattcagtcaagcacatcttactcacatccagatttattttcctacagtgcaaacacaccagatgaaactttaaaatgttactttttgtaagcttatcataaatgagttgcagtaatttgtttgcttgtttgtttaaccacaaccactattttaatgatatactaaagataacactatttagttttttcagaaacatctgcattatatgtgtgttggttgtggattttgtttctaaaattggcttagtccaataaataaagaaaagcattaaggacttaaagcaacaataaccaaataaaaacttgataggatctttgaagtctatttaaatattcattccattacatctagactcaccaagaactacatgttatgatgttaagttgaagttgaaacatgatgttttgcattaaatttaagatatgcaaatttatgtagagaaaataaatgttatataccctataatctttcacctaattagtatttaattatatggatttgttttatattataaaagatgttttgattttgtcttttgatattgacaaaattgtttggatatccttatgttctcaagtctgtatctgcctcccctgccttatttcttatgttttgccacagttaacccattgtgcttctttgtaatcaaacagtttgtgggagaatgggcttattgaatgtctaaaaaataagtttaaagtgtttgttaccctaagttttttacatttttaaactctaattacatatgtgaatgttattactctcagtgaattgttattgtttgcaaaaatgcactgggcagtaacattttgtgataaatcctataagatataagtcattgagatgtctaagatgctttttattttaaccccagttaataaccaccttacggaaaataatatttgctaatattgtttattgtgaactaggaatcaaagtttttgtatgcatcaatgcacttaatccttataacaaccttatgaggtagttctattccctttttatagctaaggaaattggggtacagagaagttagccccaaggttatatattgcaagtaagtggcagagcagggattcatacaaagaccttctcactcagcagtcttcactcttactattcctgccactaggtagaaaaagaaagatttcggccgggcacagtggctcacgcctataattcccagcactttgggaggctgaggtgggcggatcacgaggtcaggagatggagaccatcctggctaacacagtgaaaccccgtctctactaaaaataaaaaataaaaaaaaattagccaggcgtggtggcgggtgcctgtacgcccagctactcgggaggctgaggcgggagaatggcgtgaacccaggaggaggagcttgcagtgtgccaagatcgcaccactgcactccagcctgggtgacagagcgagactccatcaaaaaaaaataaataaaaaaaaaataaaagatttcattttatgtgaggaattattttaataaaaaaaagagggtttatgctctatagtaataaaatttaccagtaacacccaatcagaaaattttggttccttagtatttagggaagacttttgtttaaatctcttatggaattttacatgttttgatttagaaaagtagatgcaatataatatatttcaagttttatacatattagatgaattgcatggtattttaggcaacttaactataaacaaatttattcatagaagcattgttgccaacaatttagatgacctcgatgaaaaaacacaccaattgacaaaactggctcaaaaggaaataaaaaatccaaacagacctgtaacaagtaaagagattgaaccagtaatcaaaaatctcccaacaaagaaagtccaggactaaatgagtttactggcaaactatgccaaacatataaagaagaattaacactaatccttctcgaactctcccaaaaaatggaagagaaaggagcaccctgtgacattctataaggcggacattaccttaacaccaaagccagacaaagacctcacagggaagctacagaccaatatcccttatgaatatagatgcaaaaaaacttcaaaatactagcaggccaaatccagcagcttattaaaatgatcacacagcatgaccaagtgagatttatcaaagaaatgcagggatggttctacatacaaatgtcaatcgatgtaataatataccatattaatagaatgaaggggaaaaaacagcatgatcacctcaattgataagaaaaagcatttgacaaaaatccaacaccctttcatggtaaaaacactctgcaaactaggaagaaaagggaactttcttaacctgataaagacatccataaaaacccacagctaacaacataatagcaaaacattgaaaatttttcccctaatatcatgaaaattcctgatttccccactgctattcaacattatactagaaggtctagccagagcaattaggcaagaaaaagaaataaaatgaatcccaaataggaagaagtaaaactacatttgcagaaaacatggtcctatatattaaaaatcctaaagaatccacaaaatgattccggctgattttaaaaattcagcaatgttgcaggttgcaagatcaacacacaaaagtctaagaaaaacctgaggggaaattaaaacaatttcatttacaataacatgaaaaagaataaaatacttagaaataaatttgaccaagaaagtgcaagacttggacactgaaaagtacaaaacgttgctgaaagaaattaaagaagacctaaataaatggaagacatcctgtgctggcaggttggaagacttaacattgttaagatggcattactcccaaaattagtctatagatttaatacaatccccattaaaattccagtgacccttttacagaaactgaaaagctgaccctagaatttatatgggattgcaagttactgaaggtactcaagtctgttcaaaacaatcttgaacaagaataaagttgaaggactcacattttccaatttcaaaatttactgcaaagctacttcaatcaaaacagtgttgtgctggtataaaaatatataaagcaatagagtagaatggaaagtccagaaacaaattacgccaatacactatggtcaattgatttttgacaagggttccaggaccattcaatgaagaaagaacagtgtcttcaactaatagtgctaagacaagtgaatattcacatgcaaaagaatgaatttgtacctgtacttcataccatatataaaaattaattcaaaatagatcaaagacctaaatgtaagagctaaaaccataaaactttgagaagaaaatacaggaataaatcttcatgaccttggatttggcaatggtttcttagatatggcaccaaaagcacaagcaacaacagcaaaaaaaaaaaaaaaaaaaaaaaatcaaaattaaaagcttctacatatcaagggacactatgaagaaagtgaaaagacaacccacagaatgggagaaaatatttgtaaatcttacatatctggtaaggaactaatacctagaatatataaggaactccgatgctcgacaacaaaaagacaaaccaattttaaaatgggcaaaggacttaaatagacatttctctaatgaagatatacaaatggccgacaagcacatggaaagcactcaacctcatcagtcattatgcaaatcagcgccacaagaagataccacttcacacctattagaatgacgaaatagacctaggatctaaacctacaggaaaaaaaatgaataatagagaaaataaatgttagagaggatgtggagaaattgaaaaccttcattcgttgttggtgggaatgttaaatggtgtagccactgtggaaaacagtttggcagttcctcaataagttaaaaaaaagaattaccatatgacccagcaagtccactcctgggcatatactgaaaagaactgaaaacaggtgttcaagcaaaaactttcacgcaaatattcattgcagcactagtcacagtagccaaaaaagaggaaacaacccaaatggccatcagctgatgaatgaataaacaaattgtggtatctccacacggcacaatagaatattcagccataaagagaaatgagggactgatacatgctaaagcatggatgagccttgagcgcatttttgccaagtgaaagaaggcagacacaaaaggcaacgtattgcatgagtgcatttatatgaaatatccaaaataggcaaatccatggagacagaaagcagataaatggttgtaagaagctgagagaaaggagtggggagagattgctaaaaaggagtttccttctagggtgatgaaaatgttctggaactacttattggggatgattgcacaacatggtgaaggtactcaatgtcactaatggtaaatttcacatacactttaccataatttttaaaaagctttattagctacattatgttatgatacttaaatgtcataacaatagcattctgtacgcttcactaggataaaaacttcggatttatatgcatctggaagagaaatttttcactgtaatttgcaaataaatgaatttctaaaaatctaacagaaaggctcttaaatcttaatttcaacctaagaagggagtgagaaacaacgagaaccatgaggggagagttaacggggaacttccccaccgtccggtacatggcaggcattccacaaatgttttctgaaagttgaaatagacatcttttcatgaactctgtaatatttgaaattattgataactcttacacaaaaacaaatattcaataaaatgatatttaatttcactgtgaaaaaaaaaaa

SEQ ID NO: 731 - DNA, 2798 bp, Homo Sapiens
  NM_001007101
attgagaaaaaggaagtgggtcctgttctggttcttgcgactatagtcacctcccgaggcaaatgaccactgtcctgagaggacgtgggtgaggggcaggaatcagtgtcattcaaggacgtaactgtagacttcagtagggatgagtggcaacaattagaccttgctcagaaaagcctgtacagagaagtgatgctggaaaactatttcaacttgatctcagtgggatgtcaagttcccaaaccagaagtcatcttcagcttggaacaagaagagccatgtatgttggatggtgagatccccagtcagagccgtccagatggggacattggttttggacctttacaacagaggatgtctgaagaagtttctttccagtctgagattaatattaatctcttcacaagagatgacccatattccattttagaagaattgtggaaagacgatgaacacacaagaaaatgtggagaaaaccagaacaaacctttaagtcgtgttgtcttcattaacaagaaaacactagctaatgacagcatctttgaatataaggacattggggaaatagttcatgtaaacacacacctggtttcctcaagaaaaagaccccataactgtaactcgtgtggaaagaatttggagcctatcataaccttatataatagaaacaatgcaacagaaaattctgataagactattggagatggtgatattttcactcatttgaattctcatacagaagtgactgcttgtgaatgtaaccaatgtgggaaacctctgcatcataagcaagctctcattcaacaacagaaaattcatactagagagagcctctatttgttttctgactacgtaaatgttttctccccgaagtcacatgcctttgcacatgagagtatttgtgctgaagaaaagcagcatgaatgccatgaatgtgaggcagtcttcactcagaagtcccagcttgatggcagtcagagggtttatgcaggaatatgcactgaatatgagaaggatttttccctcaagtcaaaccgtcagaaaactccttatgaggggaattactataaatgcagtgactatggaagagcctttatccagaagtcagatctgttcagatgccagagaattcattctggagaaaaaccttatgagtacagtgaatgtgagaaaaacctccctcagaattcaaaccttaatatacataaaaaaattcatactggagggaaacactttgaatgtactgaatgtggaaaagctttcacaaggaaatcaacactaagtatgcatcagaaaatccatacaggagaaaaaccttatgtatgtactgaatgtgggaaggcctttatccggaagtcacattttatcacacatgaaagaattcatactggagaaaaaccctatgaatgcagtgactgtgggaaatcctttattaaaaaatcacaactccatgtgcatcagcgaattcacacaggagagaatccctttatatgttcagaatgtgggaaggtcttcactcacaagacaaatctcattatacaccagaaaattcatacaggagaaagaccctatatatgtactgtgtgtggtaaggcctttactgacaggtcaaatctcattaagcaccaaaaaattcatactggagagaaaccttataaatgcagcgactgtggaaaatcattcacctggaagtctcggctcaggatacatcagaagtgtcatactggagagagacattatgaatgcagtgaatgtgggaaagcattcattcagaagtcaacattaagtatgcaccagagaattcatagaggggaaaaaccatatgtttgcactgaatgtggtaaggccttcttccacaaatcccattttattacacatgagagaattcatactggagagaaaccctatgaatgcagtatttgtgggaaatccttcactaagaaatcacagctccacgtacatcagcagattcacacaggagagaaaccctataggtgtgctgaatgtggaaaggcttttactgacagatcaaatctctttacacaccagaaaattcacactggagagaaaccttataaatgtagtgactgtgggaaagccttcactaggaagtcaggtctccatatacatcagcaatcccatactggagaaaggcattatgagtgcagtgaatgtgggaaagcctttgcaagaaaatcaacactaattatgcatcagagaattcatacaggagagaaaccctatatttgtaatgaatgtgggaaatccttcatccagaagtcacacttaaatagacacaggagaattcatactggagagaaaccctatgaatgcagtgactgtggcaagtctttcattaagaaatcacaactccatgagcatcatcgaattcacacaggagagaaaccatatatatgtgctgagtgtggaaaggccttcaccatcagatcaaatcttattaaacaccagaaaattcatactaaacagaaaccctataagtgcagtgacttggggaaagccttaaactggaagccacaactcagtatgcctcagaaatctgacaatggggaagtagagtgctccatgccacaattatggtgtggggactcagaaggtgaccaaggccaactttcttctatctagttagaattatgaacatctggatcatatagctgatgtgtagttacacatatggggagacacttttgagagtgtttaagcaatgtatagtggccatctttggttacttgatattggtgttgtcaagctcctgcaaataatagtaaatgtgcaaggag

SEQ ID NO: 732 - DNA, 3421 bp, Homo Sapiens
  NM_001007157
gtatccgggtcgctgctttccctattgtctgaggcagccgccctcgcgctgtgcaatttctggtctttcgttgcttctggtccaggctaataaagtttttctttctttaattttttttcttctagttttaacgggagaaattaactccccggggccgccgggttgactgcgctgcctgggccggaggtcttctccggccagggagcgctgtgggaaggggctcgagcggccagggccaggcgaggccgggggggcggggggttaggggaccgcggggctactcttgggagcgcccctgtccggctggctgcgcgccggttttaaatagcatctttcggacttgtcttcgcggccccagtccccgacctcggcgctgcctgggctcctgcagcctctccctaagtcttctccaaacgaccacctcacggattccttatggatcgcagctccaagaggaggcaggtgaagcctttggcagcttctctgctggaagctcttgattatgatagttcagatgacagtgattttaaagttggagatgcctcagattctgaagggagtggtaatggaagtgaagatgcttcaaaggacagtggagaaggttcctgtagtgattctgaagaaaatattttagaagaagaactgaatgaagatattaaagtaaaagaagaacaacttaaaaattctgcagaggaagaagtactatcatcagaaaaacaattaattaaaatggaaaagaaggaagaagaagaaaatggagaaagacctagaaagaaaaaggagaaagagaaggaaaaagaaaaggaaaaggagaaagagaaggaaagagagaaggaaaaagaaaaagcaacagtatctgagaatgtggctgcttctgctgctgccaccacaccagccacaagtcctcctgctgttaacacatccccttctgttcccactacgacaaccgctacagaggaacaagtcagcgagccaaaaaaatggaaccttcgacgaaaccgaccacttctggattttgtgtccatggaagagctgaatgacatggatgactatgacagtgaggatgacaatgattggcgacctactgtagtaaagagaaaagggagatctgcgtctcagaaagagggaagtgatggagacaatgaggatgatgaagatgagggaagcgggagtgatgaagacgagaatgatgaaggcaatgatgaagatcatagtagccctgccagtgaagggggttgcaagaagaagaagagtaaagttcttagcagaaacagtgctgatgatgaggaactgaccaatgatagcctgaccctatctcaaagcaagagtaatgaggactcgctgattcttgagaagagtcaaaactggagctctcaaaaaatggaccatattctgatttgctgtgtttgtctgggagataatagtgaggacgctgatgaaataattcagtgtgacaattgtggcattacagtccatgaaggttgttatggagttgatggagagagtgactctattatgagttcagcttctgaaaactccactgaaccttggttttgtgatgcctgtaaatgtggtgtttctcctagctgtgaactgtgtcctaatcaggatggaattttcaaggagacagatgctggaagatgggttcatattgtttgtgccctgtatgttcctggagtagcctttggagatattgacaaattacgaccagtaacactaacggaaatgaactattccaaatatggtgccaaggagtgtagcttttgtgaagaccctcgctttgctagaactggggtttgcattagctgtgatgcagggatgtgcagagcctatttccatgtgacctgtgctcaaaaggaaggtctgctttcagaggcagcggcggaagaggatatagcagatccattctttgcttattgtaagcaacatgcagataggttagacagaaagtggaagagaaaaaactacttggctctacagtcctattgtaaaatgtctttgcaagagagagagaagcaactatcaccagaagcacaggcaaggatcaatgcccggcttcagcagtatcgtgccaaagcagaactagctcgatctaccagaccccaggcctgggttccaagggaaaaattgcccagaccactcaccagcagtgcttcagctattcgtaaacttatgcggaaagcagaactcatggggatcagtacagatatctttccagtggacaattcagatactagttctagtgtggatggaaggagaaaacataagcaaccagctctcactgcagattttgtgaattattattttgagagaaatatgcgcatgattcaaattcaggaaaatatggctgaacaaaagaatataaaagataaattagagaatgaacaagaaaagcttcatgtagaatataataagctatgtgaatctttagaagaactacaaaacctgaatggaaaacttcgaagtgaaggacaaggaatatgggctttactaggcagaatcacagggcagaagttgaatataccggcaattttgcgagcacccaaggagagaaaaccaagtaaaaaagaaggaggcacacaaaagacatctactcttcctgcagtactttatagttgtgggatttgtaagaagaaccatgatcagcatcttcttttattgtgtgatacctgtaaactacattaccatcttggatgtctggatcctcctcttacaaggatgccaagaaagaccaaaaacagttattggcagtgctcggaatgtgaccaggcagggagcagtgacatggaagcagatatggccatggaaaccctaccagatggaaccaaacgatcaaggaggcagattaaggaaccagtgaaatttgttccacaggatgtgccaccagaacccaagaagattccgataagaaacacgagaaccagaggacgaaaacgaagcttcgttcctgaggaagaaaaacatgaggaaagagttcctagagagagaagacaaagacagtctgtgttgcaaaagaagcccaaggctgaagatttaagaactgaatgtgcaacttgcaagggaactggagacaatgaaaatcttgtcaggtgtgatgaatgcagactctgctaccattttggctgtttggatcctcctttgaaaaagtctcctaaacagacaggctacggatggatatgtcaggaatgtgattcttcatcttccaaggaagatgaaaatgaagctgaaagaaaaaatatatctcaggagctcaacatggaacagaaaaatccaaagaaataaaagattttctgtagtgtttttgaaaagtttgcagcttatgtaatagcagataaaatttctaattgtaaaatgttaaattgtaaaatctaatttgcaaaatgttctcaataaagtcattcaaaatgaaaaaaaaaaaaaa

SEQ ID NO: 733 - DNA, 2900 bp, Homo Sapiens
  NM_001007189
ggaaagatttttgagtctacaactgacaaaatgtcttcttcaaattaaaaaaaattgagaagcagcactttaagtctaactctacaccattttattgcatgtattagttttattaatgatttttggtgcatgcctttgggcttattcaaaagtgtacaataggaaagtatatttcctttcttagaaaggagatgttttctactttgcaacatgtgattacaaaaatcttcctctgtgggaagattaaccatgtattgaactactgaaaagtatatatttttagatatacagaaggaatctacatggagcagcattcagacctatatagaagtcatagcattctgtataggaccaaaaaggaaataacattaaacacttaaacagacgttgttgggtagaaatacctttagatcttgcatttacttccaaaaagaaaaaatgccacagaagtttgctgaaaacttttgtcgtttgaattttctctgtcagtgtatttagcccaaatacaacagctttgggttagcacacacataagaatcaaaaaaacaaagctcactaaataaatcagtctggtttgccaatccagcttgactgaaataagtaaaccaatcacttgcaacatgaaaaactgtccaactcctctaaggttctgacaaaataaccttggctgatgtgggaagactcccactttgattactgacctgacagtgaagattcatgcttgacatgatttcagacttgacaatgtctgtttaaggagctatggtacagtttgctaattcaatcccagatacctgttgattacctgtgagatctagagtccaaagtagccagcagccatatccctgagtgctctgtgcccatcagatatcttaaagtaagcagggttgggacaggtcacagcttggatgattgacctcaggtgccgtagacagccccagattcaagaattgtatctgctttcttggcagtcgtcactgaactaatgtcccatactgtgttacttactgtagatgctctcttttagaggaggcccagagcacacatcctaatcgctagcggtactcagagagggggtgctaactctgatgccctggccaaattccagtttagggatgtgggtcttcttcttgtcattctaattggaaatgtgcatcacttcccatttttcttactgatctcagtgcaaactacactagtctgtttctttgccctggtctcaagtctctaagacgctggtgtgtattatgtgggctaagttcatgtgttatcctaaggcacaagagttgaggaatgggtgagcttggtgtcagagcactgtgtggttggagggtggactcttgtgatgctgtggggatgaaattggccctcttttagcataagttggggagtgtgcactggctggaggcttccagaggcttccagccatgaggtgtgagctgaaaccaatttttcctctttccttatagcatgttgagaaaatctgttgggttttcagcagtcagggaaggccggagttctgctttaatctgggtaactgaggctaatatgagcaagactttggttaattaactgggttctcagatgccacagactccgtgagaagtcaccattattttcaatggttgtgatagaatttcccccagtagccattattttaagattatattgcagagttgctttattttgagctttttgtgtatacacaatcccaaactggaagaaattttaaaaaaaggaatcctgctgtgaaaggtatatattactctagatttttcttactgtaaatattgtaagattgtaatactgtcgatattttattaaccaacaaatgttaatctatgtgaaatcagacttattttaaatgtgcttcttatttactgtgtgtggtccctgttgctgacagtattaagttatattctgatgtaagattaactttattaaagaatgtaaacattaatgtttccttatgggaaaacaaataaagtataaagaagacaattcttttcattgaaatatactgtgtatttacacttgctagacccagcaccacttataaatttagtacactgttcagaattttagttaacacagctgacatggttgtgctctgtttgaaagtctaagaataggtattgttggaatatacagtttgtatttgtctgctgtgaatcataatcttgaaatttctaatcaagtttgtaaaatttttatagtgaaacattttaatgacaatttaaaaatttatcttctctaaagaatggtcaaaacaatatcctttcagaaatagaattgttctttaatatctttccaaaatgactttggttaaatggaccagatgtatattagttaaaatttaggactaagttgttgatattctttgagtttacaagttaatccttattggagatgtgccaatatacagttagaatatcattaatttgcactgtttggggaccccatttaagaatgctgaattttgccaactaagaagtaagcaaatgcaatttaaaaagtaaatttgagcattctgtattaaatatgtgcagttattatcacatgaagaaacgcagtgtgtcgggctgtaatattaccatatttgctgtcatgttctcccatctcagtgctgggaaatcaccatgtggaaaccaagcaaacgtgttgtgcatcagccggcttgagtttgttcaatatcaaagctgaaaactagcgaggtctgctgtactgcttattgaagtattgtgattattttaggcattgattcttacaaaatatatactgtaacagtatactttgtacagatttaaattttatttgaaaaaatgaaataaagtaggcaaaaaaataaagatgtttatttttcatgtgactaaaaaaaaaaaaaaaaaaaaaaaaaaaaa

SEQ ID NO: 734 - DNA, 3198 bp, Homo Sapiens
  NM_001007224
ctctttcaagggcaggtctccagcccagctctctgaaaacattttgctgaaaatataagcaaacatcggccttgtcctccttgtgttcatacactgtggaagcttttctctgcctcctccgtgagagtgcgtggccgggagaccagaaacgtggtcctttctcttgcctgtgagctggtgcagagatggaggaagaagaatatgaacaaattccccaggagaatcccccagaagagctgtcccaggatcctgtgctggagctgtcaggaggtctcgccagaggtggcagacgctatctgccaagccatcgtcttatccgccccagggccccacgccgtgctcctggtgacacaactgggccggttcacggatgaggatcagcaggtggtcaggcgcctgcaggaggtctttggagtgggggttctgggtcacaccatcctggtgttcacccggaaggaagacctggctggcggctccctggaagactatgtgcgagagaccaacaaccaggcccttgcctggctggatgtgacccttgcacggcgccattgcggcttcaacaacagggcacagggggaggagcaggaggcccaactgcgagagctcatggagaaagttgaagccattatgtgggaaaacgaaggagattattacagcaacaaggcttaccaatatacccagcaaaactttcggctgaaagaactacaggaaaggcaagtaagccagggccaaggctctgaggacgtgcctggtgaggagtcttggctggaaggactgtcccagatccagaaggaatctgaggaagcccacagatgcctgctggggaaggctgacctttgagcctgtgctggacttgagccaaggacaccatcagcctttgcacccccctgtgtccagccctctgtttctctttccatcccatggagtgcttcccagtctccaggtcatgacgtctggtgtaggaagaggggcatggggcttgaggacagggtccagcatgcccagatcacattccagttccttcattccttcttccagaacatctgggtcctccctcctctgtgccccaacagcacgctgtcttcctattggaccttctatctcattggcattgcctttcatgagttacttgtctatactctgatagaaccaaagtttcttgagggcaggcctgtatcttttacttctgtgtaacttccacagcttttgactgcattggagtcatgcagtcacgtttggtgcggcaactccatgcaagctgttgaccagatgacttctcatctctccccacaccatgatggtttaaggtgcctgttgtgtctggtggctggaacatggcagtggtgctgagacatggggagggttggagactgggtggggagggttggagactgggctgggaggagagcaagcaggaacagggatggaggcaggaggagcagcccttttattcactcttgagctgtaacaaacaagccccgttggaacttcctagtgggaatgatgggagaagtttggggcagggtatccaagaagtcagactgtggtcaagtaggtggtcccttgccctggctacagaacatggaagcccctagggatgcaagtggacttgggcagaggaggtcacaccaccccaccaaggtagacttagattagagatgacttgcatctgttacttcccctttttccatgggtttcatggcccctcatgatatttgccttctgctcctagaaggcacagactactttcaacctgcctcgcccttcactgccacccctcccttctcccttgataatgggagcatgtggatggggtgtctgcgtgtgcaaacgggttccctagcaaagtatttgtgggggtccaatgcaaggaggcagggaagaaagggggcctgcaaaggaagcagtagagtgacttaaacatcttgcgaggcagcctgcctggtttatgggagaactctgaagcccatgatgttttcctggaaggctgttcctacagacggggtttataagtactgatactggacaggatgagaagggagtaggatgtcatcctgtctcaggcctcggataggaagctgcctgccagcaagaggagactgatgtgccccgggtgcaccccacctcctttgaggtccaagatgctcctggggagttgaccgacatttgggaagataataggaggcattggggaaactgctccccaatatattcctcttttcctttcttcaagctgcgtagcagggggcctttagctagtttctcccgagaggggcgggaagtacagctggtggagacagtgctgggagatgatcagaaatctcagggcacagcctcaggtctacctggacactcatccactgttggagatgctcaacagctagacacagatgctcacagccgacctgtggcctcttgctctgaagccatcccccatcttccctagacacagcagacatctgagaaagcttcagcatttctcttgctaacagattcagaaaagtgtctcaaagcagagcacagagttatttggtgtttgctgaagacagcctttgtgccacaatcacttattaaataagcgatcaatttcccattgaactgaacatgcaacatttatcatacattcagttctcattcacactccttaagatttggtcagaatttttatttctgttcatgtcttctacttttctactcctgtatgaataaaatattgatttgattacagtggctttgactataatgtgggagccaatttttgcctcagtcttcatttttatatttaccttgttattctcaggcatttttttcttctatgtgagagttaaaatcattctgtaatttccccccaaaatcatattggtattctagttggcaatgtcttacatttatgttaagtttgagggaattggtagttcaagtataagttaattaaggccattttatttctaagtgaacagacttgaaactccagagctactgaagtaaaagttagaatcatttgcattttcattcagataggagataattttgtaaattttgatgctattattttaactctattagcttaagtaatgtcataatagaaaacacaagcatttgaccaaatgagatccattcagcgactaactggcaaggcactcaaaacatgtcattcattaaatgttgtttttatttacctcaaaaaaaaaaaaaaaa

SEQ ID NO: 735 - DNA, 3034 bp, Homo Sapiens
  NM_001007230
ggggaggaggccgcgcggggtggggtctggcggtacgcgctggctgcgtcgacgtgctgacgccatgacgccccggctggtgtgtgtcggtgtgtatgtgtgtgtgtgagtgtgcgcgctccgagtgtgtgtgtatttgtgtatcggcggtcccgcaggtcccggatgttgcggacagtatgaggcaagcgcagggggacggggaccagcagctgtcgccgccgctctcaggctctgggaaccacccttctactttctgtctctaggaatttcactactctagagatttcctgttagacaagacaaattagagttttcctactgacttaacttgggtgaagagggaacagaaatctttgccccctgactttggaaatctcgtttaaccttcaaactggcgatgtcaagggttccaagtcctccacctccggcagaaatgtcgagtggccccgtagctgagagttggtgctacacacagatcaaggtagtgaaattctcctacatgtggaccatcaataactttagcttttgccgggaggaaatgggtgaagtcattaaaagttctacattttcatcaggagcaaatgataaactgaaatggtgtttgcgagtaaaccccaaagggttagatgaagaaagcaaagattacctgtcactttacctgttactggtcagctgtccaaagagtgaagttcgggcaaaattcaaattctccatcctgaatgccaagggagaagaaaccaaagctatggagagtcaacgggcatataggtttgtgcaaggcaaagactggggattcaagaaattcatccgtagagattttcttttggatgaggccaacgggcttctccctgatgacaagcttaccctcttctgcgaggtgagtgttgtgcaagattctgtcaacatttctggccagaataccatgaacatggtaaaggttcctgagtgccggctggcagatgagttaggaggactgtgggagaattcccggttcacagactgctgcttgtgtgttgccggccaggaattccaggctcacaaggctatcttagcagctcgttctccggtttttagtgccatgtttgaacatgaaatggaggagagcaaaaagaatcgagttgaaatcaatgatgtggagcctgaagtttttaaggaaatgatgtgcttcatttacacggggaaggctccaaacctcgacaaaatggctgatgatttgctggcagctgctgacaagtatgccctggagcgcttaaaggtcatgtgtgaggatgccctctgcagtaacctgtccgtggagaacgctgcagaaattctcatcctggccgacctccacagtgcagatcagttgaaaactcaggcagtggatttcatcaactatcatgcttcggatgtcttggagacctctgggtggaagtcaatggtggtgtcacatccccacttggtggctgaggcataccgctctctggcttcagcacagtgcccttttctgggacccccacgcaaacgcctgaagcaatcctaagatcctgcttgttgtaagactccgtttaatttccagaagcagcagccactgttgctgccactgaccaccaggtagacagcgcaatctgtggagcttttactctgttgtgaggggaagagactgcattgtggccccagacttttaaaacagcactaaataacttgggggaaacggggggagggaaaatgaaatgaaaaccctgttgctgcgtcactgtgttccctttggcctggctgagtttgatactgtggggattcagtttaggcgctggcccgaggatatcccagcggtggtacttcggagacacctgtctgcatctgactgagcagaacaaatcgtcaggtgcctggagcaaaaaggaaaaaaaaaaaagaaaggacattgagttttaacagaagggaaaaggaaagaagaaaagatttttgcagaatttctcaaaaatcagtttgtggattccagtagtatttatattgagagaaacaaattttagtccttctaactgtgctaaaacttggatatttgtgaaaactccttaccaccatacaagcatcagaagagctctcttgttgttagcacttattgtttgcaagaacagaatacatccttttatccttttatgaaaaatgacaagtgaaggcaaaaggggaaggttatttgatctggaagatgagtgttctgatgtggtggcttttgcaaaaatctttattggtgttgaaaactggaaaaaataactcatccagaattcatattgtcttgacaagaactatggttctctgtttttagatattgtggaaaatgtttttgggcatttttctctgattttatttcttctcccccacccctttttctaaaaaacaaacaaaaaaaaaaacacacaaaacaaaaacagaacaaaagaagagagaaggaaattttatcaattaaaaatgctgtgtgataaaatcccagcccagattgctcagctgtttgtacctgacttgccgcctgcataggagccagttctgttccttctgactagcccctcttcctccaggggagaacttccaaatgttaatttttttttttttgaaaatataaataattactattttgtactgtgtggtatctctggtcttttgtttcactcacctgccttgtctcttgggtctgagtcccttgcttaagggattttgaagtcctagttttcagcttgcagagattatgtctgaaatgcctaatgagtcgcagggatttgttgagactccgtaatctcaagttctctttgtgagctatcagcatctgccagtctcttgtcctccctgagtatctcacagtccatatcctgatgagggatcaggcccctacctctgccaaggcaagtaatggtagtgggcttttaaactgccccccgtatgttttaagacctaatccccacctcccttcttctaactaaatataaaaagatccaggggacataaatgtggagattaaataaagggaaattattgtctctaaaaaaaaaaaaaaaaa

SEQ ID NO: 736 - DNA, 466 bp, Homo Sapiens
  NM_001007232
gggaggagagaaaagccatggccgacaaggtcctgaaggagaagagaaagcagtttatccgttcagtgggcgaaggtacaataaatggcttactgggtgaattattggagacaagggtgctgagccaggaagagatagagatagtaaaatgtgaaaatgctacagttatggataaggcccgagctttgcttgactctgttattcggaaaggggctccagcatgccaaatttgcatcacatacatttgtgaagaagacagtcacctggcagggacgctgggactctcagcaggtccaacatctggaaatcaccttactacacaagattctcaaatagtacttccttcctaggttcaactttcatttgagcagccagatgataaagcacagatgcccagcactgaaagagttacttcgacaagacgtttctatctcttcccagtacattaaaataaggaagctgtatg

SEQ ID NO: 737 - DNA, 2953 bp, Homo Sapiens
  NM_001007239
gagttgggctgggccggccgacgaatcacgaggcttcgcacccggatatggttatgggctcggaaatctagttcgggaaaagtgtgaggggctcttcacgtggggaaggaacagcaggcgcggaggagggggcaagcgtgtgtgagattcagtggtccatgcgtgcgtttgtcgtgtaagggtcattcctggggtttggagtgggggaacaaatcaatgtggctgtttttccgtggaaagaattcccactgcagtgtcccggagcctgcgtgtggtgggcaagctcctcaaatggtatctcacagggaataggggagtcttgaaaacgcagcttcggcagtaggaacatgaacctcttacctaaaagttccagggagtttggctccgttgactattgggagaagttcttccagcagcgaggaaagaaagctttcgagtggtatggaacctacctggaactgtgcggggtgctacataaatatatcaagcccagggaaaaggtgctggtgattgggtgtggcaactcagaactgagtgagcaactgtatgatgtgggctatcgggatatagtgaacatcgacatcagtgaggttgtcatcaagcaaatgaaggaatgtaatgccacccgacggccccagatgagcttcttgaagatggacatgacgcagatggagtttcctgatgcctcgttccaggtggtgttggacaagggcaccctggatgctgtcctgacagatgaggaagagaagaccttacaacaggtggacaggatgctggctgaggttggccgtgtcctgcagggccgggagaccgagtggctctttggcatggatgagggccggaaacagctggcggccagtgctggcttcaggaggttgattacagtggcccttcaccgaggtcagcagtatgaaagcatggaccacatccaagctgagctgtcggctagagtcatggagctggccccagctgggatgcccacccagcagcaggtcccctttctgtctgtgggtggggacattggggtccggaccgttcagcaccaagactgcagccccttgagcggtgactatgtcattgaggatgtgcaaggggatgacaagcgatacttccgtcgactgatcttcctcagcaacaggaatgtggtgcagtccgaagccaggttgctgaaggatgtgtctcacaaagcccagaagaagcggaaaaaggacaggaagaagcagcggcctgctgatgcggaggacctccctgcagccccggggcagtccattgataagagttacctgtgttgtgaacaccacaaagccatgatcgctggccttgccctgctgagaaacccagagctactcctagagatcccactggcattgttggtggtaggcctgggcgggggcagcctccccctctttgtccacgatcattttccaaagtcctgcattgatgctgtggagatcgatccctccatgttggaagtggccacccagtggtttggcttctcccagagtgaccgaatgaaggtccacattgcagatggcctggactatatcgccagcttggcaggaggaggagaagcacggccttgctacgatgtcataatgtttgatgttgacagtaaggacccaacactgggaatgagttgtccgcccccagcatttgtggagcaatcttttctacagaaggttaaaagcatcttgactcctgaaggtgtttttattctcaaccttgtgtgccgagacttggggctaaaagactcagtgctggctgggctcaaggcagtgttccccctcctatatgtccggcgaattgagggtgaagtgaatgagatcctgttctgtcagctgcaccctgagcaaaaacttgccacaccagagctcctagaaacagcccaggctttggagcggaccctgaggaagcctgggaggggttgggatgacacgtatgtcttgtcagatatgctcaagacggtgaaaattgtgtgactgcttaggccaagcagccctcctgcctagactgaccttggactcccagcctgccagagaatgaagaaatacaacgcacagtacttttgaagcttcgtatttttcttggtttcacactcagctacatgtgacctccagcttggtgaggttgcctgaagattagggaaaataaaaatgtccttcccatcttgtcctcttcagtaccacttgggttggtttgtctttgcttcctacaccacgtccttgagtggagttccctgctgaagcccctagcacacactgcatgccttaacaagtgtgtgcaagcccctcagaactcaagacatccaaattttattgcgtctctacttatactggtttgcttttgatttattcctctattagttctataggagtgatctcaagtgagatagcagagcaagatgccaaaagaccataaatagagtaaggtttctatagatgtgagacagatttgagagagcatttactctgtctccctgtggatgaaactgctgctgaaatggttccaatttttaggaatctgcttacccacttcattatttgacagctttccttggtgacccaaaccttgtagcctaagccatttgtctttttctcagtggagggagtgtatggacctggccccatggctttgcatgttagagacctggcagactaaagtctctagtgtttgtttgctcacatttgctgagtgacagctatgtgccagactgcataaagggtggtggcagaagtgaaaatgtttaagaatgaccaaaaacattagtaatgaaagttaatgtgttccaggcattcttctaagtggtttacatgcactgtctcatttaatctgagataaaggatacttaagcccaaactatatctaaacccaaatctcacttggctggaaacatcaatcttaaccatttattcagaaccattaaaccaatgattccaagaaaaaaaaaaaaaaa

SEQ ID NO: 738 - DNA, 1158 bp, Homo Sapiens
  NM_001007275
actggagaggcagagaggagtgaccacagaggcagaggggtgggcgggctggcccatggctgagacctctctcccagagctggggggagaggacaaagccacgccttgccccagcatcctggagctggaggagctcctgcgggcagggaagtcttcttgcagccgtgtggacgaagtttggcccaaccttttcataggagatgcaaacagcatcaagtgtgcggagacaggcggctgaaagccagcagcacgaactgcccgtcagagaagtgcacagcctgggccagatactcccacaggatggactcactgcagaagcaggacctccggaggcccaagatccatggggcagtccaggcatctccctaccagccgcccacattggcttcgctgcagcgcttgctgtgggtccgtcaggctgccacactgaaccatatcgatgaggtctggcccagcctcttcctgggagatgcgtacgcagcccgggacaagagcaagctgatccagctgggaatcacccacgttgtgaatgccgctgcaggcaagttccaggtggacacaggtgccaaattctaccgtggaatgtccctggagtactatggcatcgaggcggacgacaaccccttcttcgacctcagtgtctactttctgcctgttgctcgatacatccgagctgccctcagtgttccccaaggccgcgtgctggtacactgtgccatgggggtaagccgctctgccacacttgtcctggccttcctcatgatctgtgagaacatgacgctggtagaggccatccagacggtgcaggcccaccgcaatatctgccctaactcaggcttcctccggcagctccaggttctggacaaccgactggggcgggagacggggcggttctgatctggcaggcagccaggatccctgacccttggcccaaccccaccagcctggccctgggaacagcaggctctgctgtttctagtgaccctgagatgtaaacagcaagtgggggctgaggcagaggcagggatagctgggtggtgacctcttagcgggtggatttccctgacccaattcagagattctttatgcaaaagtgagttcagtccatctctataataaaatattcatcgtcataaagacaaaaaaaaaaaaaaaaaa

SEQ ID NO: 739 - DNA, 2167 bp, Homo Sapiens
  NM_001007277
ccccgcctcgtggtgccggctggttcttcgcgctcgcccgacttcccagcggccccgtgcggcccgggcatgcccagtgcgggcgcagcggccccggccctggaagcgccccggcggagctggcctgcggtgggctaggggcagggccggagccgcggcggcggagctgtggatccttcatgatgagagatttggggacacttctctctcctgtgtgtagttgatagtttggtggtgaagagatggctgacagtgtcaaaacctttctccaggaccttgccagaggaatcaaagactccatctggggtatttgtaccatctcaaagctagatgctcgaatccagcaaaagagagaggagcagcgtcgaagaagggcaagtagtgtcttggcacagagaagagcccagagtatagagcggaagcaagagagtgagccacgtattgttagtagaattttccagtgttgtgcttggaatggtggagtgttctggttcagtctcctcttgttttatcgagtatttattcctgtgcttcagtcggtaacagcccgaattatcggtgacccatcactacatggagatgtttggtcgtggctggaattcttcctcacgtcaattttcagtgctctttgggtgctccccttgtttgtgcttagcaaagtggtgaatgccatttggtttcaggatatagctgacctggcatttgaggtatcagggaggaagcctcacccattccctagtgtcagcaaaataattgctgacatgctcttcaaccttttgctgcaggctcttttcctcattcagggaatgtttgtgagtctctttcccatccatcttgtcggtcagctggttagtctcctgcatatgtcccttctctactcactgtactgctttgaatatcgttggttcaataaagtggctgccttttctctatcctctttcctttattcattatcagcgccaatgaagcaaagacccctggcaaagcatatctcttccagttgcgcctcttctccttggtggtcttcttaagcaacagactcttccacaagacagtctacctgcagtcggccctgagcagctctacttctgcagagaagttcccttcaccgcatccgtcgcctgccaaactgaaggctactgcaggtcactgagttgcctgccatccaaaggggatgggcgggattggaagaagctgtggcagctcttttccctgttcacctcccgcctgccagggaaggcaggacccgctctgccaagggccctctgcgtattcccttctctctgaggaattgaaatttttgtctctggtgcacgtaaggcagaatgttccctgacaccagtgtgtggatttttaacatcaccgtgagtctgaaaggaccacaggtttttctgcagctattttctagcatttgccagtccctgtgcctggactgattggaacactttgtttttctccctgtgccatttacccttccacctttccatcctgccttctaccacccttggatgaatggattttgtaattctagctgttgtattttgtgaatttgttaattttgttgtttttctgtgaaacacatacattggatatgggaggtaaaggagtgtcccagttgctcctggtcactccctttatagccattactgtcttgtttcttgtaactcaggttaggttttggtctctcttgctccactgcaaaaaaaaaaaaaaaaaaaaaaaaaaaaaaaaagcctgaagagatgagataggaggaaagacctcacagccagatctgctgggttttgaggagtgattttctttcttccccttgaaggggaaaaagctattttcattggtacatttaaagtcccccaactatggggaggtaccaattctggacaagtgccactacaacaacactaaacctgaacttttcaactccgttggtggtgggaggcagcgggcagaaatttactgttggccactgccaggtctatttcatatttcaaaggaatattgggtgctgcatataggaactgaaggggtcaatgtattaaacctgtgattggttgttttcctgtcattttgagagactaaatgtggggggcagatgtcaaaatacctgtacaattttaaaatgtcacaattaaacatgagctggtttcccaaaaaaaaaaaaaaaaaa

SEQ ID NO: 740 - DNA, 8622 bp, Homo Sapiens
  NM_001007466
gaaattttaatttattattcccccctttttttcctgcatctataggataatattgtaaaatagcaattgaaaccaataatcattaaataaatatcaaggaaaatccaagcaaagctttctttttgttggactagtggtgtggtgtttggagacagtctctgaatgtgaacaggaaagcacccatcagcaaaacacgatcactctctagggagacagctgggggaatctgactctggcttctgcttttgttttaagggattaacttccctgtcaagtccaagaagacttgcgtatgagaagattacctgatggacttaattctaagattagcttttttcatcaagatggaaaaagatctttaggagcagaaaaggggagtgctaactgggggagcgagaagggagacgagcaaaagaaacaaaatcttgccacgtggctctgttttgtcagcaagaggatttaagactcacccagggcaaacactgggaccactgtaagagcgctggaacattctgcctcttgagtgaaggggccttctttctagcctctatggcactgaggggtgcgccggctggtggaggagtagtccgatggagccctgcgttccccggggacacagggccaagctttgaggtggaaagtttctggttctgaaacaacaaggagagagtctgtttttcttcctaaaatttggactcttgtctgcacaaactctggtctgttttgcacggtttgtgtgcctttttttccctttatgcaatctttttcagctttagcagcagaaatttgtctagttcaggaaacatgctagagggtggcttcagaaggaagatgatcctgtgtattctgtctctgcatccgaacttttgaagagaaaaattcgagctagagggattcttaaagccttaagttacttgaaatctatgtatttgcaaccctttgtctctggaatcatattacactaaactggaatctcaggctgaatgagaataaccaagtggagtaaaaagaagaaaaccgtttcttgatcaccacttaattaacgatgctctttctccaaaggatcagcacgttcttcctctgagaacttgaaaatacaaatggaccccatgtttttttaagcattaccttttcttagaagactgccatcatcttttatagaggaattttttcactatgcattcagtggatctttataaaatactgaccttctaattagattcaggtcagtcttaattaaagggggaaaaaagcaacgcaagccaaccacaaaaacacatataccaatgaaagaaattggtttaaatttcacagcattaacattactttttaagtaaaacagttcattgaagaaagtatgtatgcagcagtggaacatgggcctgtgctttgcagtgactccaacatcctgtgcctgtcctggaaggggcgtgtccccaagagtgagaaggagaagcctgtgtgcaggagacgctactatgaggaaggctggctggccacgggcaacgggcgaggagtggttggggtgactttcacctctagtcactgtcgcagggacaggagtactccacagaggataaatttcaacctccggggccacaatagcgaggttgtgctggtgaggtggaatgagccctaccagaaactggccacgtgcgatgcggacggaggcatattcgtgtggattcagtacgagggcaggtggtctgtggagctggtcaacgaccgcggggcgcaggtgagtgatttcacgtggagccatgatggaactcaagcacttatttcctatcgagatgggtttgtcctggttgggtctgtcagtggacaaagacactggtcatccgaaatcaacttggaaagtcaaattacgtgtggcatatggactcctgacgaccaacaggtgctgtttggcacggccgatgggcaggtgattgtcatggattgccacggcagaatgctggcccacgtcctcttgcacgagtcagacggtgtcctcggcatgtcctggaactacccgatcttcctggtggaggacagcagcgagagcgacacggactcagatgactacgcccctccccaagatggtccggcagcatatcccatcccagtgcagaacatcaagcctctgctcaccgtcagcttcacctcgggagacatcagcttaatgaacaactacgatgacttgtctcccacggtcatccgctcagggctgaaagaggtggtagcccagtggtgcacacagggggacttgctggcagtcgctgggatggaacggcagacccagcttggtgagcttcccaatggtccccttctgaagagtgccatggtcaagttctacaatgttcgtggggagcacatcttcacactggacactctcgtgcagcgccccatcatctccatctgctggggtcaccgggattcgaggctgttgatggcatcaggaccagccctgtacgtggtgcgtgtggagcaccgggtgtccagcctgcagctgctgtgccagcaggccatcgccagcaccttgcgtgaggacaaggacgtcagcaagctgactctgcccccccgcctctgctcctacctctccactgccttcatccccaccatcaagcccccaattccagatccgaacaacatgagagactttgtcagctacccatcagccggcaacgagcggctgcactgcaccatgaagcgcacagaggacgacccggaggtgggcggcccgtgctacacgctctacctggagtacctgggcgggcttgtgcccatcctcaaagggcggcgcatcagcaagctgcggccagagttcgtcatcatggacccgcggacagatagcaaaccagatgaaatctatgggaacagcttgatttctactgtgatcgacagctgcaactgctcagactccagtgacattgagctgagtgatgactgggctgccaagaaatctcccaaaatctccagagctagcaaatcacccaaactcccaaggatcagcattgaggcccgcaagtcacccaagctgccccgggctgctcaggagctctcccggtccccacggttgcccctgcgcaagccctctgtgggctcgcccagcctgactcggagagagtttccttttgaagacatcactcagcacaactatcttgctcaggtcacgtctaatatctggggaaccaaatttaagattgtgggcttggctgctttcctgccaaccaacctcggtgcagtaatctataaaaccagcctcctgcatctccagccgcggcagatgaccatttatctcccagaagttcggaaaatttccatggactatattaatttacctgtcttcaacccaaatgttttcagtgaagatgaagatgatttaccaggtgatgcagtttggacggattgatggcagtgcgtacattctagacttccagtatccgttctcagccgtgcaggcctttgcagttgccctggccaacgtgactcagcgcctcaaatgaagagactggtgtggggaggagagagatgcagagagcctttggaagaggtcttcggagatgccagaggagccctctaggggtccgatgcctgggaggaccagaagccaacagcaaaactggaaaagcccggcaggcccaggagagggcgctgacctgtggtcgtcatttatttggttgggttttattaccttttattgtctgttcttcttttcttctttcatttcagtggcatttggaagcaaagagtgctaggcacctgctgttctttcaggaaacagcttggctgtggtaatgctctactgggcccttcagaatgaagacagtctgccttagagcctgctattcttttagacatagggaggatgcattatcctgtattctcctccaacatcaccactagcgtaaaagcaaaaagcttttacaaaacacagccaaaaattctcaagatgcaggttcttggggaatgggatggggacagcatttgatttacactgattatgttactccccaaaaggtgacttaattaataaagggcatttgggcagacacactgtgttggaccaacaaagtaggctctttacaggggtgttctcaccaggtagaaatgcgatttgctcactgaggatgttggggaagggacgaagggtaaagaagaaactgcacgtatacacaggttcacatcactctgcagacagcaatgtgactcagcgtgtgacttgtagcagcagtacgagggctacactcctctgctgaggatgtctacattgaaagcctccactagtttcatcgtttgtcaaagttccgtaggatcagtgatggtcattcagcatgactggttctgggagaaggtgagagacaaaaatggaaagatcctggcctgtggtagtggtagcagttttctcaaataatgtggtgacagtcactagatcctcacatgctgagaaacagcctctactctctctgccccttttactttttaatctggaatgcattactgtaaacatgatctttcccatgagataccatgttctatgccttcccattctaaaagtgtggacaacgcttgatttgaaaccactccttttctcctcttggctacattaaaattcagttgactacaaatgctttctatcaaattagaaatgtaaccaaaaaaatgttaagtgttcaccagggtattaaaatacagaggagtatggtcaaatctttgacaaaattttcatgatcttctctaacaaaaaaagttgtttattaactgtacagactgtttactaaggagctaaaccactgagaaaacgttattaaaattgtaatacctaggtagttggttgatcacagtttgttaattgtataaaaaaaaattacctagaatatctcttcccacttcctcgtcctcgtgagaacctgtgggcagtattcaagccctgatgacaaaacccagtgttttttgttgttgttttttgttgttgttttttgtttttgtttttgtttttctcagtcttacctgtgatgttgtttaggatcaggcccctctcctgggcctgctgtgcaggagcacaggaactatctgctggcgttgggttccaaatttgcattttatttggaaacagacaagtagaagatgctacagaaaagtattttcaaatttaaacgttttttaatcccctgttttagttaaaaaattggaaaagaaaccgacccatttttttcccagatcaagatgacatgacatcactcccaattctctccaaaccccagagaaatactgacgaagttttctgatgtggcaaaggatatttcccatctaataccagtttctcatttatatttaacgtattggacctgatatttttagtgggtgcattcttccagaaagaattcagcaatgttatcagaattaattcttttatatgagtttatgtagcttgatatggtgtttcagtgcttattggttgtgcaataatggttatagcctgttagataatctaaatgcaattcccctgttttgtcgtttaggagataattatttatcttgcttttcatagtgttcttaggaattattttgttgttacgttttggtgagttatacccattttatttatttagaaaaatagtatctttgttaacgacttacatggtcacagtatattttgctgcaagaaataaagaggatatgatagaaggtttttttttttttttttttttttttttgagacggagtcccactcttgtcgcccaactagagtgtagtggcacaatctcggctccccacaacctctgactccagggttcaggtgattattttgcctcagcctcccaagcagctgggattatagacacccgccaacacgccaggctaatgtttttgtatttttaatagagatggggttttgccatgttggccaggctggtcttgaactcctgacctcaggtgatccgcccgcctcggcctcccaaagtgctgggattacagacgtgagccaccactcccggcccatagaaggttttttgctggataatttgtaacttttctaattgggaaaaaattcctattaatcacttaaaaatttttttttgtattttgtgttattgattatatacaaaggagactttttttttgagataacactcaaatagtattctcttcttttgaaaattttatttttatctgaaaataacagttgatctgaaataaaaaggggagacctattagaatgagagtagccaaggaaagagttactaggtaataagcttcactttttgtgttctaattgtttttgagatataaagaccctgaaaaagcccattttagaacctgtttaataagagcaaatataggggaaaatctttgaaatgaaagctacaaatacatgtgagaagaaaaaaatggatttttttagcaaataattaactaagcttctaaatgcctagctccctcccccaaaggcgctttcccccgatggaggcacaggcttctgtctcggatgtttggcgcacgtgagtttgtatgagtttgtaccggagtgaccccggcagccactgcccacctcccctctacccaggggcctgaaaagaggggctgccctcctgcgccaaggcagacacaagctgcgggctgtgcggtcctagtagtgtgacgtttcagttaatagtggtggtcttattttcaactatgctttcattcagtcagtctctgttgactaaatacgacgaaaattcatactttatgcaggagatttctaaaaatttaatgtttattaatagtttatgaatatcaagatacctcattgaatccctaaatttaaaagcagtccagtaaaaggttaactgtataaagaatctatgactttttgagggaagtgtgatatattaacaaatataaccaattctaaatttgttttagctctaacctcatcaaaccaaaggcacagatttgtgtacaatatacccattgaatgtatatcctgagaaaaattggggccaaagaagcaggaaaatctcaaagctctaatggcagcataaatcaaagaatttcacaggctagtgtttttatccatagccattgctcccttgtcaagtgtctcacaaggacatggaagaatgtgttatgttcatcttgtaatcatagcaaaaagtctgcaaaccccagggtcaagcctgctctgccacagggttggatggtgaccttgggcaagtccctggggctggctaggcctccacttgtccatctgtgaaatgaaaggatcagcctggacagccctctaaactcccttacagctctcagcctaagagcgcagcactgaacagcctcatcattccacttttcatgggaaatatatttcacaccattgcctttgtgtagagaaatatttcttttcctgtgttaatgagctatgtactgaatataaaccagtgcatttaaagtaatatcttttgtgcacctctaaatgtgtttggaattgtgtttgttctcatagaatatacaaaagtactgattctaggtaagaaggagtctccacgggtgtgccctgctcagctggatgtccatgagaacagccatgaaataagtcactacttgtccccaaaaccacaggaatatatacctaggtcacctcaaattcctgagtgtgctctgccatgttacacggtcttcaaattgaaaaggtttcttgaaaaggaaagtttggcccagcaactggagaaggagtccatggtgtcgctgtgtgcctgtatcatttggccaagtcaatggttgtaagcaaagttagtggagacaaaaatgtgtccaaaatgtcgtttgagttcctgggatttctgtaatagcacacaactcagaactcttcagcatttgtgtgattccttacctctggctgataaaactctaatgggttgtggcttactttgtttccattttctttggctttgtgcaatttttgtgtaactttacttgtacctatattttctgtttacagttctttttaaggggaggggtagggttctaagatcttgttgtttattgtagataaaaattttttcgtgttgtagaaaagcatgggttatgcgtttgactgaaaaagacactgtattatttaccaaaggggtattgtttttgcatttgtttataaatgcattattttggtactgtaaatttggacataatttctgagtttattactactggcattttctttttcccttttttttttttttaaccgtaagtgcacgatgcaggtgcataggccccagaccaaactagaccaccagcatgttcatgtccagacctcggcagtggcgtgcactgcttgtgcacctcagttcctccagtgttggtttgtttgttttttaattcagcatcctgctggttttactttccaagcaagatctgttgcgactcccaaatgcgttttaatgagctcatccttatttgcctttcttcttacgtattttgtgtattagattgtgcaggagatattctagaaggcattaatggtttgcattcaaaacgatgtggtttgtccaagttattttctgtctttattactgagacggattaatctccttatttttttcttgatgatttgaagttgtaagagttgtccagctattgcttaataaaattttgcagatcaaaaaa

SEQ ID NO: 741 - DNA, 4302 bp, Homo Sapiens
  NM_001007467
agcaagctgagctcagagcgaagctggcgagccaaggagataaagaaccctcggtggggatgcccagagggtgcatgctccacgcccctcgaaaccgattctcattgctgctgctgcaaagcaacccgaagtgcgccacctacccgactgaggctgcgcaagccccggggtctgggcggggtggtcctcgtgcgcgccgcgtcgccgtggagacgagggcgggcccgcgcgagactggcgtctagaggcgcgcgaagcgctgaggcgggcgtggaccgcgcgggagttaagaagcaggtcccggatcgccgtataccgccgggttttctcccaacgtcaggcccgatggctcggcttccccagttagaaggggaagataaaagactttgattcatgaagaatctgctcactgagaagtgtatatcaagccacaatttccatcaaaaagtgattaagcagagaatggagaagaaggttgattccaggtattttaaggatggtgcagttaagaaaccttattctgcaaagacactgtccaacaagaagtcttctgcatcctttgggatccggagggagttacctagtaccagtcatctagtgcagtatcgtggcacacatacttgtacccgacagggccggttaagagaactgcgcatcagatgcgtggccagaaagttcttatatttatggattcgaatgacttttggaagagtatttccctctaaagccagattttactatgagcagcgattactacggaaggtcttcgaagaatggaaagaggagtggtgggttttccagcacgagtggaaactctgtgttcgagctgactgtcactacaggtattacctgtacaacctgatgttccagacgtggaagacctatgtgcgtcagcagcaggagatgaggaacaagtacattagagccgaggttcatgatgcaaagcaaaagatgcgacaggcctggaagtcctggttgatctacgtggttgttcgtaggaccaaacttcagatgcagactacagctctggagtttaggcaacggattatcttacgggtgtggtggagcacgtggaggcagcgactaggacaggtccgtgtgagccgtgccctccatgcctctgctttgaagcacagggccctgagcctccaggtgcaggcttggtcacagtggcgggaacagctcctgtatgtccagaaggagaaacaaaaggttgtctctgcagtgaaacatcatcagcactggcaaaaacggagatttctaaaggcctggcttgaatacctgcaagtccgcagagtgaagagacagcagaatgagatggctgagcgattccatcatgtcactgtgctccagatatacttctgtgactggcagcaggcctgggagcggagggagagcttgtacgctcaccatgcccaggtggagaaactggccaggaagatggccctgcggcgcgcctttactcactggaaacactacatgctgctgtgtgcagaagaagctgcccagtttgagatggcagaagagcaccacaggcacagccagctgtatttttgctttagagccctaaaagacaatgtgacccacgctcatctccagcaaataagaaggaatcttgctcaccagcagcatggtgtcacgctgctgcacaggttctggaacctctggcggtctcagattgagcagaaaaaggaaagagagctgctccccttactgcatgctgcctgggaccactacagaatagcactgctgtgcaaatgtatcgaattgtggctacagtatactcagaagaggcggtacaagcagctgctacaggccagagcggatggtcatttccagcagagagccctgcctgctgccttccacacatggaacagactctggcgatggcgccaccaggaaaatgtcctcagtgcaagagcaacacgtttccacagggagacattagagaagcaagtattttctctctggaggcagaagatgtttcagcatcgagaaaaccgcctggcagagagaatggccatccttcacgcagagcgacagcttctgtataggtcttggttcatgtggcaccagcaggcagcagcacgtcaccaggagcaggagtggcaaacagtggcctgtgcccaccaccgccacgggcggctcaagaaagctttctgcctctggagggaaagtgcccaagggctcagaacagagaggacgggcagggtgcgggcagcagaattccacatggcccagctcctgcgttgggcctggagccagtggagggagtgcctggccctgcggggagcggagcggcagaagctgatgcgagcagacctgcaccaccagcacagcgtgctgcacagggcgctgcaggcatgggtgacttaccagggcagggtgcgaagcatcctccgggaggtggcagccagggagagccagcacaacaggcagctgctgcgcggggcattacgtcgctggaaagagaacaccatggcccgagtggatgaagccaaaaaaacctttcaagcaagtactcattacagaaggaccatatgttccaaggtcctggtccagtggcgggaagctgtgtcagtgcagatgtattaccgacagcaggaggactgtgccatctgggaggcccagaaggtgctggacaggggctgtctgcggacctggtttcagcgctggtgggactgcagccggaggtcagcccagcagagactgcagctggagagggcagtgcaacaccaccaccggcagctgctgctggaggggctggcccggtggaagacgcaccatctgcagtgtgtcaggaagaggctcctgcacaggcagagcacccaactgctggcacagagactcagccggacctgcttccgccagtggagacaacagctggcagccaggaggcaggagcagcgggcgacagtgcgggccctgtggttctgggccttctcgctgcaggcaaaggtgtgggccacgtggctggcctttgtactggaaaggaggagaaagaaggcgcggctgcagtgggcgctccaggcctaccaggggcagctcctccaggagggtgccacgcggctcctgcgctttgcagccagcatgaaggcctcccggcagcagctgcaggcccagcagcaggtccaggcggctcacagtctccatcgtgccgtccgccgctgtgccacgctctggaaacagaaagtgctgggccggggcgggaagcctcagcccctggcagccatcgcacccagcaggaaagtgacgtttgagggtccccttctcaaccgcattgctgctggggctggggatggcacccttgagaccaagaggccacaggcttctcggcctctgggagctctgggccgcctggctgctgaggagccccacgccctggagctcaacactgcccactcagcgaggaagcagccgcgacgcccacacttcctgttggagcctgcgcagagccagaggcctcagaagccacaggaacatggcctaggcatggctcagccagcagccccctccctgacgcggcccttcctggcagaggccccgacagcactggtcccacacagccccctgcctggggccctgtcaagcgcccctggcccgaagcagcccccgacggcaagcacaggcccggagctgctgctgctgcctctttcctccttcatgccctgcggggcggctgcaccagccagggtgtcagcacagcgggctactcctagggataagcccccggtcccctcatccctggccagtgtccctgacccccatctactccttcctggggacttctcagccaccagggctgggcctggactttcaactgcaggcagcctggaccttgaggctgaacttgaggagatccagcagcaactactgcactaccagaccaccaagcagaacctctggtcctgtcggcggcaagcgagcagcctgcgcaggtggctggagctgaacagagaggagccggggcctgaggaccaggaagtagagcagcaggtgcagaaagagctggaacaggtggaaatgcagatccagctgctggcagaggagctccaggctcagcgccagcccattggcgcctgcgttgcccgcatccaggccctgcggcaggccctgtgctagcgtgttcgcaccaggaacgcaggtgctgggctgtcggggaggcctcaggccacctccaggaacagaacacagttttaagtttgattttttttatttcaaaatgctttgcaattaaatgaattactgttcaaaaaaaaaaaaaaaaaaaaaaaaaaaaaaaaaaaaaaaaaaaaaaaaaaa

SEQ ID NO: 742 - DNA, 1690 bp, Homo Sapiens
  NM_001007468
aacgccagcgcctgcgcactgagggcggcctggtcgtcgtctgcggcggcggcggcggctgaggagcccggctgaggcgccagtacccggcccggtccgcatttcgccttccggcttcggtttccctcggcccagcacgccccggccccgccccagccctcctgatccctcgcagcccggctccggccgcccgcctctgccgccgcaatgatgatgatggcgctgagcaagaccttcgggcagaagcccgtgaagttccagctggaggacgacggcgagttctacatgatcggctccgaggtgggaaactacctccgtatgttccgaggttctctgtacaagagatacccctcactctggaggcgactagccactgtggaagagaggaagaaaatagttgcatcgtcacatgatcacggatacacgactctagccaccagtgtgaccctgttaaaagcctcggaagtggaagagattctggatggcaacgatgagaagtacaaggctgtgtccatcagcacagagccccccacctacctcagggaacagaaggccaagaggaacagccagtgggtacccaccctgcccaacagctcccaccacttagatgccgtgccatgctccacaaccatcaacaggaaccgcatgggccgagacaagaagagaaccttccccctttgctttgatgaccatgacccagctgtgatccatgagaacgcatctcagcccgaggtgctggtccccatccggctggacatggagatcgatgggcagaagctgcgagacgccttcacctggaacatgaatgagaagttgatgacgcctgagatgttttcagaaatcctctgtgacgatctggatttgaacccgctgacgtttgtgccagccatcgcctctgccatcagacagcagatcgagtcctaccccacggacagcatcctggaggaccagtcagaccagcgcgtcatcatcaagctgaacatccatgtgggaaacatttccctggtggaccagtttgagtgggacatgtcagagaaggagaactcaccagagaagtttgccctgaagctgtgctcggagctggggttgggcggggagtttgtcaccaccatcgcatacagcatccggggacagctgagctggcatcagaagacctacgccttcagcgagaaccctctgcccacagtggagattgccatccggaacacgggcgatgcggaccagtggtgcccactgctggagactctgacagacgctgagatggagaagaagatccgcgaccaggacaggaacacgaggcggatgaggcgtcttgccaacacggccccggcctggtaaccagcccatcagcacacggctcccacggagcatctcagaagattgggccgcctctcctccatcttctggcaaggacagaggcgaggggacagcccagcgccatcctgaggatcgggtgggggtggagtgggggcttccaggtggcccttcccggcacacattccatttgttgagccccagtcctgccccccaccccaccctccctacccctccccagtctctggggtcaggaagaaaccttattttaggttgtgttttgtttttgtataggagccccaggcagggctagtaacagtttttaaataaaaggcaacaggtcatgttcaatttcttcaacaaaaaaaaaaaaaaa

SEQ ID NO: 743 - DNA, 521 bp, Homo Sapiens
  NM_001007469
cttgacaccagcagggtgacatccgctattgctacttctctgctcccccacagttcctctggacttctctggaccacagtcctctgccagacccctgccagaccccagtccaccatgatccatctgggtcacatcctcttcctgcttttgctcccagtggctgcagctcagacgactccaggagagagatcatcactccctgccttttaccctggcacttcaggctcttgttccggatgtgggtccctctctctgccgctcctggcaggcctcgtggctgctgatgcggtggcatcgctgctcatcgtgggggcggtgttcctgtgcgcacgcccacgccgcagccccgcccaagatggcaaagtctacatcaacatgccaggcaggggctgaccctcctgcagcttggacctttgacttctgaccctctcatcctggatggtgtgtggtggcacaggaacccccgccccaacttttggattgtaataaaacaattgaaacaccaaaaaaaaaaaaaaaaa

SEQ ID NO: 744 - DNA, 3237 bp, Homo Sapiens
  NM_001007527
aggcggaagcgggcggcgctacggctgactgggaaatgtcagccgctggactgtagacggattttcctttctcgggagcccgcaggccttctggtgatcgccagcgctgtcgtctctgagcgtggatcccagaacctggacagctgtggcggccgccgtttcccggtcccgtccagacgctgtctggcgagatcggacggtgagcctaaggcggaacgcgtgaggcgcttttgagtctggggtccggggccgagagcaggcggaaagagaggggacccggcagaccccgagtggccgccgctgcggggcccaagtccttggctgctgagtggtgacagtagcccagcccgccggccagatatggtccagacctgtacatgaataactttggttagtcagagtgaaatattcaataatgagtggtgcagctttgggacttgagattgtttttgtcttttttctggcattatttctgcttcatcgatatggagactttaagaaacagcatagacttgtgattattggaacactgcttgcttggtatctctgctttcttattgtcttcatactgcctctggatgttagtacgacaatatacaaccggtgcaagcatgctgctgcaaattcaagccctcctgagaatagcaacattacaggattgtacgcaactgctaaccctgttccaagccagcatccttgtttcaagccatggagttacattcctgatggaatcatgccaattttctggagggtagtgtattggacgtcacaatttttaacatggattctcttaccttttatgcagtcatatgcaagatcaggagggttttccatcactggaaagatcaaaactgcactaattgagaatgcaatctactatggcacctatttgctgatttttggagcatttttaatttatgtagctgtaaacccacatttacatttagaatggaaccagcttcagacaattgggatagctgctgcaaatacatggggtctgtttcttcttgtgttgttgttggggtatggcttggtggaaattcctcgatcatactggaatggagcaaaaaggggttatctacttatgaaaacgtattttaaggcagccaaactgatgacagagaaagcagatgcagaagagaatttggaagatgccatggaggaggttcgtaaagtgaatgaaagcatcaagtataatcacccattgagaaaatgtgttgatacaatacttaaaaagtgccctacagagtatcaggaaaaaatgggtaggaacatggatgattatgaagattttgatgaaaagcatagtatctatccaagtgaaaaaagtctggtaaaactgcataaacaggtgatttattcagttcagagacaccgtcgaactcaagtacaatggcagattcttttggaacaagcattttatctagaagatgtagcaaaaaatgaaactagtgctactcatcagtttgttcacacctttcaatcgccagagccagaaaatcgatttatccaatatttttataatcctacatttgaatggtactgggaatgtcttttgcgaccatggttttacaagatacttgctgtggttctgtccatcttctctgtgattgttgtgtggtcagagtgcacattctttagcactactcctgtcttatccctctttgcggtcttcatacagctggcagaaaaaacatataattatatttatatcgagattgcctgcttcctttccatcttcttcctaagtatctgtgtttattctactgtgttcaggattcgtgtatttaactattattatttggcctcacatcaccagactgatgcttatagccttcttttcagtggcatgctattttgccgtttgacacctcctttatgtcttaatttcttgggtttgacccatatggattcatctatctctcacaagaatactcaaccaactgcttatacatctattatgggttccatgaaagttttatcctttattgcagatggattctatatatattatcctatgttggtggtaattctctgcattgctacttattttagtttgggaacccgttgtttgaatctgctcggtttccagcagtttatgggagatgatgatatgacatcagacttagttaatgaaggaaaagaattaatcagaaaagagaagagaaaaaggcaaaggcaagaagaaggtgaaaatcgaagaagagaatggaaagaacgttatggacacaatagagaagattccactaggaacagaaatattcatactgaccccaaagagtcaaacttctcagatgttaataccaaccgttctgcattcaaatataccagggctaataacaggactgaaagggaccggatagaacttctccaagatgcagaacctttggattttaatgcagaaacattcactgatgatcctcttgaatctgaatcaggaaggtatcagcctggtggacgatatctctcgatgtctcgcagtgacatatttaatgatgtttaaagtctgaaaaagtttgtgggaccactaaccaaggtcaacacatcagttcagtcttgatgaacatctgtgtaccctagaatttcctctatacacagtgaaaagtgtcaagataacaaaaaaggcactgagaattaattatatcttaggaataatagtttaatgtgcattgaatagagtatcacctttttcaacaagatttattacatatcatttcctaagcatctgccttagaaatacagttacagtggaaggactttaagaaagatcaacatatgttaagaacatgcagttcagtttgtttcagattaattttttttcaagagagttattttaaagattcaaggaagccataagtcatactaaataatattatatacagttttgttattgtgacttacatttttgttacttctaaaaagtatattcaacctgtatttcccaaagaaatgtaagtgaatggagacctcaaataataactgtattcataaaactcgtgtcttaaaacaaggcttacttactagacataactgaatgtaaaaagtgctttttcaaatctgtttgcaaactcgtgggggatttttgcatgtataagattaagattatacttcaagtgatgcgtgtctgtgtatttagcatgtgtactataatcaggtgatatagtattccttcagtctttgtagtaactggatttttttatgcttctggtattgctttataaaagattttcatttcag

SEQ ID NO: 745 - DNA, 2110 bp, Homo Sapiens
  NM_001007535
atgacttgtcagtatcgatctgatttcctgatcattggtagatttgacatggaagtgaaaggttggggtggagaagatgttcatctttgtcaaaaatacttacatggtgacctcattgtgatttggactccggttactggtcttttccacctctggcctgaaaaacgctgtgctgatgagctgacccccgagcagtaccgcatgtgcatccagtctaaagccataaatgaggcctctcgctcccacctgggaatgctggtcttcagggaggaaatagagacgcatcttcataaacaggcatacaggacaaacagcgaagctgttggttgaaatcataattaatgcgttactgtgtgaaccgcaaaccagcactatttatttagccttaattccacttccggatgcagtgcctcttttggagaagacatgtttatttttcctttctgacattactttagcagttcaacttgatgagagatgaaaaaaacaaatgtttcaacacaaagtctctgttttgtgaaaatactgcactatggaataattgacaaattaaaatctcgtatttgtcccaaaagttgttttgagttagttctacctggtgcccatgttctgattgtgtgtgggattgcatggtgtcctgattgcatctaggtggagcggatggaatgtgctgggctgctgttgggtgaagagcagcacattcttacagaggagatggagtgctatgagcatagtgtgtggacaggtatcttcatctgcccacccctgagtcagcgtgcttgatttgatagcttgaagaatccttttccactgaagcagaggataattatttgacacatctgaaatcctcaatcaatcaatcaagagaaaggtagaaataaaaactccttaacttactgttgcttagcctcctgaaagtctgtttttaagcaaatgggtaatagtagaaaacaggttagaatctatggcttgattaaaaatataatgctattacattatcatcatgctcaggattagtagtcagagttgctatagactattttgcacaaacagaaaagaacacggaaacctttttaacagagcatttaattatgttggagtacaggatcctagctgtgtctgggaacattagtttatgtgcgccagctacatcagggtcttcccatggtggttcagaatagatgagcatagcaaggttttgtttttgctttcgattttctcatttggcatggacccatatgtatttgctatccttttttctaatatattaatatatgctacatttgtatttgcattactataatactttgagttgaaaaagagtttcattgtggggagaaaaagcaaatggtataccacaaggtcactctgatttgagaaaagagaggaggaggggaagatagtctgaatggaaatctgaaatatggaatgttttagagaaatatatcacttgcatatagaatgttttgaggtataaattaatgagacaaagtgaagaagaaattatattcagataggactgcactatgtgtgattatttgtcacacatggatctgttaccatcaggtcaattcctagcatgcataaattttttaaccttcagcttttaaaagagacctatgttgaattctattagtatgtaaacccctgaaaattcactgaagaaaaatcattactctttttctcagtaaatcatatcatctgaaatattacaaatttcaaatttctaggtgctatattaattcaatattataataactcttacctaattattcttacaagttttgagttgtggtagtgtttagggatttttttaaagatgtgtgaaatattctctgcaaaatcaggccactgtctccttttatatattaatacaattgtgtattacaaagaccagtgaattataatatttaaagtgagataacgtaattatttgcaaaggtaagttacagcttgtttttcgagagaatcaaatgagtttacttttcctcctattgtttttaaactagcttttagtttaaagatggaagctaaccaatggaaatgttactatgtttttgacgtttattaaacagtaccaataaagtattttattgccagaaaaaataaa

SEQ ID NO: 746 - DNA, 1665 bp, Homo Sapiens
  NM_001007544
attgtatagaagaacattgtgaaactccctgccctgttctgtttctctctgaccaccggtgcatgcagcccctgtcacataccgcctgcttgctcaaatcaatcatgaccctttcatgtgaaatctttagtattgtgagcccttaaaagggacggaaattgtgcattcggggagctcggattttaaggcagtagcctgctgatgctcccagctgaataaagcccttccttctacaatttggtgtctgaggggttttgtctgcggctcgtcctgctacatttcttggttccctgaccaggaaacgaggtaactgatggacagccgaggcagccccttaggcggcttaggcctcccctgtggagcatccctgaggcggactccggccagcccgagtgacgcgatccaaagagcactcccgggtaggaaattgccccggtggaatgcctcaccagagcagcgtgtagcagttccctgtggaggattaacacagtggctgaacaccgggaaggaactggcacttggagtccggacatctgaaacttgatctccagcaccctgccggtggcactactgagagacgaggtgccagggtggttcctgaaagtgcctgagccccaacttatcagcaaggagctcatcatgctgacagaagtcatggaggtctggcatggcttagtgatcgcggtggtgtccctcttcctgcaggcctgcttcctcaccgccatcaactacctgctcagcaggcacatggcccacaagagtgaacagatactgaaagcggccagtctccaggttcccaggcccagccctggccaccatcatccacctgctgtcaaagagatgaaggagactcagacagagagagacatcccaatgtctgattccctttacaggcatgacagcgacacaccctcagatagcttggatagctcctgcagttcgcctcctgcctgccaggccacagaggatgtggattacacacaagtcgtcttttctgaccctggagaactaaaaaatgactccccgctggactatgagaacataaaggaaatcacagattatgtcaatgtcaatccagaaagacacaagcccagtttctggtattttgtcaaccctgctctgtctgagccagcggaatatgatcaagtggccatgtgaattccaaatatttttaatggggtccagttctctatggattcttacatttaatttgtagggaaatgccatttttcccccttaaacaaggcatggggctcacaagtctatggagacaggccaaaaagaatgtggagaagaaaactgataaatacacagaggtcctcaagacccatggactcctggtctgtacccaaaaaagctgttcgttcctcaaaaacaaaaacaaggcttggctgggaaaacaggccaatgccccggcaagaaaggttgagatcagatgttaggaagaactttcaggtaaagtatgagaactatggagtccatcagcagagatagtagtgaagtctctccccagggaaaattttaaaaaggttgaatcagctgttgtagagttctatttggcaatctcatggttaaatgacttccctttgagctctttaattattggcaataaacaacttctttaaaagttttaaataaaatagcaaccaccaccagttcctcttt

SEQ ID NO: 747 - DNA, 4115 bp, Homo Sapiens
  NM_001007553
gagagaagcgagatttattcctacgtaccgggccgtgctgcttatggcggcgctggagagggggcgctgagctgttgggtatgaagtgtaacagaacagactttaccacctgaaactgctgcttcaagttcagatcaggcaaggaacaaacctcgtaacaactaacaagaccaaagaagagtacacttaagttgaagacacaacacttgatctgaaacaagaagtttgtgcctactcaacagctttgaaagagcacttcccaacgctgctagtagtctttgttttcttcagtgctgtactgtgagattgcccggtacagcagcagttgtattctttattagcttggtagatcattttctctcgctcttttttttaatactagcaactttcatcctttgaaacgtgtgctgaaaaagaagaatcagcaaatactactgaaagtgcaatatttgagtatcactgcgagatgagctttgatccaaaccttctccacaacaatggacataatgggtaccctaatggtacttcagcagcactgcgtgaaactggggttattgaaaaactgttaacctcttacggatttattcagtgttcagaacgtcaagctagacttttcttccactgttcacagtataatggcaacctgcaagacttaaaagtaggagatgatgttgaatttgaagtatcatcggaccgacggactgggaaacccattgctgttaaactggtgaagataaaacaagaaatcctccctgaagaacgaatgaatggacaagttgtgtgcgctgttcctcacaacttagagagtaaatctccagctgccccgggtcagagtccaacagggagtgtatgctacgaacgtaatggggaagtgttttatctgacttacacccctgaagatgtcgaagggaacgttcagctggaaactggagataaaataaactttgtaattgataacaataaacatactggtgctgtaagtgctcgcaacattatgctgttgaaaaagaaacaagcccgctgtcagggagtagtttgtgccatgaaggaggcatttggctttattgaaagaggtgatgttgtaaaagagatattctttcactatagtgaatttaagggtgacttagaaaccttacagcctggcgatgatgtggaattcacaatcaaggacagaaatggtaaagaagttgcaacagatgtcagactattgcctcaaggaacagtcatttttgaagatatcagcattgaacattttgaaggaactgtaaccaaagttatcccaaaagtacccagtaaaaaccagaatgacccattgccaggacgcatcaaagttgactttgtgatccctaaagaacttccctttggagacaaagatacgaaatccaaggtgaccctgctggaaggtgaccatgttaggtttaatatttcaacagaccgacgtgacaaattagagcgagcaaccaatatagaagttctgtcaaatacatttcagttcactaatgaagcccgagaaatgggtgtgattgctgccatgagagatggttttggtttcatcaagtgtgtggatcgtgatgttcgtatgttcttccacttcagtgaaattctggatgggaaccagctccatattgcagatgaagtagagtttactgtggttcctgatatgctctctgctcaaagaaatcatgctattaggattaaaaaacttcccaagggcacggtttcatttcattcccattcagatcaccgttttctgggcacggtagaaaaagaagccactttttccaatcctaaaaccactagcccaaataaaggcaaagagaaggaggctgaggatggcattattgcttatgatgactgtggggtgaaactgactattgcttttcaagccaaggatgtggaaggatctacttctcctcaaataggagataaggttgaatttagtattagtgacaaacagaggcctggacagcaggttgcaacttgtgtgcgacttttaggtcgtaattctaactccaagaggctcttgggttatgtggcaactctgaaggataattttggatttattgaaacagccaatcatgataaggaaatctttttccattacagtgagttctctggtgatgttgatagcctggaactgggggacatggtcgagtatagcttgtccaaaggcaaaggcaacaaagtcagtgcagaaaaagtgaacaaaacacactcagtgaatggcattactgaggaagctgatcccaccatttactctggcaaagtaattcgccccctgaggagtgttgatccaacacagactgagtaccaaggaatgattgagattgtggaggagggcgatatgaaaggtgaggtctatccatttggcatcgttgggatggccaacaaaggggattgcctgcagaaaggggagagcgtcaagttccaattgtgtgtcctgggccaaaatgcacaaactatggcttacaacatcacacccctgcgcagggccacagtggaatgtgtgaaagatcagtttggcttcattaactatgaagtaggagatagcaagaagctctttttccatgtgaaagaagttcaggatggcattgagctacaggcaggagatgaggtggagttctcagtgattcttaatcagcgcactggcaagtgcagcgcctgtaatgtttggcgagtctgtgagggccccaaggctgttgcagctcctcgacctgatcggttggtcaatcgcttgaagaatatcactctggatgatgccagtgctcctcgcctaatggttcttcgtcagccaaggggaccagataactcaatggggtttggtgcagaaagaaagatccgtcaagctggtgtcattgactaaccacatccacaaagcacaccattaatccactatgatcaagttggggggaatctggtgaagggttctgaatatctccctcttcatccctcccgaaatctggaatacttattctattgagctattacaccagttttaacaccttcctcgtgttatgtttaaaaaaataaataaatttaagaaaaccattttaaataatgcacagttgcagcctggaaaaacttaaggtggcgccttatagtatcaattttaggagctttatttggtgcatttaacgcaactggtaattgcagaatccactttgcctgtgtaagtgaaaaatatagactgttatcttgttggccctatgaaattctgcacttttcattatatactctaccttcattaattacttctggcaagatgttctgccttagcactcagttgcattcttttcctttttcttcctgttcattatgctttaattctgaggaccatatgagggtagaatatattatcttttaaaaattacaaaaatttgtataggcaaaccatttcttaaagttgatggccaaattttaaaatgttatttttcatatcatttataatcttgtcacaatccacttaaagaagtttggttatatttcagtgaaaattttcttccagagtaggttttttttcgtgggttggggggtaactttactacaattagtaagtatggtgcagaatttcatgcaaatgaggagtgccagcagtgtgataatttaaacatatttaaacaaaaacaaaaaaaatgaatgcacaaacttgctgctgcttagatcactgcagcttctaggacccggtttcttttactgatttaaaaacaaaacaaaaaaaaataaaaaagttgtgcctgaaatgaatcttgtttttttttataagtagccgcctggttactgtgtcctgtaaaatacagacacttgacccttggtgtagcttctgttcaactttatatcacgggaatggatgggtctgatttcttggccctcttcttgaattggccatatacagggtccctggccagtggactgaaggctttgtctaagatgacaagggtcagctcaggggatgtgggggagggcggttttatcttcccccttgtcgtttgaggttttgatctctgggtaaagaggccgtttatctttgtaaacacgaaacatttttgctttctccagttttctgttaatggcgaaagaatggaagcgaataaagttttactgatttttgagacact

SEQ ID NO: 748 - DNA, 2581 bp, Homo Sapiens
  NM_001007792
gcaccctggtcatctgcggactcagcctgagcttccagagggcctaggagcagtaagggagtgagtgggcaactcggcgcatgaaggaggccgccctcatctgcctggcaccctctgtacccccgatcttgacggtgaagtcctgggacaccatgcagttgcgggctgctagatctcggtgcacaaacttgttggcagcaagctacatcgagaaccagcagcatctgcagcatctggagctccgtgatctgaggggcctgggggagctgagaaacctcaccatcgtgaagagtggtctccgtttcgtggcgccagatgccttccatttcactcctcggctcagtcgcctgaatctctccttcaacgctctggagtctctctcctggaaaactgtgcagggcctctccttacaggaactggtcctgtcggggaaccctctgcactgttcttgtgccctgcgctggctacagcgctgggaggaggagggactgggcggagtgcctgaacagaagctgcagtgtcatgggcaagggcccctggcccacatgcccaatgccagctgtggtgtgcccacgctgaaggtccaggtgcccaatgcctcggtggatgtgggggacgacgtgctgctgcggtgccaggtggaggggcggggcctggagcaggccggctggatcctcacagagctggagcagtcagccacggtgatgaaatctgggggtctgccatccctggggctgaccctggccaatgtcaccagtgacctcaacaggaagaacgtgacgtgctgggcagagaacgatgtgggccgggcagaggtctctgttcaggtcaacgtctccttcccggccagtgtgcagctgcacacggcggtggagatgcaccactggtgcatccccttctctgtggatgggcagccggcaccgtctctgcgctggctcttcaatggctccgtgctcaatgagaccagcttcatcttcactgagttcctggagccggcagccaatgagaccgtgcggcacgggtgtctgcgcctcaaccagcccacccacgtcaacaacggcaactacacgctgctggctgccaaccccttcggccaggcctccgcctccatcatggctgccttcatggacaaccctttcgagttcaaccccgaggaccccatccctgacactaacagcacatctggagacccggtggagaagaaggacgaaacaccttttggggtctcggtggctgtgggcctggccgtctttgcctgcctcttcctttctacgctgctccttgtgctcaacaaatgtggacggagaaacaagtttgggatcaaccgcccggctgtgctggctccagaggatgggctggccatgtccctgcatttcatgacattgggtggcagctccctgtcccccaccgagggcaaaggctctgggctccaaggccacatcatcgagaacccacaatacttcagtgatgcctgtgttcaccacatcaagcgccgggacatcgtgctcaagtgggagctgggggagggcgcctttgggaaggtcttccttgctgagtgccacaacctcctgcctgagcaggacaagatgctggtggctgtcaaggcactgaaggaggcgtccgagagtgctcggcaggacttccagcgtgaggctgagctgctcaccatgctgcagcaccagcacatcgtgcgcttcttcggcgtctgcaccgagggccgccccctgctcatggtctttgagtatatgcggcacggggacctcaaccgcttcctccgatcccatggacctgatgccaagctgctggctggtggggaggatgtggctccaggccccctgggtctggggcagctgctggccgtggctagccaggtcgctgcggggatggtgtacctggcgggtctgcattttgtgcaccgggacctggccacacgcaactgtctagtgggccagggactggtggtcaagattggtgattttggcatgagcagggatatctacagcaccgactattaccgtgtgggaggccgcaccatgctgcccattcgctggatgccgcccgagagcatcctgtaccgtaagttcaccaccgagagcgacgtgtggagcttcggcgtggtgctctgggagatcttcacctacggcaagcagccctggtaccagctctccaacacggaggcaatcgactgcatcacgcagggacgtgagttggagcggccacgtgcctgcccaccagaggtctacgccatcatgcggggctgctggcagcgggagccccagcaacgccacagcatcaaggatgtgcacgcccggctgcaagccctggcccaggcacctcctgtctacctggatgtcctgggctagggggccggcccaggggctgggagtggttagccggaatactggggcctgccctcagcatcccccatagctcccagcagccccagggtgatctcaaagtatctaattcaccctcagcatgtgggaagggacaggtgggggctgggagtagaggatgttcctgcttctctaggcaaggtcccgtcatagcaattatatttattatcccttgaaaaaaaaaa

SEQ ID NO: 749 - DNA, 1555 bp, Homo Sapiens
  NM_001007793
agcggtttccctttgagccggaacaggatgactgggttgaccgatgctgggcagctgagcggaccaatcggccccctagactgagacgttggcgtttgaaatcagccaatggcaggtctacactggagcttcctctccgcctccttcgcctagcctgcgagtgttctgagggaagcaaggaggcggcggcggccgcagcgagtggcgagtagtggaaacgttgcttctgaggggagcccaagatgaccggttctaacgagttcaagctgaaccagccacccgaggatggcatctcctccgtgaagttcagccccaacacctcccagttcctgcttgtctcctcctgggacacgtccgtgcgtctctacgatgtgccggccaactccatgcggctcaagtaccagcacaccggcgccgtcctggactgcgccttctacgatccaacgcatgcctggagtggaggactagatcatcaattgaaaatgcatgatttgaacactgatcaagaaaatcttgttgggacccatgatgcccctatcagatgtgttgaatactgtccagaagtgaatgtgatggtcactggaagttgggatcagacagttaaactgtgggatcccagaactccttgtaatgctgggaccttctctcagcctgaaaaggtatataccctctcagtgtctggagaccggctgattgtgggaacagcaggccgcagagtgttggtgtgggacttacggaacatgggttacgtgcagcagcgcagggagtccagcctgaaataccagactcgctgcatacgagcgtttccaaacaagcagggttatgtattaagctctattgaaggccgagtggcagttgagtatttggacccaagccctgaggtacagaagaagaagtatgccttcaaatgtcacagactaaaagaaaataatattgagcagatttacccagtcaatgccatttcttttcacaatatccacaatacatttgccacaggtggttctgatggctttgtaaatatttgggatccatttaacaaaaagcgactgtgccaattccatcggtaccccacgagcatcgcatcacttgccttcagtaatgatgggactacgcttgcaatagcgtcatcatatatgtatgaaatggatgacacagaacatcctgaagatggtatcttcattcgccaagtgacagatgcagaaacaaaacccaagtccacctaatcatcctgtgaaagtggtttctctatggaaagctttgtttgcttcctacaaatacatgcttattccttaagggatgtgttagagttactgtggatttctctgttttctgtcttacaagaaacttgtctatgtaccttaatactttgtttaggatgaggagtctttgtgtccctgtacagtagtctgacgtatttccccttctgtcccctagtaagcccagttgctgtatctgaacagtttgagctctttttgtaatatactctaaacctgttatttctgtgctaataaacgagatgcagaacccttgaatgttgaaaaaaaaaaaaaaaaaa

SEQ ID NO: 750 - DNA, 1698 bp, Homo Sapiens
  NM_001008215
tgagactggggcctcgctcgctcccgacccggttgcaagtgttgcggtgggagaaagtcgcgtccgcatcggaggggaagcgccgtcatgcctaagtattatgaggacaagccgcagggcggcgcgtgcgcgggcctgaaggaggacctgggcgcgtgtctgctgcagtcggactgtgtggtccaggaaggaaaatcacctcggcagtgtttgaaggaaggatactgcaactctttgaagtacgcattttttgagtgtaaaagatcagtgttggataacagggcaagattcagaggaagaaaaggatattgatgcattatgttgaagccaacatggaaaacaacaaatattttccctggtcattaacacaaagaagccaaaacaggaaacatactttttactacatctgtttggttggaccagatttcccctccgtggaacactgaagaaagtggatgagttgttttcgaatatgtataaagtaaatgattctcttgatccaagttatttttagaagaaaaacctaattgaacaggtatgggttgggagcataataaatgtgttttgagaattgttctaaagcacagaaaatggaaagactgttatttgcaaacttgactcttcaattgaattacccaattagtacaggccactgatttgactgacacagtcgataacatgcagcctatccagaaggtgtctgttgggaaagtttaggataaaactttttctttagttcagtcttttcctgtctagttctaaaatgaattgtgtttgattccttagagaagaaatacttcatttgtgctctgattcactgaagtaataacctcagcactttaatagcgtccacaggcatagctgatgctaggccccagattgtgttgcccaggctctttaccatcatcttcggactgtttttgtttcctggttacattttcagtctggcccgctctacataatgggccagtgtcagctccaagtccacatccttattatccatgattcaaaagggagagagagaacttcctttttcagggtccacaaatcaaatctataaaaggactctggtcttcccaggatcacctgcccttgcattggaccagtccctgtggaagaggggatgggggcctgtgatcttggccaggcctgggctatctatctgcactgtcattgctaactcctgtcagaatcacatggatgagtagtgggctgaatcccaaaaggaaaggggtttagagcaagtggaaacaacagatgttcactatagaaagcaagaatgaaaaccatgaagtggttgaagattagccttacagtaattttattctgatcacttaatacagtagagtcaaacaggaatccaagtttccaactttattatttttggcactgaagaattacaaagaactctagcgtctttatacctccgtggttcactggagttaaagcaatcggggcgttgtacagctcacttgagtttttaaaggttctactaaaaagtgagaattccacagcaatatgggtcattgttgcagaatatcacaaaggtctgttgtgtatactccttttcaccaggaaagggacaataatagtttttttcaatgtatatatatataagtgatctaactttttattaataaaagtaaacaactctaaaatgtaaaaaaaaaaaaaaaaaaaaaaaaaaaaaaaaaaaaa

SEQ ID NO: 751 - DNA, 5892 bp, Homo Sapiens
  NM_001008388
aggccgaggccgccagtgcccgccggccgcttccgctcccggcgcaggcgcggcagcttggccagagcggagggggctcgggagaggagtggacgccgctggccaggatggtgctggagagcgtggcccgtatcgtgaaggtgcagctccctgcatatctgaagcggctcccagtccctgaaagcattaccgggttcgctaggctcacagtttcagaatggcttcggttattgcctttccttggtgtactcgcacttcttggctaccttgcagttcgtccattcctcccgaagaagaaacaacagaaggatagcttgattaatcttaaaatacaaaaggaaaatccgaaagtagtgaatgaaataaacattgaagatttgtgtcttactaaagcagcttattgtaggtgttggcgttctaaaacgtttcctgcctgcgatggttcacataataaacacaatgaattgacaggagataatgtgggtccactaatactgaagaagaaagaagtataataataataacaatattttctcattctttgtgtatagaaaattttaaaatggtggtcttaattattactactggttgaacaattatttcttccaatttattttcttcctgcactactgtttgtatttgatcctttgtctattcagtcacttaattagaaattaaattgtcaagcctcttattctgacttcaaagaattaatgtatcttccaacaataaaatcacttctgattttaatctaggaaaacctaaattgtggctatggatccaaagctgtttgtttctttgaatatcaatattttcaacaggatcttgtatttaaaattcccacctacattgttaaatatgttattttttcatatctcttttggttttgataatctgaagtgtttttttctcgttttggccttccaaactgcatttggttaggtgaattaagaaaaatattgccatcaagaattacttgtgttttcacagagatagactctttgctttatagagattgttgtgtatttaatatgaatatcccagctttagaaaagaagtaaactggatacaaaaagttccattgaggaacagttatttacagtataaaagatttgtttactttacaaaaggcttgtgtctgtgtgtgtgtgtgtgtgtgtgtgtgtgtattttaaactgactcagtgacagctggggtggaatggcaagaacacttacaaccaaactcatgggctgctgcaatttgaagataattggtaataaacataagacattaattcatattaaaatagttcagtgttcaaaattgtgtttatgtggatatttttctctttttaacactataaaccattaaaatacagtcatcccttgtatacgctagggactggttccagggccacacatataccaaaatctgcccatactcaagtcccacagaaagtcttgcagaacccatatgtagaaaagttggccctccagttgaccctccgtacacatgagtttcacatcccatgcacaaatgctgatctgtgtgacctcacctgcatttgattgaaaaaagtatgcgcgtaattgtacccacccagttcaaacccgtgtgtaagggtcaactgtacaaaaaagtttgtgaaataaacgtactggagaatctttaaaatttttgtgctttttaatcctactattatgaatctttttagtttcatcttacattactactctcataatagctatccttagccaggtgccatggcacaggcctgtagtcccaactgctgggaagattgaggtgggaggatggctgcagtacaagagcccaggagttcaaggccaggctgggcaacctagtgctccgcctctgctgggctctgtagggaatcctttctgttgtaaaagagttaccatttaactcccttcactgagtgcgtttctgagaccttgctaggcactctggaaactgcttagttgagaaaagacaaatacaaaagcttttctttagtctatttaagatacagtttattcagttcactttgctttctttttataagaatgtacaagaggcagacagaggtaatccttctagaaataaaactaattgttattgggcacttgtatgtaccagacactacactaagcatggtacttgggtttttaatttattacatgtaatgtcagtaggttcaattatatgatcgtaacatcttcatgaccagcagcatgtattttagagttagaaatgtagtctggtttttgagaagttttacaaggtgtatgtccaaaattgttctttcctcacatgtcagtgggggataaatacagcattgctctcacttctttgactctgggtgctttttcggatacattttcttcaacactgttaaggggcctcactgtcagattaaccaattatttttccacagttggtcaccagactttggaaaaaatccacctcaccaaaattttggatatcctgatctgtgttcatgaaatgctcttctttttgtaaaatctatcactgcatctcacagcaacttgttttcacacatgttctagtggttcccataacttagattttacaggaggcaaatttactaaaaatgaggagactaaaatgaatgaccaactttgaattttgtcaaataacattgaaaatgaattatctcataaaaggtaattttaataccccaaaagtaagatggttgtactctcagaataaagactttttccctgccacattttcagttgttaaaatatgctaagagctatgcccatatcttttcccacctgtgcacatttttcagaagcgtagggttggtagtaagctgttgctttaataactcctttaaataagcattattagcagtttgcattacttcttgtaaatttacacaattttatcttgtccatctttaaaaaatagacatctaataaccaaatgtatttgaattgatgcagtgtaagtaacttgtagaacttgaggataagtggtaaaagaaaaaaaaaagtaacttggctcttgaaatacatgtcttcggtttctagagccttcaaaatacagccctgttgttactgcgtcacatgattgttttgaggactgcttctgcttacctaggaaactactcatgccttactcagcaaatgaacatcactattacataaacatcaggtatccaaaagtgttagcaggcttgaggtatgaatgattcattcatatgggtaattaagcaagttgaattatggaaagcacctcacaattcacacaattcagctttgagttcaatgccaaatacgatgattcattaagttgactttgtattttgtaacctaatttgttaataagtaagttacaggaagccaattaagccagctgctgatctatatagtactaccttcctcattgtgattccatagtcttccaatagaaatgtgctgtcagaatctgtatagagagtttgtaaatgccactatttaacaaggttcttaagaatttaggtggatgttttatttgatacctaccaaagaagcctaagtaattgtataatacttaacccatttagaattcagttgtggcagcataaccaatctggagagaccaggggagatgttactaatgcttgtactttattcagaaatgagtgcctcattggcttggtgcagtgacgacacacctgtaatctcagcactttgggaggctgaggtgggtggagtacttgatctcaggagtaccataccagcttgggcaacgtggtgagatctcatctctacagaaaaatgcaaaaattagccgggcacagtggcgcaccagtagtcccagttactcgggaggctgaggcacaagaatctcttgagttgaggaggccaaggttgcagtgagccaagattgtgccactgcactccagcctgggcaacagaagtgaaaccctatcttaaaaaaaaaaaaagtcttttttttttttcatctaatcaaatttattgtggcagaaatcagtacgaagttcgtaggacaggaggaaaccaatataaatatctcagcattgtaggaaatttaacccatggaaagcaggggtgaattaaagaccactttgaaggctgggaaaagcagataatttagatatagtcaaagtatgaaatcattgatagatccagaacaaggaaatgatgtatgtgtttacatattacatctactttattaacaattttccctctgttaaactaatatcgactaatagtagtctaggtaagtcaagttcaaattaagtggtaattgaaaaagtcttctttttaaaaaatttttaatggtagaggcagcagctacccagagtctacttattcttacttcacattgaattctaacaagtttggttatctgatttctgcttcttaacaaatcacaagtatcaaaagggtcttgcagaaggggtgaactacaaaatgtgacagctgacagcaagtcaggggaacaaaaataaatttaaggtgaacattaaaggcatagcagcttgagacaatttataggattctgcatacaactgtctctgaggacatcactgtgatcaaattatacaagtgatgtttagtgatgaattggaatcaagataagtagtatgtgttattcaaaaaggcaggatatgtgttgcatttggtggtaacaatttccccttagctatttagttaaaagcttagtgcttaacatgttggaaaatttatatgtaaaatatattgacttactcgatgattggaggctttatcacaggaagttttcccattcaattgaaacatttttcaagcttaatgactataatttactacataattatttattttgttaaagtttgaggaaaactaaataaagcagtagcaatttaagtcataataaattttgttagatgacttcttccactttagggggaattaaaaatcatgtttaaaaaccacatgtgcagcagttctgtgactccctcaacatccggttggccatatagtccctttgcaccacagaggttggagtatagaatatgcccaaagctgttttgttttgttttaactatgcttcatcatctgaggttgtgttaacatagtttgtcctaatagtcttttactggaaacttgctatatttgatcatgttcagcaagtaaactaattttatctactttcatatattttgagacaaagtctggccctgtcacccaggctggagtgcgggggcatgatcgtagctcactgcagcctcagcctcttgtgctcaagcgatcctcccacctcagcctcccaagtagctgagactacagtcatgcttcatcatgcccggctaattttttatttttctaagagacagagtctcactgtgttacccaggctggtctcgaagtcctggactcaagtgatcctccctgcctcagcactcccaaagtgctgggattgcaggcatgagcaaccatgcctggtgttttatcttttgcagaaatccaatttagtaaagtcatgttgtagcaagcatcactttaatataaaaagtgtacagcttatattattagcaattgtactgtttaattttatattagttatggtcttgaaggacattgaaaatctgttcagaaagactatgtttttcaaccagagatgacatcactctaactttcctttggtttaaatgcttgattcttcgcttacaaaacttctgttttgaacaactatggtgagaaagtatatttgtgatactgttttcttagaacactgttgtcagatagatcagccataatgttaacacatttctgatctctattataaggctgtaattttccaaaataatacagaaaaggagaaaagggtagtacatttcataattagagataaccctgtactagtgagaaaataaaaatgtcaagtttattaaa

SEQ ID NO: 752 - DNA, 1447 bp, Homo Sapiens
  NM_001008394
actttccacacgctgggagggccgttacctcagagatacccgtggccggcatgttggttgaaaaagcttcccggaagggagacgaagagaaaggagaggagcagctcgtgatcatccccggtagcgagtacgcggcgaagtaggcggcggcggagggagcgctgatgaagatggatgtgtcagtgagggccgcgggctgctccgacgacctcagctctggggaggccgacgtagacccaaagctcctggagctcaccgctgacgaggagaagtgccgcagcatccgcaggcagtaccggcagctcatgtactgcgtgcggcagaaccgggaggacatcgtgagctcggcgaacaactccttaaccgaggctctggaggaagccaacgtcctctttgatggcgtgagccgaaccagagaagcagccctcgacgcccggtttcttgttatggcttctgatttgggtaaagaaaaggcaaagcagttaaactcagatatgaacttctttaatcagttagcattttgtgactttctgtttctgttcgtgggtctgaattggatggaaggcgatcctgacaagttgagtgattgtgatgatagcatagctctttccttctggaaggcaatagaaaaggaagcaacatcctggatggtaaaagctgagacattccattttgtttttggttcattcaagctagaacgttctgcaccaaagccccgacttgaacaccagaaaaaagttcgcaagatggaagaaaatggcaacatgcctacaaagttgcagaagttggacctgagtagttatccagaagcgacagaaaaaaacgtagaaaggattttgggattgttgcaaacctactttcgaaagtatcctgatactcctgtgtcctattttgagtttgtgattgatccaaactctttttctcgtactgtggagaatatattttatgtttcttttattgtaagagatggttttgcaagaataaggcttgatgaagacaggctgccaatattagagccgatgaatgttaaccaaatgggtgagggaaatgattccagttgccatggcaggaaacagggagttatatctttgactttacaggagtggaaaaacattgtggcagcttttgaaatttctgaggctatgattacatactcctcatactaaagatttcttagtatagcatcctttttgtgttttttttctgaagttagatggagagtaaaatgtaaactgaagcacatattgtatctcttgtaaagtgaaaaagtattttcaagaacatcagacattgttttactgtgcagcatatttttcttagtaatttataaggtcatgatcttctgttattaaaacaaattcactggcatatttatgggaacgttttattgaatgccctttaagactattaataaaaacaagttttggataccaaaaaaaaaaaaaaa

SEQ ID NO: 753 - DNA, 5788 bp, Homo Sapiens
  NM_001008405
gtgtgaagaaaaaaatgacactccaatgggctgcagtggcaacctttctttatgccgaaataggactcattttaatcttctgcctaccttttattcctcctcagagatggcagaagattttttcatttaatgtctggggtaaaattgcaactttttggaacaaggctttccttaccattatcatcctattgattgttctatttctagatgctgtgagagaagtaaggaaatattcctcagttcataccattgagaagagctccaccagcagacctgatgcctatgaacacacacagatgaaactttttaggtctcaaagaaatctttacatttctggattttccctatttttttggctagttttgagacgtctggttacgcttattactcaactggcaaaagaactgtcaaacaaaggtgtacttaaaactcaagcagaaaatactaacaaggctgccaaaaaatttatggaagaaaacgaaaaactaaaaaggattttgaaaagccatggtaaagatgaagaatgtgttttggaagcagaaaataaaaaactagtagaagaccaggagaaactgaaaactgaattaaggaagacttcagatgccctttctaaggcacaaaatgatgtgatggaaatgaagatgcagtcagagagactttcgaaagaatatgatcaactcctgaaagaacactctgaacttcagcattccagttttggtgaatttttaagcaaaagaagccacaaaaatggcagcattggaaaacagactggttctagaaaaggatcgtttagaaagaggcaacaagaaaagactgtgaactttataaaagacacttgcaatatactgtgtcaaaatgataattttgttatgttagcctctagaaaatttaagttcagaaaaatgcactatgaccggttcgtaatttttttaatgccacacataggttgtattgtaatggcattatcaaaatatttgatgatgtttcagatatattgcaaagtctgtattccagctcttaagaaaaatataagcatgttaaataccatatttacatattgataatgtcattggtatatggtggctgtttaccaataaaaggaaaaaattcattaaccggttgcttccaaaattagaagttttaagttgcatgaaaccattaatagccttgaaagctttgataagttttcagtaataataacctatttaatcagatgatgatgtgtttgaaaatagtgttcaatatcagcaaatttgtacacagggaatgtaaataaggataactgatcagagttatccactgtatttataaggaagagtcggaaaaaacaatgaccttagttttttttaagcctgatgatactatggtttactctaataagatagctatattgataattatatttttgttactgtgcccttgcacattttggtctttttgttaatatttttattaataacacataattagtaaccactctactgtttcaagttaatctagtaatagagcttacatatatttgtataactgctataccactgaactgaatttattttacaacagtgtagaattcttgaaaagttaacgtagaaaatatccaaaaagcagtatttctagaaagtgtccaaaaagcagtatttctttcccttggttgtgagagtaactaattatataaatattacctcaaaaatacatacactggtatcacacagtctttctacaatgtttctgtattctgaaagctaaatattaagtactatttttccattcaaatattcatttagaatttcctttagaagatggcagtgattataatattaatatgatttcatttgttccagtgtttagacatgaaatcatcttccttgtctcatgaaaacctaaatataaaaaaaaggaaaatactggagtttttatttctcttgtctttgttacatcctctgtttattataattttagcaccaacttcacacctagctaatttttttcatcataaagtggatgaaatgagcaagtacctaaaaattttatttcagataaaagtcaggagttactgctaaaaaacagacatgtaggagacattcaacaggagtatgaaatgagagttagaccatatgggctgacaacaccataaataacaagaaaagggagtgctgaaataggagagaacagagcaaatgttagctcaaagtatagacttagaaatatcaaagtaagagctatctggataaatatatagatattgagtgcttggaatcctagcctactatgtgaaaattaagtctaatgtcagaataacttacagaaaaatagaaaatgcacagctttaaaatgggcagagttaaaatctattcccagctttatcacttatttagccatgctagcctaggcctctatttccttgtctccaaaatgagaataataaaatttaggtcaggattactatataaactaagataatacagtgattctcaaagttgttcagactgtatagtaaggagaaagtctggttgcactttgaagagcttgaagatttgaaagattcccaaaaaagcattttaaagtttacatttaagggaccttggacctcaaccctctcaagtttacaagtctgaaactttagacatcaaaagtttgagcagtttttccaaggcaacattgatagttagattcagggccaggctgtaagtctagaatttagatatcctgatcccccagataccgctcttctggttatacacagaccagctataatttgctaaacataaaatattgcagtgtattagccggctgtggctccagagtctgtgccctttaccaccgtgcccaactgtttcacatgctgtgtttggtagtttttcctagtactctccttaataatggtggtgtttagcaaattgtattacataaataaatatttatttcatggattgagttatgttgcatattaaattactttccttcccattgtcaataatgacttctttatgtcttaggctgtattataaattcaaacacaggaatgttattcttgcctttttccatcagaattacctaaagttttattagactttccccctacttgcaaatctgcctggaggttctggtctttaggaagtagcacttagcaagttctggataagcactccagaatttgggatgagttatccttgttgtttgtccagctctatcttggaccccagtgctgctaattagattcatgccttgttctttagggcataagttcctctcttggctatttttcctagtatgctgagaactaggattccctttcagtgacagagtcctgccctggaaccccaatcaagagcctaaagtttaactactctctgagatattagcctgatgccagcagcctgcctggatctctaaatattacccattctgggagttgttagtggtctctgctttcctgcagtgtcactcctgcttcctcattgggcctgctagccacagctacttggatgtacccgaacctgttgccttgccctacctctgtgggctggttcagttctgcattcccattccagtgtccactgccttctcgctatccctcccatctgtgcgccaccaccagcttatccccagccctgctaacatgacaaactattgtgcatttgagtgcccactatacaatgtgtgaatataaccgtgcttttaagcattgactttaatgtctgggatgatccgtctagagtccatggaaccctcctgtgttttttcatccctttcttagtaatcttggaaatccacttatgaaattctttttctaacatttctttgctgaacggcatttttaaaattactttcacggtgtttctttccagtttgatctctacacaaacacaactttattacttgcaccagaaatgatttcaaacactttaggaactgtggtaggcttaattatgacttcccaaaagatatccctataccaatccctggaacctggaaatgttctcttctatagcaaaagatatgattaagttaaagtcttgagatggagagattattctgggtaatctgggagtgccctaaatgcagctacatctatgcttatatagaagcaaagggagatattaccacacagaagaggagaaagcacagtgaccacagaggcagagattggagtgatggagccgcagcaaaggaatgctgacagccaccagaagctggaggaggcaaagaacagattcttccccagagcctcttccagcaggagcatggccctacagataccgataaaactgatattggacttcctggcctccagaactatgggaataaatttattgtttcaagctatcaagtttgtgattatttgttactgctgccatagtaaattaatacaggagcatgcaggacagatctgtaatggcctgaactgaatttcaaggggtgtggaaaacagttactctttaacaccactccgtcttccccattagccatttggataagtcaaagatagccttagccatctcctatcttagttacttttctccttcaactgtattttgccattgtcgttgccattgcctctgcctaactgcaagccatcatcatctctcacatggactatgacgacctcctcatctccctgtatcttctctaatgcttctctcatatacatgctctcagcagccacctggtttaaaacaaaaacaaaaaaaacactaatcatgtcattccctgcttgtcttcccgttctttccaactgtcattccctgcttgtcttccaattctttccaactgcagttaagatcaaaccaccaagacctcaccaggctcccatctacttttcagcctcaactcagtccacctgctctgccaatcacacctgtttctttttgttgttctttccctaggatatagatcctggcatacctgcattctgattcttcttggaacaagccaaattctttcccctgtcagtacgtttgcatgtgtagtacatgttgcatcccaggcctgtctgccttcttaccctattttattttcatcatagcacttactaccatctgaaatgatctcatttatggtttgtctcctcagtgattaacacagttcctgcacacagtaaatcagtagttctcaacaggaagtgaagaggtcatcctgaggggaacatttagcaatacctagagacatttctggttgtcataaccaggggaatgctcctagtggatagaagtcagggaggctgttaaacccattccacaatgcacaggactggaacaaagaatgatctctcactcagaatgtcagtgttgccaaggtggagacatcctgcagtagatgcttgtggcagagggtactggttgtaccccagtatccattctttcattcacctgtgttaatacatgctccagttttgtatttttttttataaacagctgtcaagcataaagataacattttccatctccttgtatgtaagtggaaataggactgtcatgtggggccagtttcttttttttcttcctctgtcctgctgcttgaaacatatgctgctatcttagatcatgaggtcgaggccatgcaaagtggagcaacaaggagctgtgtccctgacgccataagcaccacacctgtcctgaattgctgtgaatgacaccagctaactacaatgcattgtctcaacatcctagacataataaaaagccataaatatgtttgtcctatgcagcacaaaacctttgtatctttgccttttatgttgggatcttaattaaaaattacatcctctactgtcaaaaaaaaaaaaaaa

SEQ ID NO: 754 - DNA, 10355 bp, Homo Sapiens
  NM_001008408
aggagccgggcggaggtgactgccgcgtgtttgcgttgcacgcccaccgcccgaaacacggcggcggcctcagggctgctgcggcctcggcgggggcaggccccggcgcccgcccgcctcccggcctccatcatcccagggtgcaccgcggcgggcgcgggcgcgcggccatgttgcggtagtttgttgttttcttcctgcggaggcgaagggccagctgtggaccgcgaagcgcccggcttcgcctctgcctcctgcagccccctcccttctctgtcctccgtcacccgtacccgggcccggaccaggcacgtcggcccaccagctggcttggtgggggaggctgaaggccgggccccgcgagtgccatggcggccgccctgggagcgagcggaggagcaggcgccggagatgatgactttgaccagtttgataagcctggcgcggaacggtcgtggagaagaagagctgctgatgaggactgggacagtgaacttgaagatgatttacttggagaagatttgctatctggcaaaaagaatcagtcggatttgtcagatgaagagctaaatgatgatcttttgcagagtgataatgaagatgaagaaaatttcagttctcagggtgttacaattagtctgaatgctacatctggcatggttacatcatttgaactctctgacaacactaacgaccaatctggagaacaggaatctgagtatgaacaagaacaaggagaggatgaactggtttatcacaaatctgatggatcagaattgtatactcaagagtacccagaagaaggacagtatgaaggccacgaagctgagttgacagaagaccaaatagaatatgtggaagagccagaggaggagcagctttacactgatgaagtgttagacatcgagatcaatgaacctttagatgaatttacaggaggtatggaaacattggaacttcaaaaggacatcaaagaagaatcagatgaagaagaagaagatgatgaagaatctggacgattacgtttcaaaactgaaaggaaagaaggaacaattattaggctctcagatgtaactagagagagaaggaacattccagaaactttggagctttcagcagaggccaaggcagcattgcttgaatttgaagaaagggagcgacagcataaacaaggacgctacagctccaggcggggaggacggcgaggaggtccgctgatgtgtcgtggtgtgggggaccagaggagagagagcaccgagaggggcaggatgaaggaccacagacctgcgctgcttcctacacagcctcctgtcgtgactcattctccaaggttaattcctccacagccccaggctccccctccaccgccaccgccgcctcagcagcagccgatcagaagcctgttccagccgcagccgctgcagccgctgcttccggtgcagcacccgcaccacccatccccgcctcagggaatgcacatgcctccccagctagagaccccaaggatgatgatgaccccgccacccgtgactccacagcagcccaagaacatacacatcaacccgcacttcaaagggacggtggtcacgcctgttcaagtgcccttgctaccagttccgagccagccgagacctgccgtgggaccccagagattcccaggccctccagaatttccacagcatacacctggacctgttcccaacagtttcagccagcccccacgactccctctccaggaccagtggagagccccacccccgcctcaggatcgagaccctttcttcttaggagtttcaggtgaaccaagattcccgagccatctttttctggaacagcgaagtccccctccaccaccaccgcctcctacccttcttaacagtagccatcctgttcctactcagagtcctctaccattcactcagccaggaccagcatttaatcagcaaggacagcagccagtgttcccaagagagcggcccgtacgaccagccttgcagcctccaggtccggtggggattctgcactttagccagcctgggtcggcaaccacacggcccttcattcctcctagacagccgttcctgccaggcccaggacagccgtttctgcccacacacacacagcccaacctgcaggggccgttgcatcctccattgccccctccgcatcagcctcagcctcagcaacctcagcaacagcccccgccacagcaccagcctccgcaccagcccccgcaccagcccccgccccagcaccagcccccaccccagcacccaccacagcacccgccgcagcaccagcaccaccaccaccaccaccacctgtccgtcccgccccctcctttgatgccgatgtctcagccacagttccggcctcacgtacagaccgctcagcctcaggccagcagcagccggatgcagtgcccccagcgccaggggctccggcataatacaacttctcagaatgtaagcaagcggcccatgcagcaaatgcagcccactgcgccaaggaacagcaatttgcgtgaattacccatagcgccgtcacacgtgatagaaatgagcagcagccgctgctctgccacgccctcagcacaagtgaaacctatcgtcagcgcgtcaccaccctcgcgggccgtggcgggttccagaagctcacagggaaagacggaagtgaaagtcaagccagctagccctgtggctcaacctaaagaagaggcaaaaacagaaacagagtttcctgatgaagatgaggaaacaaggttatatcgcttaaagatagaagaacagaaacgcctaagagaagaaatcctgaaacagaaggagttacggcggcagcagcaggctggtgccaggaagaaggagctgctggagagactcgcgcagcaacagcagcagctgtacgctcccccacccccagcagagcaggaagagcaggcactgtcaccatcacccaccaacggtaacccactgttgccctttccaggtgcacaggtcagacaaaatgtgaagaacagacttcttgttaaaaaccaggatgtcagtatttcaaacgttcagcccaaaacatccaattttgtaccatccagtgccaacatgcagtatcaaggacaacagatgaaagcactgaaacatttgagacagaccagaacagttcctcaaagtcagactcagccgctgcataaagtgctcccgatcaaacctgcagatgtggaggagccagctgtcccccagactcctcgagtggcgtccatccagggccggccccaggacacaaagcctggcgtgaaaaggactgtcacgcacaggacaaacagtggtggtggagacgggccccacatcagctccaaggtcagggtgattaagctgtcaggtgggggaggagagagcgatggcttttttcacccagaaggccagccccagcggcttccccagcctccggaagtgggaccacagcctgcccgcaaggtgacgctgaccagggggggcctccagcagcccccacatctgccagcggggccccacgcacactcgcctgtccctccagggatcaaaagcatccaaggaattcacccggcgaagaaggccatcatgcacggacgaggcagaggagtggccggtcccatgggccgggggcgcctgatgccaaacaagcagaacctgcgggtggtggagtgcaagccccagccctgcgtggtgtctgtggaggggctgtcctcgtccaccacggatgcccagctgaagagcctgctgatgtcagtgggacccattcagagtttacagatgcttcctcagcaacggaaagccatagctaagttcaaggagccagcccacgcattagcatttcagcagaaattccacaggcatatgatagatttgtcccacataaatgtggccctgatcgtggagtgagtcctaacaagagagcctgaccttaggctgtacacacactgtggaatttcttcaagggagctgccggccggcgcagaacccccaggagcacaggtctctccgggccgctgtcctgcgtaactgttctccagagcgccagccagccacgggcctgattccagaggagccgaactgacaggacacagcaggctggagttggtgttagattgcttcacattctcttgtcaccaccaagaactccaagtttttcgttttgttttgttttcaaagtgcttacaatgcatgtagacattgttctttgtggtctgactctatgatcgatcacagtgacttagattcaggaaagaacattaacgtcacaagttctaagtagttttcacagcaaagaatatttgataatggttgcacttatcttcagtgcaggttagaagagtcttctcaaccaagcttaactcgagttgtcttctcagccctcaaaaggctcttgtacaaaatgtagattaaaatttgggtgattgttgattgacctttgcataccctggaaagccagggtgtgagtggggtggttgggagtggtgccagttgaacagcagattctgcttcttgtcactgtttcaaaagcgtcaactctgtgttcctagtttcgatgaactccccattcatttttaacacacttcccagataaggcaatgtgctggacaggcacacggcatggccctcggctagagcagggtctgtgatggcctcacctggcagccctctggcctagttcccaccacacatgaggtggtggaatggcctgaaggtggaacagacctgtttttttcctttttaaatgcagtaaggtggcctgtttatcactggctctgtgatacatgacattctttgggaatttggtggccactgcttcagtcacctctgtttttctgaaggctgttccagcagggctgccctgttcatcagcggatgttcactctggcctgccgttccccgtggcatgcggggtgagggtggctttcttccagccccaaatgagacgagtctgtgtcatcattgaaactgcttttcgtaattgcgggtaggttcctgtaggtgagacatattctccataaagctactgtagtagaattcattctgggcaaacactgaaaaaagtgccttacagtatttctgctcatgaaagagtttcactattttggatatattctaaagtggacctgagctatttgagcaaataatgatagggcatactcagacattttagctaccttttatacctacgatttcatgtcacatttactaatagaattaagggaaatagaagcccgttctttcttactgcccctggagggagcatggcgctagggctctcagcctcctagaaggaagggactaaggagacgggcacagacttgcgtcatctcgtttccacagttgacgttttatattactttctcaaattaagttaccaaaacaaactgaagagctgaagcaggtcttccagaccctgcgatcctttctgtagcagtgattctaaagtggcgtttgctgtgtgcttgagagtaacactgcacgctgcaggggctgttgcagcagtcagtcccaggaagccacagcgcttgtaggatctgctaggaccctgcagctgtgctgccgccacctctgctccagagtgtcccagccaaccctcggaagatgggattgccagtcagccctgcctcaccatgcctgcaggaggctgtccagggagcaggtctgtgtgcccatcagcaggttcccatggctgtcactgcccactcatttccacagttagatacggatgtgttgatgtatttcgtctagtttatttggctcagtccacagctgcgttggagtggtgactttggtagcccttgagctctaattaagagagatccaaaccactcagtacccactgggcagtgggaaggcctaccgacttactttatcattgagggcttactgatacaatgaaatgagtttcatgactttttttttttttaaacactttttgaaatagagtgtgctgtgtttaaaaccaaaaatatgcatgttgtctctgaaaagtaggcattgaaacagacttttttgtagtcagtgttaataaaacggatcctgtttgggccttcattgttaaggtggacttcatggccactggaaggtctgttttggtgttacctgagtgtgacacaggccctggggtgtgcgtgtttctctaactgtctacacgtgcacataggcagactttctcatagaatgttcttgaaaggtgattggcaaagtcatgcaggcccgccttaaagcgctgattagaacagtccaacacagtccgacctcactcaatacccacaaccatcgaaaatggattcttagtaccagacaatcccagtaatgaaggtttagtttccttgaaggaaactacagaaaaggaaagaagcagaatgagaaaggaatggtacttaggtgtttggtatgctgctcacgtgaagtcagcccacaccagccaaaccctcgtggaagatctgctgcaaccattatctttgttcttgagttcatcatgcatttaaaatgagatgcaagagcatttagcataccatgtaaatatggaccttttaaaattaaaatactattggaagtgctttcaactcagccacatcttagctattagttctttgtgttgtcttatcaaagtttaatggatacagttccacagttgttgatgtgtttgtgtgtatattcgatttttataaagatggtagtaagtcaatacatttatcctgatctgtgtattatttgttcacaaattcaagaagcttaaaggtcgtaaatatcagtatctcataaggtaaaccaatagctgattatgtggagccaagttacttcttttctttttgcattatcttgttttggttttgtgctgtaatagaagttcacttagctactttagataaccttgcattaccactggtctggccacgtttgttaaatccttatactgatattcttctaaagagtaaatctcatcatttttccagacaaattttgaggggtttctctgttttgtggacaggcagcagcctccgtaggcacccgcaccctgccttgctggaggagatgggatggggcgggaggtggcttcaccataactatttttaatatgggtcattcttagcatgatttgtaaaggtctcaggcaaacagttgttgaagcttgcttctgtggcatttctgaattgtggcagagcttagatcctgcacccaggggtctttttttcaaacagcatcttgctcagttctgtgaacagaaggctttgttactgaaggaggtggaagaggagtttagggtgaaaaggaggaagggatggacagacccaggtgaggagaggcctggggattggggaagctgtcatctcagtgttaataatcaacttgcttctaacacactggcttatcaggggaggtcatccagtccggtcggtggagttgagagcccttgggccagggtgtttggcggcacaggggcatccgctggatggcctggaggagtgggggaggggaacgtcttcactgggtggtgatcagctgggacagttcaggtagggcaggtgagggacccccgaggccctggagccttgtcctgggatgggtttgaagaactcatcactcatcacttgttttcttttggcttttgttgtttttgttttgttctgtttgttttgttttgtatttctttgttattttattgggaaggtaagcggaatgtgctcatagaccatcagacgcttgtcgaaggcaggtcctagtcatgtaattgcacaggacaaggaggtcagcgtgtgtgatggcagcatgctgtgccggcacatcgtggagtcctagaaactctctagtccctgcggctgttcccctcctctgctctctccctggagaggactgccagctcttaagaaacattcctggtgcggtgtctgcagtgccctttgtgggtgacttcaggcttcccgctttcgtggtgctcttcctgggattcgtttttttattaccctccctccctacttgtaggcctcagctatggcttgacgtaatcgcttttagacccaggttggcttcccttcattaagctatgatcctccaccccattttttttttttttaatttggagtgggagggaggggggtgggcgagagaaagctcgaaaggtattattggtttttcaaaaaattagaggtgacgattctaccagggagttgactgataggagtgtgtgcagggcaggaaaggttcggaggcacccgactaccaccactcggaaagccgctagtccagatcgactagggagaggcttagatactttagtgtatttaaagagcatttcagttaactttttcagctatttttaaagtttgtgaatggagtgttattttggacattcttaaatatgaattctccaaaggcatttagccttgacttaatattaaatcctaaggattttatgtaaggtttttttgcaacctatttaattttttttaaatgcctaacttctgaggtgcataagcccgtggtttgtgtactggaactaaagcggaactcactgattcatattggatccccaggtataccttctgctggtagcatatggctggaaaaggccgtttgcctcacacattgtaacctgccttggctagaaaatgcttttaatgtctcaactctctcttttctgtgtcatgttttggtaggaaatctttaagattggcggacggaacaggtattttagtgagacacttctgagtacttgctttttcctttgacttctaaccaactaaaagagaaggaggtcttcatgttgatattttgcttggttttattttactgattttaaaaggtatatagaaaaatgtaggcctttaaaaagaaacagcatgtagttttttattttaatatgttccatagagtggataggcagacaggtactattgtaatgtattctgtatttaataatttaatatactctagaaagtagacctcatgcattcttttagcatgattttcttttaaactgcttttcattttaagggcacccgtggcggaagctggttttgcaaggactgtgtaagctgtatgcgttctagctgtatgcgttctgtagtcttttcttaggtgggtaacattttcaataacgcgcgcacagcacacaggggtgccctgagccgaaggagcaaaaaaagccaccgctcgtttctataatccagctttgcttttcacaggcgtgggatccaggatggtgtcctctgtgaggacttgaactctggggctttaattccactgtttaattttcaggtaccacagcagcaaagcacagagtgtgacctttttcatgtctgagctgattctgtttgctccacgtgcctgcttcttgctactgttcatttagtaatgggatcacctcaccatgccatgctctgggctctccctctctgtccatttctgttttgctttcctggctaaacccatctaccattcttaacactggtagctcctgtcccattccaagactcactctctcagaccttcccatctccctggctttccatgctcctctccctccacctcctggcttcaactgggtgagggccgtattcctgccactctgctccgcctcagccttgagaactccacgtgggctgggtgggaaggtgctgacgattttcacactgtgtttaccactccatcacctctcaacctttgcttcgacaggtcttcactcacgatttattcctccaggtctttgattggagagagtaactttttaattctgttgttttgcagtttggctctgtaggagtgagtggcgattcaaagatgccggcgtcccgcagtgtgcggttcgtgcccttaaccacccgcttctttgtttcccgcccctctgctttcgcaggagctcttgtgcttgagttcagtgttagtggtagcgtggctcactccacttggaggtggcggccgtctgaccgtgtgttactgctttgccgacggggcctcccggccctgatgcgtgtacactctgcgggctgcaccgggtggctctggttgggggcgaagctgtgttgactgggagagcgttggaaattgagacatggagagatgacgggagtgcgtttctctgggtttgatctccatcctgttttctcccagacacaccacacctaccttgggggaatgccgttgcctgttccacccctttgttcacttcgcgttaactgctgtggtaactttttcaggatctgtgtgaagaatggtaatgacgtagttgaaaggaaaatgtactgttgtgtgtttcatttgtgtgatttcgtaccaaaaaaatgtgtttgaactatattgtatgtaatttggaagtcgtgttaataaaaccctgcagtttccactctg

SEQ ID NO: 755 - DNA, 1805 bp, Homo Sapiens
  NM_001008485
cccgggcccccggcggggctctgcgctgccggagcttgggcgtctgctgctgtcccggagcgccaagtcgtccgaggtccggccgcccggccggggcggggccagggaggcccggccttcccgcttcctgcctgagccgcaggcccgcccctgcgtcctccgcccgcctctttcccgccgccgcctgggaggggacccgggctgccaggcgcccagctgtgcccagatggatgggacagagacccggcagcggaggctggacagctgtggcaagccaggggagctggggcttcctcaccccctcagcacaggaggactccctgtagcctcagaagatggagctctcagggcccctgagagccaaagcgtgacccccaagccactggagactgagcctagcagggagaccgcctggtccataggccttcaggtgaccgtgcccttcatgtttgcaggcctgggactgtcctgggccggcatgcttctggactatttccagcactggcctgtgtttgtggaggtgaaagaccttttgacattggtgccgcccctggtgggcctgaaggggaacctggagatgacactggcatccagactctccacagctgccaacactggacaaattgatgacccccaggagcagcacagagtcatcagcagcaacctggccctcatccaggtgcaggccactgtcgtggggctcttggctgctgtggctgcgctgctgttgggcgtggtgtctcgagaggaagtggatgtcgccaaggtggagttgctgtgtgccagcagtgtcctcactgccttccttgcagcctttgccctgggggtgctgatggtctgtatagtgattggtgctcgaaagctcggggtcaacccagacaacattgccacgcccattgcagccagcctgggagacctcatcacactgtccattctggctttggttagcagcttcttctacagacacaaagatagtcggtatctgacgccgctggtctgcctcagctttgcggctctgaccccagtgtgggtcctcattgccaagcagagcccacccatcgtgaagatcctgaagtttggctggttcccaatcatcctggccatggtcatcagcagtttcggaggactcatcttgagcaaaaccgtttctaaacagcagtacaaaggcatggcgatatttacccccgtcatatgtggtgttggtggcaatctggtggccattcagaccagccgaatctcaacctacctgcacatgtggagtgcacctggcgtcctgcccctccagatgaagaaattctggcccaacccgtgttctactttctgcacgtcagaaatcaattccatgtcagctcgagtcctgctcttgctggtggtcccaggccatctgattttcttctacatcatctacctggtggagggtcagtcagtcataaacagccagacctttgtggtgctctacctgctggcaggcctgatccaggtgacaatcctgctgtacctcgcagaagtgatggttcggctgacttggcaccaggccctggatcctgacaaccactgcatcccctaccttacagggctgggggacctgctcggttcaagctccgtgggccacactgctgctgtgccaagaaggtgtacagcctccccaggatggggcctcatacaacccttcatctgcactcaacatttaatcgtgtccttgctgtctttttattttcctttttgtttgttagcaaaaacctctatttagatttcaataatcagagaagtgtaaaataaaacagattatattgtacttgaaaaaa

SEQ ID NO: 756 - DNA, 1149 bp, Homo Sapiens
  NM_001008489
aacaagggaggtgctgcagttggcggtcgggctagagaagagaggcgcctgcgcttgcgagctgggcttgtgagtggggctgccgagagggcaggcgtggggcgaggccaaaggactgaacccgcaggagcgtcacgggcgccggggcggctgccgacggcgggactgggttttctatcagatgttccacgtaataatgctggagttaagaagtttccattattttgctccaaaccagaagactctgttccctgtatatagaataggagtaatatttgaaaacaactggctgatgtttaaaactgaagattgtcatgattgtttatcctaatcccaatgctgaagtaagattgtcttggaaatactaagttggggtaatccaaatctatttctggaaccatgaaaattttgctagtttttgactttgacaatacaatcatagatgacaatagtgacacttggattgtacaatgtgctcccaacaaaaagcttcctattgaactacgtgattcttatcgaaaaggattttggacagaatttatgggcagagtctttaagtatttgggagataagggtgtaagagaacatgaaatgaaaagagcagtgacatcattgcctttcactccagggatggtggaactcttcaactttataagaaagaataaggataaatttgactgcattattatttcagattcaaattcggtcttcatagattgggttttagaagctgccagttttcatgacatatttgataaagtgtttacaaatccagcagcttttaatagcaatggtcatctcactgttgaaaattatcatactcattcttgcaatagatgcccaaagaatctttgcaaaaaggtagttttgatagaatttgtagataaacagttacaacagggagtgaattatacacaaattgtttatattggtgatggtggaaatgatgtctgtccagtcacctttttaaagaatgatgatgttgccatgccacggaaaggatataccttacagaaaactctttccagaatgtctcaaaatcttgagcctatggaatattctgttgtagtttggtcctcaggtgttgatataatttctcatttacaatttctaataaaggattaatatgtcagcaaaaaaaaaaaaaaa

SEQ ID NO: 757 - DNA, 1708 bp, Homo Sapiens
  NM_001008490
gggggaggctggcagcggagctttgaatagggaagttttgcaggggttacgtttgcagtcagtccggtgtttgcaaatattgtgtgggctccgcgcgctgcgggctgcgggagggtccggccgggcgtctctgcgagcctggagtttgcatgaaactttcacctgcgctccggggagactttcggctccggctcccaccgcgcgcctcgccgccctcgcgaccgcgggctccgtccaacccggcccgacatggacgtgctccccatgtgcagcatcttccaggagctccagatcgtgcacgagaccggctacttctcggcgctgccgtctctggaggagtactggcaacagacctgcctagagctggaacgttacctccagagcgagccctgctatgtttcagcctcagaaatcaaatttgacagccaggaagatctgtggaccaaaatcattctggctcgggagaaaaaggaggaatccgaactgaagatatcttccagtcctccagaggacactctcatcagcccgagcttttgttacaacttagagaccaacagcctgaactcagatgtcagcagcgaatcctctgacagctccgaggaactttctcccacggccaagtttacctccgaccccattggcgaagttttggtcagctcgggaaaattgagctcctctgtcacctccacgcctccatcttctccggaactgagcagggaaccttctcaactgtggggttgcgtgcccggggagctgccctcgccagggaaggtgcgcagcgggacttcggggaagccaggtgacaagggaaatggcgatgcctcccccgacggcaggaggagggtgcaccggtgccactttaacggctgcaggaaagtttacaccaaaagctcccacttgaaagcacaccagcggacgcacacaggagaaaagccttacagatgctcatgggaagggtgtgagtggcgttttgcaagaagtgatgagttaaccaggcacttccgaaagcacaccggggccaagccttttaaatgctcccactgtgacaggtgtttttccaggtctgaccacctggccctgcacatgaagaggcacctctgagggagcagagaggtggatcctgtaggctaaaaggcttccaggctgagagccggccgtggaaggagggatgcgtgttccagccaaagcatgccgttctgcaccctacccagttgcctccagggcctctccttggaaggtcttttgagggctaaaaaggtcctgtaagaagcggcatagcacccgtggtgcatgcctgtcctgggagctggagaggatgtcagcgagcctgacattgccctccctgaatgcatcaaatactcttctccaaggactgacaaaaacaaccccccggctgtgggcacagtagggaaccatgccggtttgatcttccattgctcaagccagggaatgcattgcagaggcacctgcacaacgacaaacttgagtgtttccctgccacttctgtgcctccacagcctgctccagttccgcagctagagctgggcctaccttccccagccagccctgccacacacctggctgaggcatgtctgggaggggtggaggaggcagagggactccaggccagagggctgttctcacaacctcagcccactctcagtcaaggagggcagaaaataaaagatgacatcactgccaaaaaaaa

SEQ ID NO: 758 - DNA, 2018 bp, Homo Sapiens
  NM_001008566
gagaggcaggcccatcgcaaggctgactgatccttcaaaggagcctcccagctaaaagccagcaggagagagaccttggccaccaagggtctgccagctcctggtggtccccactccagccacctgccagctcgagcctgaccctcgcctccaccctggctgctgcctgtaccgctctcagggctctgccagcagacagccttggcacacaggcacaagggctggagcccagagatgagagtgcccaagggagatgtgagcctggcgggctgcccgctaacctgtcgctgaagccccagaagcgggccctcaggccaggcctaccctgcctccggcccagcatgcgcctgtcggtgcggagggtgctgctggcagccggctgcgccctggtcctggtgctggcggttcagctgggacagcaggtgctagagtgccgggcggtgctggcgggcctgcggagcccccggggggccatgcggcctgagcaggaggagctggtgatggtgggcaccaaccacgtggaataccgctatggcaaggccatgccgctcatcttcgtgggtggcgtgcctcgcagtggcaccacgttgatgcgcgccatgctggacgcgcaccccgaggtgcgctgcggcgaggagacccgcatcatcccgcgcgtgctggccatgcgccaggcctggtccaagtctggccgtgagaagctgcggctggatgaggcgggggtgacggatgaggtgctggacgccgccatgcaggccttcatcctggaggtgattgccaagcacggagagccggcccgcgtgctctgcaacaaggacccatttacgctcaagtcctcggtctacctgtcgcgcctgttccccaactccaagttcctgctgatggtgcgggacggccgggcctccgtgcactccatgatcacgcgcaaagtcaccattgcgggctttgacctcagcagctaccgtgactgcctcaccaagtggaacaaggccatcgaggtgatgtacgcccagtgcatggaggtaggcaaggagaagtgcctgcctgtgtactacgagcagctggtgctgcaccccaggcgctcactcaagctcatcctcgacttcctcggcatcgcctggagcgacgctgtcctccaccatgaagacctcattggcaagcccggtggtgtctccctgtccaagatcgagcggtccacggaccaggtcatcaagcctgttaacctggaagcgctctccaagtggactggccacatccctggggatgtggtgcgggacatggcccagatcgcccccatgctggctcagctcggctatgacccttatgcaaacccccccaactatggcaaccctgaccccttcgtcatcaacaacacacagcgggtcttgaaaggggactataaaacaccagccaatctgaaaggatattttcaggtgaaccagaacagcacctcctcccacttaggaagctcgtgatttccagatctccgcaaatgacttcattgccaagaagagaagaaaatgcatttaagtggaaatcggacctctaatccaagcatattgcttgctattaatcgccaaaacaggactgctgatgaggaatgtatttgcatatgtttgcaaaagctgaatcattgaaaacgtaccttgaaactctctatctctggacactccagggtagagaatgaagggtatggaagtagtccggcttttgaaacttaggtattttatatttttcccctcaagaacttttttttaagagacagatttgccatcctccttaatttgcaggactgccttggtggctttgtttgctgggacaaggcccacaacctgtgcctctcctattgacccttactttgaattcaaagaatctatttaagagtttaatatatgaggctttctttgattcctcctcagttctacctagtttcacagaggaaaaaaatactctttgaataaagtgaacagaggctcatttgtttgtgccttactttactgaaaaaaaaaaaaaaaaaa

SEQ ID NO: 759 - DNA, 1215 bp, Homo Sapiens
  NM_001008696
cgcctttctcagatactgaggaggcttgaacctgtgggtgggaggtgaagcggaacggtcccggcgggactgaatgcagtcgggaaggggaggacgggaagtctagccggcttggacccgccccactctgttacctgccagatgacgctgaggaaactgcttttcttctcgaggcctccgttgcctcgtctgtgcccgggcggtggtgcttacccggcggggtcgcagacttcccaagaaggacaacccgaggcgaggcttgtggctggccaactgccagcggctggaccccagcggccagggcctgtgggacccggcatccgagtacatctacttctgctccaaacactttgaggaggactgctttgagctggtgggaatcagtggatatcacaggctaaaggagggggcagtccccaccatatttgagtctttctccaagttgcgccggacaaccaagaccaaaggacacagttacccacctggccccgctgaagtcagccggctcagacgatgcaggaagcgctgctccgagggccgagggcccacaactccattttctccacctccacctgctgatgtcacctgctttcctgtggaagaggcctcagcacctgccactttgccggcctccccagctgggaggctggagcctggccttagcagccccttttcagacctactgggccccttgggtgcccaggcagatgaagcaggctgcagcgcccagccttcaccagagcggcagccctcccctctcgaaccacggccagtctccccctcagcgtatatgctgcgcctgcccccacccgccggagcctacatccagaatgaacacagctaccaggtgggcagcgccttactctggaagcggcgagccgaggcagcccttgatgcccttgacaaggcccagcgccagctgcaggcctgcaagcggcgggagcagcggctgcggttgagactgaccaagctgcagcaggagcgggcacgggagaagcgggcacaggcagatgcccgccagactctgaaggagcatgtgcaggactttgccatgcagctgagcagcagcatggcctgaggggctgctggactgaccgaggggctgcccagcaagactgcagcctcttcctccctcagatcccaccagacccaccaggtgccataataaagcggattctagacggagaaaaaaaaaaaaaaaaaaaaaaaaaaaaa

SEQ ID NO: 760 - DNA, 1106 bp, Homo Sapiens
  NM_001008699
ccccgcgcggcgcgggccagggaagggccacccaggggtcccccacttcccgcttgggcgcccggacggcgaatggagcaggggcgcgcagataattaaagatttacacacagctggaagaaatcatagagaagccgggcgtggtggctcatgcctataatcccagcacttttggaggctgaggcgggcagatcacttgagatcaggagttcgagaccagcctggtgccttggcatctcccaatggggtggctttgctctgggctcctgttccctgtgagctgcctggtcctgctgcaggtggcaagctctgggaacatgaaggtcttgcaggagcccacctgcgtctccgactacatgagcatctctacttgcgagtggaagatgaatggtcccaccaattgcagcaccgagctccgcctgttgtaccagctggtttttctgctctccgaagcccacacgtgtatccctgagaacaacggaggcgcggggtgcgtgtgccacctgctcatggatgacgtggtcagtgcggataactatacactggacctgtgggctgggcagcagctgctgtggaagggctccttcaagcccagcgagcatgtgaaacccagggccccaggaaacctgacagttcacaccaatgtctccgacactctgctgctgacctggagcaacccgtatccccctgacaattacctgtataatcatctcacctatgcagtcaacatttggagtgaaaacgacccggcagatttcagaatctataacgtgacctacctagaaccctccctccgcatcgcagccagcaccctgaagtctgggatttcctacagggcacgggtgagggcctgggctcagtgctataacaccacctggagtgagtggagccccagcaccaagtggcacaactcaaatatttgctgagttcctcctacatggctagccctgtgctagacactggggaatcggcgatgaacaaagcagatagaaatccccactcttgtggagctgacattctggagggagagacaaaaagcaaacatataaagaaagaaagaaatcacatggatctggatgacagtgagtgctgggaagaaaataaaa

SEQ ID NO: 761 - DNA, 1729 bp, Homo Sapiens
  NM_001008727
atcttttccggcgctggctccgcatggtcagtgccatttcgcctttatcgtggtggagtccaccctggctgtggacctattcaaactcagtctgtctcttgactggaggaggagaaggaaaagttgagcacattgccaaccggagttccccaagaatggcaagttaaaaccaaagtgtcagcacctcaacaacatttttttttggcttaacaaaacatcaaacggcatacaaatggcagaaatccacaatggaggggaactctgtgactttatggaaaatggagaaatcttcagtgaacactcatgccttaatgcacacatgggaactgaaaatacaggggacacttatgactgtgatgagtatggagaaaactttcccatgttacacaacagtgcccctgctggagagacactttctgtgttgaatcagtgcagaaaagccttcagcctgccaccaaatgttcaccagagaacgtggataggagacaaatcctttgaatacagtgactgtgaggaagcctttgttgatcagtcacatcttcaggcaaataggataactcacaatggagaaacactctatgaacagaagcaatgtgggagagcttttacttactccacaagccatgctgtgtctgttaaaatgcatactgtagaaaaaccctacgaatgtaaggaatgtggaaaattctttagatattcttcatatcttaatagtcacatgcgaacccatactggggagaaaccctatgaatgtaaggaatgtgggaaatgcttcactgtttcttcacacctagttgaacatgtaagaattcatactggagagaaaccttatcaatgtaaggaatgtggaagagccttcgctgggcgctcaggccttactaaacatgtacgaatacacactggagagaagccctatgaatgtaacgaatgtgggaaagcctacaataggttttatctactaactgaacattttaaaactcacacagaggagaagccctttgaatgtaaggtatgtggaaaatccttcagaagctcttcatgccttaagaatcactttagaattcacactggaataaaaccctataaatgtaaggagtgtgggaaagcattcactgtttcctcaagcttacataatcatgtaaaaatccatactggagagaagccctatgaatgtaaggactgtgggaaagcctttgctacatcttcacaactcattgaacatataagaactcacactggagagaaaccgtatatatgtaaggaatgtgggaaaaccttccgtgcttcttcacatctacagaaacatgttagaattcacactggagagaaaccctatatatgtaacgaatgtgggaaagcctacaatagattttatttacttactaaacatttaaaaacacactgaagaaaaactctgaatgtaaggaatgtggaaatcttttaggaatttctcataccataattaccacatttgaattcacactgaagagaaattttattggtacaaagaatgtgaggaggccttcagttatccccattcacttcgaagacatgaaagaactcatactctatgtgtcccctataaattttaggaatgttagggagccaatggaatctttttttattattttattttattttattttattttattttattttattttattttatttgagacagagttttgctgttgtcatcacacaggctggagtgcaatggcatgatcc

SEQ ID NO: 762 - DNA, 2921 bp, Homo Sapiens
  NM_001008745
atgggttatagggtccgcgtcagccccgcgcccgcacagccaacgtcacgccgcattcttatttccaaagacccctggagcttggggtcccaccccagcggtctttcggggcgtcccctgcccttcacgcgccgcgccggctcggcccgaagcgccctgcggacccgcagcctgggccgccccgaaccggacggccccgcgggggtcggacgcgggaggaacggcctcgctttcagagacgcagcgggagggcggtccccgctgtccctctggccgggtcctcagcacgcgttctcctcactcccaggactagcgagcggcgggcgcggaccggggcctggggtcggaggcggcgcagccagaaaggccccagcggcgctgagacgtttgggggaaggcgggggcttcgcgtttcgatggcgggaagcggaatgaggttggaccggccgggccggcgttcagggacccggcgggaggcggagggctggcgtcctcgcggacatccatctgcagcgaaccaggcagaggctttgggattagatccttgactccttgcgtcagtagttaagctttgtgatggtctgaggtccatgaagggattaaaaccaggaactggctccttctccaaccactaaagcctcatctgggcccacaagccctggctgttccctggagcgtgactggaagatgtgagcagctttgtgctggagccccatttccatggtgcatgctgctgccaaaccagagatcacttgtagacttgaaagggaacatgagctttgggtgaaggattcccagcccccaacagaggccaaaaagctaccacccagccaggcagaaggaacataaagtatgcattttatgatacgactcagcttggagggatgaagtagaaggtcctcactgcacctcatggcaggctgctgacggcagatattttaccgggctcactgaactgggcagtcagggaagggtcggctcctgctctgtccagctgtcttcataagggactctgtgacactttttataaaaatgactttgatttctgcataagaaggcttcccaagcttgctgtctagcagtggctgctacagggaattattcacatggcagcaagagagccctggctccctggaccaggacattccctttgtgtgtgttggaatgagagcaggaggagtgctggtcagaagcccctccccagggctctgggacttcagtgttctcagacaaactgggccgctcctctgagctgggatgctgacccacacttggccccggctctggcatccacaggacgctgccttatccgtcatctcgctggggctgggggctagaggctgagcaggtcacactgaacaaaagaagtgtgtccccatcactaggctaacatctgagtttcttccacagtatttggtaacacagtcagaaacaagactgaagatgattctggaggcaactgggaaccccccagaacgattctgcaggcttctgggaagctgaaaaaccccaaggccagactggcctcagaatgcctgagtccttttgattccactggaaaagccatccatctgtgccaagtgtgtggagagcttcaagagccatacagccctggccaccatgagcacagccacgtgggggagtagtcctgaaagtgtcctggtgtggcaaaggctttccactaagtggacctcagatggcacaggaagaccctcctggggatgtgggaggacactgcctagtgggtgaggggccgctctttcaggtgtgcacactaaatgcagagacagcctctcctggctgccaagaagcctgtgcatgatccaggaccacaaaacacttgcaaactcactgcccagaggccctgtgcctgtctggagtgtgcccagtgtgtctgcgccccacagcttgtcctggcccgccagcagagccgcagcactgcagggcccttctgttgtgagtgccagggcccttgctggctgcctgagcaaggcaaaaggttcaaaacaggaagtctctgggcagctattcccaggtgcagaggggagcagcggccacacaggtgccagtgtggcaggagctgcagtcagaggcagcatctcaagagccctgggagcaggggccagccacgtgaagcccacgagtgtcgctggcacagggaagggacacgaggatcacactgacccaagagaaggcccacagtgaggaggccccaccgaagcatccccagcaacagggactgaggcatctgaggcagccagcccactcggaaaggcctgctgactgcactccagatgtcaagagcacccttgggaaaaagaaaggcaggagtgcagcactttctagagcctcagctcacttctctccttctagctccagccggagtgatggaagaggctgcgctgggagctgcctccctgggagcctaccctgcccagcctgagagtggaggctaccagcatcacgcttcccctagtgaaatccatctgtcctgaagggaaccctgggacggggtcaaggaaaccctgttcacccccaccacggggtcaggtcttcaccaaagggaggccgcacggattcccagtcgcaaacccaaagccttgctgcctttgcctctgtttccatagttgtttcaatgtcttttttaaaaatcacatacactcgagtaagactgagtctcctcaccgaagagatctggctgtatcccgagtctctgaaacctttgctccagtcccgtgggagcgtgccgtcccgaggatgtggagccgcaagggctcgccagagggatctcaggagctaggcctcaaggagcgctgttgagtgacaggtctgatgcagtagcttttactattggtggaaatcgatgttttttccttgaaagtctacctttctaagttcagtaaaccaaattagatcatgta

SEQ ID NO: 763 - DNA, 1993 bp, Homo Sapiens
  NM_001008800
ctaacttgtctggccgttcttgcgtagggggcgggactaaggctgtcaattggtctgtttttgtgccgatcaatgagatgggtgcggtgattggcgactaccttgagagtagcgggttgaggtgtaagccctgaggaggcagcgttttctgggcttctgtctggttctctctctccagaaggttctgccggttcccccagctctgggtacccggctctgcatcgcgtcgccatgatgggccatcgtccagtgctcgtgctcagccagaacacaaagcgtgaatccggaagaaaagttcaatctggaaacatcaatgctgccaagattcaagtccagcatccagcggccaagtccatgatcgaaattagccggacccaggatgaagaggttggagatgggaccacatcagtaattattcttgcaggggaaatgctgtctgtagctgagcacttcctggagcagcagatgcacccaacagtggtgatcagtgcttaccgcaaggcattggatgatatgatcagcaccctaaagaaaataagtatcccagtcgacatcagtgacagtgatatgatgctgaacatcatcaacagctctattactaccaaagccatcagtcggtggtcatctttggcttgcaacattgccctggatgctgtcaagatggtacagtttgaggagaatggtcggaaagagattgacataaaaaaatatgcaagagtggaaaagatacctggaggcatcattgaagactcctgtgtcttgcgtggagtcatgattaacaaggatgtgacccatccacgtatgcggcgctatatcaagaaccctcgcattgtgctgctggattcttctctggaatacaagaaaggagaaagccagactgacattgagattacacgagaggaggacttcacccgaattctccagatggaggaagagtacatccagcagctctgtgaggacattatccaactgaagcccgatgtggtcatcactgaaaagggcatctcagatttagctcagcactaccttatgcgggccaatatcacagccatccgcagagtccggaagacagacaataatcgcattgctagagcctgtggggcccggatagtcagccgaccagaggaactgagagaagatgatgttggaacaggagcaggcctgttggaaatcaagaaaattggagatgaatactttactttcatcactgactgcaaagaccccaaggcctgcaccattctcctccggggggctagcaaagagattctctcggaagtagaacgcaacctccaggatgccatgcaagtgtgtcgcaatgttctcctggaccctcagctggtgccagggggtggggcctccgagatggctgtggcccatgccttgacagaaaaatccaaggccatgactggtgtggaacaatggccatacagggctgttgcccaggccctagaggtcattcctcgtaccctgatccagaactgtggggccagcaccatccgtctacttacctcccttcgggccaagcacacccaggagaactgtgagacctggggtgtaaatggtgagacgggtactttggtggacatgaaggaactgggcatatgggagccattggctgtgaagctgcagacttataagacagcagtggagacggcagttctgctactgcgaattgatgacatcgtttcaggccacaaaaagaaaggcgatgaccagagccggcaaggcggggctcctgatgctggccaggagtgagtgctaggcaaggctacttcaatgcacagaaccagcagagtctccccttttcctgagccagagtgccaggaacactgtggacgtctttgttcagaagggatcaggttggggggcagcccccagtccctttctgtcccagctcagttttccaaaagacactgacatgtaattcttctctattgtaaggtttccatttagtttgcttccgatgattaaatctaagtcatttgagaaagtt

SEQ ID NO: 764 - DNA, 4334 bp, Homo Sapiens
  NM_001008925
acgtgcttaggagccatattgtcgctagtggccgctggggctgggaggggtgtgctagagaggcgcagcttctctgggcgtggtttttatcctgggggaaggatcggtggaatgtgaggggaggtggaggagatggcggcgacggcccgggaagatggcgccagcggtcaagagcgaggtcagcggggctgcgagcactatgacagaggatgtctcctaaaggcaccttgctgtgacaagctttatacttgccgcttgtgtcatgataacaatgaagatcatcaactagatcgctttaaagtgaaggaagtgcagtgcataaactgtgaaaaaattcaacatgcccaacagacttgtgaagaatgtagcacattgtttggagaatattattgcgatatatgccatttgtttgacaaagataagaagcagtatcactgtgaaaactgtggaatttgtaggattggtccaaaggaagattttttccattgtttgaaatgtaacttatgcctagctatgaatcttcaaggaagacacaagtgtattgaaaatgtgtcccgacagaattgtccaatatgtttggaggacattcacacatcccgtgttgttgctcatgtcttgccatgtggacatcttttacatagaacgtgttatgaagaaatgttgaaagagctacagatgtccattatgtatgcactctgctttagatatgaccaggtattggagacagctggatgatgaagtagcacagactcctatgccatcagaatatcagaacatgactgtggatattctctgcaatgactgtaatggacgatccactgttcagtttcatatattaggcatgaaatgtaagatttgtgaatcctataatactgctcaagctggaggacgtagaatttcactggatcagcaatgacgagcctacacagtactggagaacttggcattttctgatatagaaaaaggctttccttggtatcgtgttatcatgtgtcgtcatctatgcattagagttgatgtgttttgtactagtgtcacagcataaaatcatattacaagtacgtaaggattcagggtctcttgatagacttatcatagctctatattgaatgaaagccactgtgcttgtgttttgattggaaattcctttagtgtcagttttttggaagccaatgatgtttgccactgatacattcatagaagtgtattatattttcatgaagctttgctttaagtgacactacgcgtgcagttcatttctagttcttgatagaactgcacttaattttcagtagtagtcttgactttttaagggctgtgttatattaagttctcccttactgttaaaacctaattaaatatgctttagaattttctaagacagtcctctggatcctctaaatgtgaattttgatgtaataactgctaataaaattatattgaaactgttttatagaaagttttttccaaagttttctatgtttggctcaattagggcagtatcatcagttctataatgtaaaagaaattttctttcttttgaggtattccataaaagtagttgggaaaattattatgtaaaataataagactcttccaaagccttaataaaaacatcaacattgaaaacagttttttttaggttgcccaaaattatttcttcaaagagtcattcattccttcatttagcaagtatttattgagcaactgctatgtggcagatatgtttctagatgctgtagagacaacagtgaacaataaagataaaagtccttgtcctcacagcagtacattctattgttcatcatatttgatcaatgtactcatttttctttatgcaaggagtggatgtcttattgtaaatgaatagaatatttcttccctaagcgtgtgaaaataggggatggatgagtgggaagggcatgggatattcctggcaagatctctgatttcataatacttttttgggctcatgtagtggaattaaatatacctcttacttcaggaacaaagttaacaaatatgtttgatgatccagccgactttgacactgttatctccgtaatagctttaccattaggctaggatgtaaaatgtacatttatcagttgataagtacctattgagcaccagttgtatttccaactttgagctatttgaatcttctttgaataaggaagttagccttttaactagaaagcctaagagttctggcacatttatttcttcttttgttgaaatttattcacctagataaaggcagcagtttgggactcagatctttattttatcccaccttcttgtcttctgtattccactcttcttatgttctttcccttcatctgtttccttggcctggccagagcagcagtgctgatcttcatttgggaaaggatgttcctgggtattaccaattagtatacagataagtaaagactagttttccagatctaatacttttttttgaagtggttttgctctgtcatttaggctagagtgtagtgaagtgatcgtagctcactgcagccttgacttcctgggctgaactgatccttccacctcagcctcctgagtagctgggactacaggtgtgtgccaccatgcccagctaatttttaattgttttgtagaaacaaagtccaggctggtcttgaactcctgggctcaagcatttctcctacctcggccttccaagggctaggattacaggcatgagccactgtgcttggtccagatgtattactttttatgtttggtattattctgccaaaccaatcatgttattgtttttaatcattgaatcattggatctttaaataggagtgagtatataataataaggctcttctgttttcaacatctgtgctgggtcatgcattagcattaattactacaatgattctgtggggtaagtgttgtcctcatagacaagaaagctgaggtttagaggttaaaatgacacattgggggtaaataacagacactatatgttggagttgggaatcagatccaagtttgactccaaacccacttttaccacattgcttttgatctaaacttctattttgctaaaatacccctcacagctagtcatccatatcattgaagcgctcatgatttgatagattaacctttcatttttttaggtgactctagttagaaagtcttatttcacaatctgattgtttctttaacttaggatccaaacatgtccaaaataatgcagagtacatatgcaatcactcgtttatgctgtctagtcatgcacttaaagcaattttcaaatgtactcaaagtctctaggcttcggtacccagggttgcttcaagtatttgttcatgacacgtcaactcgatgattaaaatccttcaacacttctcattcacaataagaataaaatctacatcccttaccattcagtatgcaaaacttaaaatacataactttacccttaaatattttttctttctctgacttcataagtataggttatacctctataagaaagaaggtaaaaaactctcaacaatcccttctttcagagagaactactgttaacattttaacagacaacttcattcttttcctattcttttttataatgcttacaggaatgttaaatacttagacagatcttaagtacactagaattatctgtccctgaaataagttaggttgccctgccgcagaatttgtatctatagtttatttggattatttttgaaaaaagtaaaataacaatacccttacgaattttttggtgcatagcatctcagcttcttttatcattaaagatgtatgtataaaaaaaaaatgagtgtatatcaagttgttcatttcttagtttctggggtcttcttaaccagtacatagaactctttatgaattaactttagcttatgttggaagtagtagtttgtttatagtgtcatggattttaaaatcaaactcagtttttatttcttcactaaaacctattttcatatgatatacatgttaaatttcccttttattttggtcatgcatcaaaataaatttactaagtactaaagagccaacattattttataagtgcctggcaataggtattcactagttgaatagtttaatttgaaatgaattaattttaaatgggagttgttcaaaactatgccactttttcttttgtcctttgtgttattaaaatttaattgataattgtgtatattatatatatggagtacaatgtgatgttttgatatatgtttacagtgtagaatgattaaatcaatgtaataaatttattgcctcataccattttttgtggtaaaaaaaccaaaaaaaaaaaaaaaaaa

SEQ ID NO: 765 - DNA, 6714 bp, Homo Sapiens
  NM_001008938
actgcggggtgtgcggcggcccaagcggtttcaaacggcttagagcaggccgcttggttctgacccagctgaggaaatactcttaattctaaggaaaacctggaagcacaatgggagatgacagtgagtggttgaaactgccagttgatcagaaatgtgaacacaagctgtggaaagcaaggttaagtgggtatgaagaggccctgaagatcttccagaaaataaaggatgaaaagagcccagagtggtccaaatttttaggattgatcaaaaaatttgtcactgattccaatgcagtggttcaattgaaaggattagaagctgcacttgtttatgttgaaaatgcccatgtagcaggaaaaaccacaggagaagttgtgtcaggtgttgtaagtaaggtgttcaatcaacctaaagctaaagccaaggagctgggcatagagatctgtcttatgtacatagagattgagaaaggagaggctgttcaagaagagctcctgaaaggcttggacaataagaatcccaagatcatagtggcctgtatagagacactgaggaaagccttaagtgaatttggttccaaaatcatcttgcttaagccaattatcaaagtgttgccaaaactctttgagtctcgagagaaggctgttcgagatgaagccaaactaattgctgtggagatttacagatggattcgggatgctctgagacccccattacaaaatataaactctgttcagttgaaagaactagaagaagaatgggtcaaactgccaacaagtgctcctagacctactcgatttcttcgttcccaacaagaactagaagctaaattggaacaacaacagtctgctggtggagatgctgaaggaggtggtgatgatggtgatgaggtgccacaaatagatgcttatgagcttttagaagctgtagaaatcctttccaaacttcccaaagacttttatgacaaaattgaggcaaaaaaatggcaagagagaaaagaggccctggagtctgtagaagtactaataaaaaaccccaaactggaagctggcgattatgcagatttagtaaaagcattaaagaaggttgttggaaaggacaccaatgtcatgttggtggctttggcagcaaaatgtcttactggcctggctgttgggctaaggaagaaatttggacaatatgcaggacatgttgtgccaaccatcttggagaaattcaaagagaagaaacctcaagtggtacaagccctgcaggaggcaattgatgcaatcttccttactaccacactacagaacatcagtgaggatgttttagcagtaatggataataaaaatccaaccatcaagcagcagacatctctttttattgcaagaagtttccgccactgcactgcttctaccctgccaaagagcttgctaaagcccttttgtgctgcactacttaagcacatcaatgattctgctcctgaagtcagagatgccgcatttgaagcattgggtactgctttgaaggtggttggcgagaaagcagtaaacccattcctagctgatgtggacaaactcaagcttgataagatcaaagaatgttcagaaaaggtagaactgatacatggtaagaaagctggactagctgctgataagaaggaattcaaacctctgcctggaaggactgctgcttcaggggctgcaggagataaggacacaaaggacatttctgcacccaaaccaggacctctaaaaaaggcacctgctgctaaggctggtgggccaccaaaaaaggggaaaccagctgcaccaggaggcgcagggaatactggaaccaagaacaagaaaggactggagactaaagaaatagtggagcctgagctctcgatagaagtatgtgaagaaaaagcttcagctgttcttccccctacctgtatacagcttcttgacagcagtaactggaaagaaaggctggcttgtatggaagagttccagaaggctgttgagctaatggaccgaactgaaatgccatgccaggcattagtgaggatgctagccaagaaacctggatggaaagaaactaattttcaggtgatgcaaatgaagcttcatatagttgctttgattgcccagaagggaaatttttccaaaacgtcagctcaggttgtattagatggccttgtggacaagattggagatgtgaaatgtgggaacaatgcaaaagaagctatgacagcaatagccgaagcctgtatgttaccatggactgctgaacaggttgtgtcaatggctttctcacaaaagaatcccaaaaatcagtcagaaactctgaattggctatcaaatgccataaaagaatttggtttttctgggttgaatgtcaaagctttcattagcaatgtgaagacagctcttgctgcaacaaacccagctgtgaggactgctgccataaccctgcttggcgtgatgtatctgtatgttggtccctctttgcgaatgttctttgaggatgagaagcctgccctcctatcccagatagatgcagaatttgagaagatgcagggacaaagtccacctgctccaaccagaggaatttccaagcatagcacaagtggtacagatgaaggagaagatggagatgaaccagatgacgggagcaatgatgtcgttgatcttttgccgaggacggagatcagtgataaaatcacttcagagttggtatctaagattggtgataagaattggaagattaggaaagaaggcctagatgaagtggcaggtattattaatgacgcaaaatttatccaaccgaatataggtgaacttccaactgccttgaagggtcgactcaatgattcaaataaaatcttggtacagcaaacgctgaatatcctgcaacaactggcagtagccatgggcccaaatattaagcaacatgtaaaaaatttaggcatccctatcatcacagtccttggagacagcaagaacaatgttcgagctgctgccctagcgactgtgaatgcttgggcagaacagactggcatgaaggaatggctggaaggagaagatctttctgaagagctcaaaaaggaaaatcctttcttgaggcaagagcttctgggctggctggctgagaaactacctactcttcgttccacccctacagaccttatcctttgtgttcctcatctctactcctgcctagaagatcgaaatggagatgtgcgaaagaaggcccaagatgccttgccattcttcatgatgcatttaggatatgaaaaaatggccaaggctactgggaaactaaagccaacttctaaagatcaggtattggccatgctagagaaagccaaagttaacatgccagccaagcctgctccacccactaaagcaacttctaaaccaatgggagggtccgctccagccaaattccagcctgcatcagcacctgctgaagattgtatttccagcagtacagaacccaaacctgatccaaaaaaggccaaagctccaggattatcctctaaagcaaagagtgcacaagggaagaagatgccaagcaaaaccagcttaaaggaggatgaagacaaatccgggcctatttttattgttgttccaaatggaaaagagcaaaggatgaaagatgaaaaaggattgaaggtgctaaagtggaattttactaccccacgggatgaatacattgagcaactaaagactcaaatgtctagctgtgtggctaaatggttacaagatgagatgtttcactcagactttcagcatcataacaaagcccttgctgttatggttgatcacttggagagtgaaaaagaaggagttattggttgcctggatcttatcttaaagtggcttaccctgaggttttttgacaccaatacaagcgtcctgatgaaagcactagaatatttaaaattgctcttcaccttgctaagtgaagaagaatatcatcttactgagaatgaagcatcttccttcatcccctatcttgtcgtcaaggttggagaaccaaaggatgtcattcgtaaagatgttcgtgccatcctgaaccggatgtgccttgtctacccagctagcaagatgtttccctttatcatggaaggaaccaaatccaaaaactctaagcagagagcagagtgcctggaagagctgggatgtctggttgagtcctatggcatgaatgtttgccaaccaaccccaggaaaagccttaaaggaaatagctgttcacataggagaccgtgacaatgctgtacgcaatgctgcactcaacaccattgtaacggtgtacaatgtacatggggatcaggtgttcaaactgattggaaatctttctgaaaaggatatgagcatgctcgaggagaggattaagcggtcagcaaagagaccctctgctgcaccaataaaacaggtggaagagaaacctcagcgtgcacagaacataagctccaatgccaacatgttacgcaagggaccagctgaggacatgtcttccaaactcaaccaagcccgaagcatgagtgggcatcctgaggcagcccagatggtccgccgagaattccagctggatctagatgagattgagaatgacaatggtacagtccgatgtgaaatgccagaacttgttcagcacaaactggatgacatttttgagccagtccttattcctgaacccaagatccgggctgtttctccacacttcgatgacatgcacagtaatacagcatccacaatcaatttcattatctcccaagtagccagtggtgacatcaacacaagtatccaagctctgacacagatcgatgaggtcctgagacaggaagacaaagctgaagccatgtccggccatattgatcagtttctgatagccacttttatgcagctaagactcatctacaacacacacatggcagatgagaaattggagaaggacgagatcatcaagttgtatagctgtatcattggcaacatgatttcgctgtttcagatagagagccttgcccgggaggcctccactggagtactaaaagacctaatgcatggcctcatcaccttaatgctggattctcggattgaagatcttgaggaaggacaacaggtcatccgctctgtgaacctcttggtggtgaaggttctggagaagtcagaccagaccaacatcctgagtgccctacttgttttgctccaagacagcctgctagcaacagccagttctcccaaattctcagagcttgttatgaagtgtctctggagaatggttcgactgttgcctgataccatcaatagcattaacctagacagaattcttctggatatccacattttcatgaaggtcttccccaaagagaaactgaagcaatgcaaaagtgaatttcccataaggaccctaaagaccctgctacacaccttatgcaaattaaaagggcccaagatcctggaccacctaacgatgatcgacaacaaaaacgagtctgagctggaggcccatctctgccggatgatgaagcacagtatggaccagactgggagcaagtctgataaggaaacagaaaagggagcatctcgaatagatgaaaaatcatcaaaggccaaagtgaatgatttcttagctgagatttttaagaagattggctctaaagaaaacactaaagagggactagcagagttatatgaatataagaagaaatactcagatgctgacattgaaccatttctgaaaaattcctcacagttcttccagagctatgtcgaaagaggccttcgggtgattgagatggagagggagggcaaaggtcgtatttccacttcaacaggcatctcccctcagatggaagtcacatgtgtgcccacgcccacaagcacagtgtcctccataggtaacacaaatggggaagaagtggggccatctgtctacttggaaaggctaaagatcctccgacagcgatgtggtctggacaacacaaagcaagatgaccgacctcctttgacctctttgctctccaaaccagcagttcctactgtcgcctcttccacagacatgctccacagcaaactctctcagctccgggagtcacgggagcagcaccagcattcagacctggattctaaccagactcactcttcaggaactgtgacctcctcctcctccacagctaacatagacgacttgaaaaaaagactggagagaataaagagcagtcgcaaatgaagctgccccactcccccggcaccctgcagctttagtttactaaactagaagtcctcatagtttaaaatggcctcagcaggcctagtgtatacaaactggttgtatgtatcatgccgtggagctagggggaggagtcattgtggcacaagtatttgtacatactctgcttctctctgtcagcgtcctgctgctctagaagactgtccgtggatgagtttagtgtacagacttgtaaacagctgccccctctctgctcagtctagttcccagatccttttcttttctttttaattgctcatttgtaaaattgtcctaatctttcctagctttttaatagttaatattagaaactctttaatagttttcctttcagtttgtgagctcttctctgtcgccctgaagggtcactgtattctgtatgaatgcatggcatgatacaactaatttaagagtcttttataaataaagtttgcattaactatacctgacaaaaaaaaaaaaaaaa

SEQ ID NO: 766 - DNA, 755 bp, Homo Sapiens
  NM_001009
ctcttcctgtctgtaccagggcggcgcgtggtctacgccgagtgacagagacgctcaggctgtgttctcaggatgaccgagtgggagacagcagcaccagcggtggcagagaccccagacatcaagctctttgggaagtggagcaccgatgatgtgcagatcaatgacatttccctgcaggattacattgcagtgaaggagaagtatgccaagtacctgcctcacagtgcagggcggtatgccgccaaacgcttccgcaaagctcagtgtcccattgtggagcgcctcactaactccatgatgatgcacggccgcaacaacggcaagaagctcatgactgtgcgcatcgtcaagcatgccttcgagatcatacacctgctcacaggcgagaaccctctgcaggtcctggtgaacgccatcatcaacagtggtccccgggaggactccacacgcattgggcgcgccgggactgtgagacgacaggctgtggatgtgtcccccctgcgccgtgtgaaccaggccatctggctgctgtgcacaggcgctcgtgaggctgccttccggaacattaagaccattgctgagtgcctggcagatgagctcatcaatgctgccaagggctcctcgaactcctatgccattaagaagaaggacgagctggagcgtgtggccaagtccaaccgctgattttcccagctgctgcccaataaacctgtctgccctttggggcagtcccagccaaaaaaaaaaaaaaa

SEQ ID NO: 767 - DNA, 1874 bp, Homo Sapiens
  NM_001009184
aaggccccgctgcgtcttccgagccgcaggcgcaggcccagctgagcggccgccgagcgggtgcgggtgcgggcgcatcggccatcaccgcgcggccgcgcagcggacaccgtgcgtaccggcctgcggcgcccggccaccggggcggaccgcggaacccgaggccatgtcccatgaaaagagttttttggtgtctggggacaactatcctccccccaaccctggatatccgggggggccccagccacccatgcccccctatgctcagcctccctaccctggggccccttacccacagccccctttccagccctccccctacggtcagccagggtacccccatggccccagcccctacccccaagggggctacccacagggtccctacccccaagggggctacccacagggcccctacccacaagagggctacccacagggcccctacccccaagggggctacccccaggggccatatccccagagccccttcccccccaacccctatggacagccacaggtcttcccaggacaagaccctgactcaccccagcatggaaactaccaggaggagggtcccccatcctactatgacaaccaggacttccctgccaccaactgggatgacaagagcatccgacaggccttcatccgcaaggtgttcctagtgctgaccttgcagctgtcggtgaccctgtccacggtgtctgtgttcacttttgttgcggaggtgaagggctttgtccgggagaatgtctggacctactatgtctcctatgctgtcttcttcatctctctcatcgtcctcagctgttgtggggacttccggcgaaagcacccctggaaccttgttgcactgtcggtcctgaccgccagcctgtcgtacatggtggggatgatcgccagcttctacaacaccgaggcagtcatcatggccgtgggcatcaccacagccgtctgcttcaccgtcgtcatcttctccatgcagacccgctacgacttcacctcatgcatgggcgtgctcctggtgagcatggtggtgctcttcatcttcgccattctctgcatcttcatccggaaccgcatcctggagatcgtgtacgcctcactgggcgctctgctcttcacctgcttcctcgcagtggacacccagctgctgctggggaacaagcagctgtccctgagcccagaagagtatgtgtttgctgcgctgaacctgtacacagacatcatcaacatcttcctgtacatcctcaccatcattggccgcgccaaggagtagccgagctccagctcgctgtgcccgctcaggtggcacggctggcctggaccctgcccctggcacggcagtgccagctgtacttcccctctctcttgtccccaggcacagcctagggaaaaggatgcctctctccaaccctcctgtatgtacactgcagatacttccatttggacccgctgtggccacagcatggcccctttagtcctcccgcccccgccaaggggcaccaaggccacgtttccgtgccacctcctgtctactcattgttgcatgagccctgtctgccagcccaccccagggactgggggcagcaccaggtcccggggagagggattgagccaagaggtgagggtgcacgtcttccctcctgtcccagctccccagcctggcgtagagcacccctcccctcccccccacccccctggagtgctgccctctggggacatgcggagtgggggtcttatccctgtgctgagccctgagggcagagaggatggcatgtttcaggggagggggaagccttcctctcaatttgttgtcagtgaaattccaataaatgggatttgctctctgcaaaaaaaaaaaaaaaaaa

SEQ ID NO: 768 - DNA, 2547 bp, Homo Sapiens
  NM_001009186
agcgggcgccggacgacctgtggcccaatggcggcggcgcgcgggcacgctgggggccggccagacgggccgacttttccagaagacccggatagttcctcccggccacgccgcgccggctctgggcactcagcatcgtttccttttcctccgctggagcagctatggcggcggtgaagaccctgaaccccaaggccgaggtggcccgagcgcaggcggcgctggcggtcaacatcagcgcagcgcggggtctgcaggacgtgctaaggaccaacctggggcccaagggcaccatgaagatgctcgtttctggcgctggagacatcaaacttactaaagacggcaatgtgctgcttcacgaaatgggccttcatcctagaataatcactgaaggatttgaagctgcaaaggaaaaggcccttcagtttttggaagaagtcaaagtaagcagagagatggacagggaaacacttatagatgtggccagaacatctcttcgtactaaagttcatgctgaacttgcagatgtcttaacagaggctgtagtggactccattttggccattaaaaagcaagatgaacctattgatctcttcatgattgagatcatggagatgaaacataaatctgaaactgatacaagcttaatcagagggcttgttttggaccacggagcacggcatcctgatatgaagaaaagggtggaggatgcatacatcctcacttgtaacgtgtcattagagtatgagaaaacagaagtgaattctggctttttttacaagagtgcagaagagagagaaaaactcgtgaaagctgaaagaaaattcattgaagatagggttaaaaaaataatagaactgaaaaggaaagtctgtggcgattcagataaaggatttgttgttattaatcaaaagggaattgaccccttttccttagatgctctttcaaaagaaggcatagttgctctgcgcagagctaaaaggagaaatatggagaggctgactcttgcttgtggtggggtagccctgaattcttttgacgacctaagtcctgactgcttgggacatgcaggacttgtatatgagtatacattgggagaagagaagtttacctttattgagaaatgtaacaaccctcgttctgtcacattattgatcaaaggaccaaataagcacacactcactcagatcaaagatgcagtgagggacggcttgagggctgtcaaaaatgctattgatgatggctgtgtggttccaggtgctggtgccgtggaagtggcaatggcagaagccctgattaaacataagcccagtgtaaagggcagggcacagcttggagtccaagcatttgctgatgcattgctcattattcccaaggttcttgctcagaactctggttttgaccttcaggaaacattagttaaaattcaagcagaacattcagaatcaggtcagcttgtgggtgtggacctgaacacaggtgagccaatggtggcagcagaagtaggcgtatgggataactattgtgtaaagaaacagcttcttcactcctgcactgtgattgccaccaacattctcttggttgatgagatcatgcgagctggaatgtcttctctgaaaggttgaattgaagcttcctctgtatctgaatcttgaagactgcaaagtgatcctgaggattacagctgtggaatttttgtccaagcttcaaataattttgaaagaaattttcccatatgaaaaaaggagagaacactggcatctgttgaaatttggaagttctgaaattatagtatttttaaaaattgcactgaagtgtatacacataaagcaggtcttttatccagtgaacaggatgttttgctttagcagcagtgacataaaattccatgttagataagcatatgttacttaccttgttattaaatatttcttgaaaagcaaattttaatggtttaattttatgtggacgtatgttaaattatccaactaccctattgttaagcatttggttttaaaatttttatgctaatataaatgctcaagtaatttaaaatattgaaagcatccctgttggtataaatttctgagtaaatgcattggatcagttggactttgaacgcctttgaaatggctttgctaaaatgctcccgccacaaagttgtaggaaatgggaagaggagtcaactagaggcaagggagttgagagagctgcaactgtaaagggcaagaacaggcagaggtaaaaagatgatggaaggtgtggtgactaagggccacggttattgggtgaaatttgagattgtaggccaactgtattttcaagcttctgaacttaggcaaaatattcatcgcaaagtctctagcgtcatatttttctcacccaaattacgtttccacgagattatttatatatagttggtctatctctgcagtccttgaaggtgaagttgtgtgttactaggctgtgttttgggatgtcagcagtggcctgaagtgagttgtgcaataaatgttaagttgaaacctcaaaaaaaaaaaaaaaaaa

SEQ ID NO: 769 - DNA, 5209 bp, Homo Sapiens
  NM_001009566
acctctactggggagacgaggaccccgaggttctggggggcgacgcgacctgcccgaagtgacaagggtcctgggccgcactgctccgccggggtctgcgctcctcggcggagcgggtgggaaggatgagtcctcggggtggagaaggaggagcgggtccccgggtaccgctcacccggccttaggagcccgggagcgcgcgtagggacgcggagttgaggctctccatctgcggccagggaaagggatacagtcccccgggcccctcccggccgctcggaacccaccccaggcgcgtccccgcgggcgcgcgctccaggcggggccgacgggctcggaggcgcgcgcccgctgccgggtccgccgcgcgcgctccctccgctcctctcccccgcccctcccgggcccgcgcgctcccagggtccgccgcgcgcgcgcctcgcgtcgctccccatccccgcccctcccgccgccaccccgcccccggccgggtaccctcgccggacccgagagagagcgccgccgccatcttagttgctgccgctgccttcagcaagacgctgctctgaggcggggagggcgccgcgtcctgagcgcgcggcccagcgtcacggcggcggcggcggcggctcctccttggacccccggagctccccgcgccgcggagcagctggccccaggcccctagagccccgagagctccgagagctccgctcggcgtcccgcgcgcctccctgccgctcccgccccgggctggcgatgctgcgccgccccgctcccgcgctggccccggccgcccggctgctgctggccgggctgctgtgcggcggcggggtctgggccgcgcgagttaacaagcacaagccctggctggagcccacctaccacggcatagtcacagagaacgacaacaccgtgctcctcgaccccccactgatcgcgctggataaagatgcgcctctgcgatttgcagagagttttgaggtgacagtcaccaaagaaggtgagatttgtggatttaaaattcacgggcagaatgtcccctttgatgcagtggtagtggataaatccactggtgagggagtcattcgctccaaagagaaactggactgtgagctgcagaaagactattcattcaccatccaggcctatgattgtgggaagggacctgatggcaccaacgtgaaaaagtctcataaagcaactgttcatattcaggtgaacgacgtgaatgagtacgcgcccgtgttcaaggagaagtcctacaaagccacggtcatcgaggggaagcagtacgacagcattttgagggtggaggccgtggatgccgactgctcccctcagttcagccagatttgcagctacgaaatcatcactccagacgtgccctttactgttgacaaagatggttatataaaaaacacagagaaattaaactacgggaaagaacatcaatataagctgaccgtcactgcctatgactgtgggaagaaaagagccacagaagatgttttggtgaagatcagcattaagcccacctgcacccctgggtggcaaggatggaacaacaggattgagtatgagccgggcaccggcgcgttggccgtctttccaaatatccacctggagacatgtgacgagccagtcgcctcagtacaggccacagtggagctagaaaccagccacatagggaaaggctgcgaccgagacacctactcagagaagtccctccaccggctctgtggtgcggccgcgggcactgccgagctgctgccatccccgagtggatccctcaactggaccatgggcctgcccaccgacaatggccacgacagcgaccaggtgtttgagttcaacggcacccaggcagtgaggatcccggatggcgtcgtgtcggtcagccccaaagagccgttcaccatctcggtgtggatgagacatgggccattcggcaggaagaaggagacaattctttgcagttctgataaaacagatatgaatcggcaccactactccctctatgtccacgggtgccggctgatcttcctcttccgtcaggatccttctgaggagaagaaatacagacctgcagagttccactggaagttgaatcaggtctgtgatgaggaatggcaccactacgtcctcaatgtagaattcccgagtgtgactctctatgtggatggcacgtcccacgagcccttctctgtgactgaggattacccgctccatccatccaagatagaaactcagctcgtggtgggggcttgctggcaagagttttcaggagttgaaaatgacaatgaaactgagcctgtgactgtggcctctgcaggtggcgacctgcacatgacccagtttttccgaggcaatctggctggcttaactctccgttccgggaaactcgcggataagaaggtgatcgactgtctgtatacctgcaaggaggggctggacctgcaggtcctcgaagacagtggcagaggcgtgcagatccaagcacaccccagccagttggtattgaccttggagggagaagacctcggggaattggataaggccatgcagcacatctcgtacctgaactcccggcagttccccacgcccggaattcgcagactcaaaatcaccagcacaatcaagtgttttaacgaggccacctgcatttcggtccccccggtagatggctacgtgatggttttacagcccgaggagcccaagatcagcctgagtggcgtccaccattttgcccgagcagcttctgaatttgaaagctcagaaggggtgttccttttccctgagcttcgcatcatcagcaccatcacgagagaagtggagcctgaaggggacggggctgaggaccccacagttcaagaatcactggtgtccgaggagatcgtgcacgacctggatacctgtgaggtcacggtggagggagaggagctgaaccacgagcaggagagcctggaggtggacatggcccgcctgcagcagaagggcattgaagtgagcagctctgaactgggcatgaccttcacaggcgtggacaccatggccagctacgaggaggttttgcacctgctgcgctatcggaactggcatgccaggtccttgcttgaccggaagtttaagctcatctgctcagagctgaatggccgctacatcagcaacgaatttaaggtggaggtgaatgtaatccacacggccaaccccatggaacacgccaaccacatggctgcccagccacagttcgtgcacccggaacaccgctcctttgttgacctgtcaggccacaacctggccaacccccacccgttcgcagtcgtccccagcactgcgacagttgtgatcgtggtgtgcgtcagcttcctggtgttcatgattatcctgggggtatttcggatccgggccgcacatcggcggaccatgcgggatcaggacaccgggaaggagaacgagatggactgggacgactctgccctgaccatcaccgtcaaccccatggagacctatgaggaccagcacagcagtgaggaggaggaggaagaggaagaggaagaggaaagcgaggacggcgaagaagaggatgacatcaccagcgccgagtcggagagcagcgaggaggaggagggggagcagggcgacccccagaacgcaacccggcagcagcagctggagtgggatgactccaccctcagctactgacccgtgcccccggccacctcggtttctgctttcgaagactctgctgccatccgttctcccagtcccaagggtccacgatgtacaaagtcatttcggccagtaggtgtgcagacccctccccgccacgatcgtcgctgtgcttggtgtgtaggaccctaggctccccgcccaccctctgcctggtcgcgctcttcagtcccacgaggagctgacacgtcctctctggccgccatccggctcgcacaggggcctcccagcgcctcaggccccgcgtttgtgtctggagtctccccccggggagaggacactggcccctcgcactccagaaaagccatgccagctgggctcgttgacaaagggtaaaacatgctcactcccacccggtaatcatttttttctttttttaaaaaaagtttttattttttccaaactagtgcatgtataaataatggcaggatggggggtactgtgtagatgattaactgactttttaatattttgtaaataaatcggattccttgtgtcctttgtgctagtgtaacccgggactggaatgtaaagtgaagttcggagctctgagcacgggctcttcccgccgggtcctccctccccagaccccagagggagaggcccaccccgcccagccccgccccagcccctgctcaggtctgagtatggctgggagtcgggggccacaggcctctagctgtgctgctcaagagactggatcagggtagctacaagtggccgggccttgcctttgggattctacctgttcctaatttggtgtggggtgcggggtccctggccccttttccacactcctcctccgacagcagctccctgggcagtggcctggtctcaccgtgtgcagccttgtggtttatgcttaaatgtacattttcctgctggtaaaaggagaaactgagaggtgtcctgcagaccggctgaccactccttttggagacggcaggaggcctgagcgatccgtactcagaacgtccaggagagacgcatggcccgaagtcaaagtgctggaattttccaaaacagcctgttctctcctctctcctccccagagcaccccctgccatcaggggggttgaaatccctctcccccaggagccctgctgctttgcttggtggtagggcaggagagcaaacaaacagtcatggtctaaaacccacatagcactttgctcttagttacatgtaaaattttagatttctaaaacaggtgggcaatcattttgaatactgttctgtgaccctgactgctagttctgaggacactggtggctgtgctatgtgtggccatcctccatgtcccgtccctgtagctgctctgtttagacagcggacagacgctcacgcccaggggatgtcctcacgctgtcgccgcgcggtttcccttcgcagatgtgtatactcatgataggtcagaaagtgtatccgctacaataaagttctggttctaactaactccaaaaaaaaaaaaaaaaaa

SEQ ID NO: 770 - DNA, 1336 bp, Homo Sapiens
  NM_001009570
atagagtagcggaagtggtccgttctcttcctctcccggcccaagcttctgggtatttctattgcgcgaggcattgtgggttgctgggcggcccggtctcggagaagaggggagagtggcgggccgctgaataagcttccaaaatgatggattctcagctggtagctggtgttgcattcaagaagactttctcttacgctgggtttgaaatgcaacccaaaaagtaccacaatcccaagattgcccttttgaatgtcgagctcgagttgaaagctgagaaagacaatgctgagataagagtccacacagttgaggattatcaggcaattgttgatgctgagtggaacattctctatgacaagttagagaagatccatcattctggagccaaagttgtcttgtccaaactccccattggggatgtggccacccagtactttgctgacagggacatgttctgtgctggccgagtacctgaggaggatctgaagaggacaatgatggcctgtggaggctcaatccagaccagtgtgaatgctctgtcagcagatgtgctgggtcgatgccaggtgtttgaagagacccagattggaggcgagaggtacaatttttttactggctgccccaaggccaagacatgcaccttcattctccgtggcggcgccgagcagtttatggaggagacagagcggtccctgcatgatgccatcatgatcgtcaggagggccatcaagaatgattcagtggtggctggtggcggggccattgagatggaactctccaagtacctgcgggattactcaaggactattccaggaaaacagcagctgttgattggggcatatgccaaggccttggagattatcccacgccagctgtgtgacaatgctggctttgatgccacaaacattctcaacaagctgcgggctcggcatgcccaggggggtacatggtatggagtagacatcaacaacgaggacattgctgacaactttgaagctttcgtgtgggagccagctatggtgcggatcaatgcgctgacagcagcctctgaggctgcgtgcctgatcgtgtctgtagatgaaaccatcaagaacccccgctcgactgtggatgctcccacagcagcaggccggggccgtggtcgtggccgcccccactgagaggcaccccacccatcacatggctggctggctgctgggtgcacttaccctccttggcttggttacttcattttacaaggaaggggtagtaattggcccactctcttcttactggaggctatttaaataaaatgtaagacttcagataactttgtaaattaaaaaaaaaaaaa

SEQ ID NO: 771 - DNA, 557 bp, Homo Sapiens
  NM_001009607
cctcattctcccctatggaagaccttgtgtagcccttcatcaggcgtgtgttgtggctttgtcacactgttttgtaatgatcgctttgcatgtcttttccagctgactccgccaccatctcctgcctggatgactgcagcagcatccttgctggcctctctgcttcctgcattgcctcctctgaatcttcaggatgccaagtttgtggaggaacggagaaagcagctccagaattacctgcgcagcgtcatgaacaaagtcatccagatggtccccgagttcgctgccagccccaagaaggagaccctcatccagctgatgcccttcttcgtgatgggattacaggtcggaatgtacggattgtttcattttggggtaatgatggatcagccacagccaagccttacccgtgctgacgaatctccatgtgatcgtgtcctttctccatgtgctgcccacagaaagcagcgagactgctgtctcagctggaaagctgagcctgagagatttctggttaaaaaaaaataaaaaataaaaatctcctgcctaaggaaata

SEQ ID NO: 772 - DNA, 5830 bp, Homo Sapiens
  NM_001009882
ggcggtggagtcctgagctagtcgtgtcccggcctccagcggcggcagcggcgacggcggcggcagcaggaggcggagggagagcaggagccactgagatgaggaggcgtcgcgcgcgcctgtagctcgcgggcctcgcagtttgcttgcctaaactggacttgaagcaatttaaactactggagatctgccattttataatatcacaattggaaagaaacagattttcaaataatggaagagtctaaaaccttaaaaagtgaaaatcatgaaccaaagaagaatgttatttgtgaagaaagcaaagcagttcaagttataggtaatcaaacattgaaagctagaaatgataaatccgtaaaagaaattgagaacagctctccaaataggaatagtagtaaaaaaaataagcaaaatgatatttgtatagaaaaaacagaagttaaatcatgtaaagtaaatgctgccaaccttccaggtcctaaagatttggggttagtccttcgagatcaaagtcattgcaaagcaaaaaaatttcctaattcaccggtgaaagccgaaaaggcaaccatttcacaggcaaaatcagaaaaggcaaccagtttacaggcaaaagcagaaaaatcaccaaagtcacctaattcagtgaaagcagaaaaagcatccagttatcagatgaagtcagaaaaagtaccaagttcaccagcagaagcagaaaagggacccagtttactgttgaaagacatgagacagaagacagaattacaacagattggaaaaaaaattccaagctcctttacttctgtggacaaagtgaatattgaagctgtagggggagaaaaatgtgctctgcaaaactcaccacgatctcagaagcaacagacatgtacagataatactggtgattctgatgatagtgcttcaggaattgaagacgtatcggacgatttaagtaaaatgaagaatgatgaatctaataaagaaaattcttcagagatggactacttagaaaatgccactgtgatagatgaatctgcattgacacctgagcagaggctggggttgaaacaagcagaagaacgcttagaaagagatcacatctttcgacttgaaaaacgatcaccagaatataccaattgtcggtatctatgcaaactttgcttaattcacattgaaaatatccagggggctcataaacatataaaggagaaacgacataagaaaaatattttggaaaaacaagaagaaagtgagcttcgttctctgccacctccttcccctgcccacttggctgctttaagtgttgcagtcattgaattagcaaaagaacatggaataacagatgatgacctcagagtccgtcaggaaattgtggaggaaatgtcaaaggttataacgacatttttaccagaatgttcacttaggttgtatggctcatctctgactagatttgctctgaaaagtagtgatgttaatatagatataaaatttcctcccaagatgaatcatccagatcttctgataaaagtacttgggattttaaagaaaaatgtattatatgtagatgtggaatctgattttcacgctaaagttcctgttgtggtgtgcagagatcgaaaaagtggtttactttgtagagtgagtgcaggaaacgatatggcatgtctcactactgatttacttactgcccttggcaaaatagaacctgtctttattcccttggtgttagcctttcgctactgggctaagttgtgctatattgactcccaaactgatggtggaatcccttcttactgttttgctttaatggtgatgttttttctacaacagagaaaaccccctcttcttccttgcttacttggaagttggattgaaggctttgacccaaaaagaatggatgactttcagctgaagggcatagtagaagagaagtttgtgaagtgggaatgtaattcaagtagtgcaactgagaaaaactcaattgctgaggaaaacaaagctaaggcagaccaaccaaaagatgataccaagaagacagaaacagacaaccaaagtaatgccatgaaggaaaaacatggcaaatctcctttagcattggaaacaccaaatcgggtatccttgggacagttatggttagagctgcttaaattctacacactggattttgctttggaggaatatgtcatatgtgtacggatacaagatattttaacaagagaaaataaaaactggcctaaaaggcgaatagccattgaagatccattttcagtcaagaggaatgttgcacggagcttaaacagccagctggtttacgaatatgttgtggagagatttagggcagcttatcggtattttgcctgtcctcagacgaagggtggaaataagtctacagtggatttcaagaaaagagagaaggggaaaataagcaataagaaaccagtcaagtcgaacaatatggcaaccaatggttgtattctgcttggggaaaccacagaaaaaataaatgcagaaagagagcaacctgttcaatgtgatgaaatggactgtacatcacagagatgtattattgacaacaacaatttgttggtaaatgaactagattttgctgaccacggacaggactcttcatctctttctaccagcaaaagcagtgaaatagagccaaaattagataagaaacaagatgatttagcgccttcagaaacttgtttaaaaaaagagctcagccaatgtaattgcattgatttgtctaagtcgcctgacccagataaatctactggaacagactgcaggtcaaatttagaaacagagagttcacatcagagtgtgtgcaccgacacatctgctacctcttgcaactgcaaagctacagaagatgcttctgaccttaatgatgatgataacctccccacccaggaattatattatgtgtttgataagtttattttaacctctggcaagccaccaacgatagtatgcagcatctgcaaaaaggatggccattcaaagaatgattgcccagaggattttaggaaaattgatttaaaacctctaccaccaatgacaaaccgatttcgggaaatacttgatttagtatgtaaaagatgttttgatgagttatcaccaccttgttctgaacaacacaacagggagcaaattttaattggcttggaaaagtttattcaaaaagaatatgatgaaaaggcaaggttgtgcttatttggctcttctaagaatggatttggatttcgtgatagtgatctggatatttgtatgaccctggaaggccatgaaaatgcagagaaattaaattgtaaggaaataattgaaaatttggcaaaaattcttaagagacatccaggtttaagaaacattttgcctataactactgccaaagtgcctatagtaaaatttgaacacaggcgaagtgggttagaaggcgatatcagtttatataatacgttggctcaacataacacaagaatgctagctacttatgcagctattgatcctagagtgcagtatttgggatatactatgaaagtgtttgctaagcgatgtgacattggggatgcttccaggggaagtttatcttcatatgcatatatccttatggtgctgtactttctgcagcagagaaagccacctgttatcccagttctacaagagatctttgatggaaaacagattccacagagaatggttgatggatggaatgctttcttctttgataaaacagaagaactgaaaaagcgtttaccttcacttggaaagaacacagaatcattaggggagctttggctgggactgcttcgtttctatactgaagagtttgatttcaaggaatatgtaattagcattcggcagaaaaagctgttgacaacttttgagaagcagtggacttccaagtgcattgcaattgaagacccttttgacttgaatcataaccttggtgctggagtttccagaaaaatgaccaatttcatcatgaaagcatttatcaatggaaggaaactttttggtacccctttttatccactcattggcagagaagctgagtacttctttgattccagagtattaacagatggagaactggctcccaatgatagatgttgccgtgtgtgtggaaaaataggccactacatgaaagactgccctaaaaggaaaagactaaagaagaaagacagtgaagaagagaaggaagggaatgaagaagagaaagattcccgagatgttcttgacccccgagacctccacgatactcgagactttagagacccgagagacctcagatgttttatatgtggagatgctggacatgtacgaagggagtgcccagaggtcaagctggcccgtcagaggaatagcagtgtggcagcagcccagctggtccgcaaccttgtaaatgctcaacaggtggctggttcagctcagcaacagggtgatcagtccataaggactagacagtcatcagaatgttctgaatcaccatcttattctcctcagcctcagccatttccacagaactcttcccagtcagctgctattactcagccttcatctcagccaggatcccaacctaagcttggcccacctcagcagggagcccaacctccccatcaggtccagatgccactgtataactttccccagtcaccaccagctcagtattctcccatgcacaatatgggattgttgccaatgcaccctctccagatccctgccccgtcctggcccatccatggcccagtgatccactctgcaccaggcagtgcccccagcaatattggcctaaatgatcccagcatcatctttgcacagcctgctgccagacctgtggcaatccctaacacgtctcacgatggacactggccccgtactgtggctccaaattccctggtaaacagtggtgcagtggggaattcagagccaggctttcgaggactgactcctccaattccttgggaacatgcaccgcgtccccatttcccccttgtcccagcttcgtggccttatggtttgcatcaaaacttcatgcatcagggaaatgcccgattccagcccaacaaacctttctatactcaagacagatgtgccacccgtcggtgtagagagcgttgtccccacccaccaagaggaaacgtgtcggagtaatgcgagtccattttctttcagctggtctaccgatgcacagcaaccagccaatcctgctgtctcaagggtatccgtacctcaatgtcagttacattcagcagaaaaagtgacatttaatggaaagcaaaacaaatcaggtcctgatttaaaattttaacacgtttagatagcttatttaaattctaagactgtttttacagactgtattatttgtatataaatatgaactatagtttttactagtatcaccaaattgagtgatacaaatttcatctattttattaccctatttttaagggaattttatgttttgtttaaccttgatgaattgtataaagagagaatttaaaaaattacattctttattttctattagctgtattcatactttggttgcttcagactttatatattgttcttaaaagttaggaaagaatttcatgtgttttaaattgtcacttctattctttacagaaccttgtagtgccaaaaactttttaaaaggtaaaaaaataaaataaaattacaacatgaagattcagattttttttcttttccatacttgtatattgaacattcaaacttgaatggaaagttgattttgtctgtatttgaagtacttctattttaagttaataaatctttttgacaagagttaaaaaaaaaaaaaaaa

SEQ ID NO: 773 - DNA, 2895 bp, Homo Sapiens
  NM_001009894
ccctcgctgggcttggtagttggggcgcagccgcggtggctgggcgcggagtgtgcgtggcctgagccgtgcgggtgactgcttcagggcttctccgcgactggaccgggcgccgctcgaaagcacgccctccattcgcactgcttgttgggctcatcatgaagcgcttgggctccgtgcagcggaaaatgccgtgtgtgtttgtgacggaggtgaaagaggagccttcctccaaaagggagcatcagccatttaaagttttggcaactgaaactgtaagtcacaaggcattagatgcagatatatacagtgcaattccaacagaaaaagtggatggaacatgttgttatgttactacctataaagatcagccatacctttgggctcgactagatagaaaacccaacaaacaagctgaaaaaagatttaaaaattttctacattcaaaagaaaacccaaaagaatttttttggaacgttgaggaggacttcaaaccagctccggagtgctggataccagcaaaggagacagaacaaataaatgggaacccagtgcctgatgaaaatggacacattcctggttgggtaccagtagagaaaaacaacaaacagtattgctggcattcctctgtagttaattatgaatttgaaattgccctggtactaaaacatcatcctgatgattctggacttttggaaattagtgcagtgccactttcagatctcttagaacaaacactggaactcataggaacaaatatcaatggaaacccatatgggttagggagcaagaaacatccattacatcttcttataccacatggagcatttcaaataagaaatctaccttcattgaagcacaatgatctcgtgtcctggtttgaagattgcaaagagggtaaaattgaaggaatagtgtggcattgcagtgatggctgtttaataaaggtccatcgccatcatcttggcttatgctggccaattccagatacttacatgaattcaagaccagttattatcaacatgaacctgaacaaatgtgactctgcctttgatattaagtgtttgtttaatcattttttaaaaatagataatcagaaatttgttagactcaaagatataatatttgatgtataaaatgcaaataaaattagtttatcattatattctaatcttgaatattctaccatatttaaaaatatctcaaggtttctgttcattatgaaacatcaatatgttttctaccatttgtgaagaaatgaattttccagtttcaagtacctattcaaaattttattaaaaaccagcaaattaattttaatctctagccataaaaacataagtaatagtaagctcctaagcttggacaaaggctggattctcttcactataactgagtggtaatttaaagacaacaatttaatgtcactaattttcaaaattaaatagtttaagctcaatttaattttgctagatatttaacaaaacatacggctcaacctcataacctatatgtgtgtatgtctacatctgtgtatatatcataggatttgagaatcttaacacatgtataaataagtatatataaactccaattttaaatcttaaaattgctgaatttaccctcatattctttaaaaaacttaaagcattatgaatgtagagaaattcaccagagctcactgcctatttgatggctgtaacaagtcttcaagtatatacttttataataagttgaaaatttcatataattttatttattaagaattccaatctaagtataaaggtacaaggtagtgagaaggaaatactacagttcggagaactgcttatttccaagtatatttaacttataaagttaataaatagttaaatgaaacaaagtttataggtgacctttagtaaatggggaaattaacaggactttcttcttcatcttcaaactcttcagaagcagcaacagggctagttaattcaactcccaattgttctgaaagtttttttaccttctcttctaagagaatattcttcttcacttcttccttgtaattatacttaagatcttcaatttcttcaaaaaatgaaggatcaaaattttccagttcttttttcagcttctttatttcctcctaatggaaacattatctttaaaagttgcatataggaaatatacatattttacgtttgaacaaggagatttaattgtaaatatgaaagccaaagtattcctgaatggtcaaatacagcaataaaggcagaagaattaagatttttctttgttccattgtacagtgtaaataactaagttgttaactgtcaagtccagttatgtattctgtaagttgtgttctagtctttgactaaaatttatcatctcttataatgggacttaatctttctctaaaagcatataagagcttgtcaatagagcaatcaatcaaaaagattttgtgattcataacattgaagttagtctggttaagagttttggtttagacttcatttatattttccttactaatatctaatatttaatgaataatgatcaattttttataaagttattaatatgatcagggaaacctttgggacttctgacaggcatctggtgaagagacaattcaagccttagtgactatttagaatagccagtgatcactagctaattctcatatccatgcctttttgtcctgtttacagtcttaaaagaggtaaaacagcaaatatttttttaagggaactataaccttaggattcctgaaaagaatttcaaaaaaaaaataaagacactgttgccaatgtgacccaaaacttaagaacatactaatggcatatatttgttacaattaaaaaataaatttactacttaatcctaaaaaaaaaaaaaaaaaaaaaa

SEQ ID NO: 774 - DNA, 1383 bp, Homo Sapiens
  NM_001009905
gccgaagcggcgggatgagcggagccggcgtgggcggggcgtccgaggagagccaggccatgcaggcccacgtgtctattatcctcccagtccacaacgctgaaccgtggctggacgaatgtttgaggtctgttttgcaacaggactttgaaggtaccatggagctgtctgttttcaatgatgccagtaaggacaagtctggggctatcattgaaaaatggagagtgaagctggaagattctggtgtccacgtgatcattggggggcacgattctccctctcctagaggcgtcggatacgctaaaaatcaagcagttgcccagagctcagggtcttacctttgctttttggattcggatgacgtcatgatgccccagcgggtgaggctgcaacacgaggctgccgttcagcacccgtcgagcatcattggttgcagagtgaggagagatccccctaactccaccgaacgatacacacgttggatcaaccagctgacgccggagcagctcctaacccaggttttcacctcaaatggccccacggtgatcatgcccacctggttctgctcgcgagcgtggttctcccacgtgggcccctttaacgagggaggtcagggcgtcccggaggacctgctgttcttctacgagcacctcaggaagggcggcggcgtcatccgcgtggaccagagtctcctgctgtatcgccaccacccacaggcggccacgcactgcgtcctcgagacgaccatctggacccaccgcgtccgcttcctggaagagcaggccctgccccgctgggcggccttcaccatctggaacgctggcaagcaggggcgccggctgtaccgcagcttgactgccggcagccagcgcaaggtggtggcattctgtgacgtggacgagaacaagatcaggaaaggcttctattgccacgaggactctcaggaaagacccaagccccgaatccccatcctgcacttccgagccgcccggccacccttcgtcatctgcgtgaagctggacctcacagggggcgcctttgaggacaacctgaggtcactgcacttgcaggagggccaggacttccttcacttcagctgacggacccatggcagctgctcccagtgcatcccaggccagcaggagctttgtgagctgcaggcatggcgatggtgcgcctgttccacacccagcaggcgcaaccagagtctcgtgtgtgccgaccacaggagccaagccttttccactgtgtggactcatgtggccaaggctaggcctggtcacccaggaccctcaccacgtgaccccagccaatcgggacagttcaaggaggaggagacccctattacacaggttggaataaaatatttaaatctcgtaaaaa

SEQ ID NO: 775 - DNA, 6400 bp, Homo Sapiens
  NM_001009913
cttcctgcagtgcgaacctgggaaatccaggcgacttcgcagttgccgaagggatctgaagaagtgggatgtgcaaaagcgccggctggaaatcccggctgtgtctccgtcaactctttacgcaacagaggtctccccctgcccttggtttctaccgggccgcctgctcccactcggcgaaaaaaattacacaacagcagccgcggcgatgacgtggagggctgccgcctccacgtgcgcggcgctcctgattctgctgtgggcgctgacgaccgaaggtgatctgaaagtagagatgatggcaggggggactcagatcacacccctgaatgacaatgtcaccatattctgcaatatcttttattcccaacccctcaacatcacgtctatgggtatcacctggttttggaagagtctgacgtttgacaaagaagtcaaagtctttgaattttttggagatcaccaagaggcattccgacctggagccattgtgtctccatggaggctgaagagtggggacgcctcactgcggctgcctggaatccagctggaggaagcaggagagtaccgatgtgaggtggtggtcacccctctgaaggcacagggaacagtccagcttgaagttgtggcttccccagccagcagattgttgctggatcaagtgggcatgaaagagaatgaagacaaatatatgtgtgagtcaagtgggttctacccagaggctattaatataacatgggagaagcagacccagaagtttccccatcccatagagatttctgaggatgtcatcactggtcccaccatcaagaatatggatggcacatttaatgtcactagctgcttgaagctgaactcctctcaggaagaccctgggactgtctaccagtgtgtggtacggcatgcgtccttgcatacccccttgaggagcaactttaccctgactgctgctcggcacagtctttctgaaactgagaagacagataatttttccattcattggtggcctatttcattcattggtgttggactggttttattaattgttttgattccttggaaaaagatatgtaacaaatcatcttcagcctatactcctctcaagtgcattctgaaacactggaactcctttgacactcagactctgaagaaagagcacctcatattcttttgcactcgggcatggccgtcttaccagctgcaggatggggaggcttggcctcctgagggaagtgttaatattaatactattcaacaactagatgttttctgcagacaggagggcaaatggtccgaggttccttatgtgcaagccttctttgccttgcgagacaacccagatctttgtcagtgttgtagaattgaccctgctctcctaacagttacatcaggcaagtccatagatgataattccacaaagtctgagaaacaaacccctagggaacactcggatgcagttccggatgccccaatccttcctgtctcccctatctgggaacctcctccagccacaacatcaacaactccagttctatcctcccaacccccaactttactgttacccctacagtaaatgcctgatggacgtggtgccactagggtccaagttcccttttcattacaggaccttgggcaaataagaggggacctgggcaagttctctgatgacctgatagatatatagaggctttccaaaacctaactcaggtgtttgaccttacttggggtgatgttatgttgctcttaaactcttaactactacagagaaacaggtagccctgcaggcagcagaaaaattcagagatgaacaacatgtcttctatagccactcaataaggaaagaaggtgagaaacaaccagcattcacatacccaataggaagcgaggcagtgccccttgaacaacataattcggaccccagtggtaccttagatgagtggcaaagaaaacattttcaaatgtgcttattagagggcctacagaggaccagagccaagcctcttaattaccccaaactctccatgatagatcaaaaactagatgaaaatccctcagcctttttggaaaggctgagagaggctgtagtgaaacacacttccttgtctcctgtgaggtatgtttatacctcacataaataattcagttgagggacagctaattttgaaagacaagtttattactcagacagcccctgatatcagaaggaagctagagaaacaggccatgggattagatagcaccttacaaaacctcctgaaggtagccacctcggtcttttataatagggaccaggaggaggcccaggggaaggagaggaaacacaagaaaaaggcagagactctggtggccactttgtataaaacccagtatccccaaggtacacctgctagttgctaccaatgtggcaaactagggcacttcaaaagggactgcccaggcagcaagaagaagccacctcaaccctgtccagtatacaatggggaccactggaaggcagactgtcctgggaagcataggtcactgagtccagagccagtctcacaaatggtccagcaggactgatgggtcctggggctcaactccctggctccagtggctcagactgctgttactacccgggagcaccaggtgattctggagttcgaagggaggaaggtagacttctttctggacactggagccaggcttctgttttcctctccaattcaggccttcgttcctcccatagcacaaccatgatgggcatctcaggaaagactttaacttgatatttttctcaacctattagttgcagtcagagggacctactgtttacacaggcctttttagtcatgcctgaaagtcccactcctttattagatagagatattccagcacgtatgggggccaccatccttatggctccaggacaaactccgcctccccttagtggaaaccagtattaacccagaggtttgggcaactcagggaagaagtggccggactataaccactataccagtctggatccacctcaaggatcccactttttttcctaaccagagacaataccccctgaagccagaaagtagaaaagggctagacgccagcattgataacctaaaggcacaaggcctccttaggccttgcagtagcccttgaaacaccccaatattaggggtgcaaaaatccaatggggaagggagactagttcaggacctctgccttattcatgaggttgtgattacgattcatccagtagatcccagtccctatactttgctaactcaaatacccaagggaactaaatggttcacagttctgggcctaaaggatgcctttttctgtatacctttataccctgactcccaatacttgtttacctttgaagacccctccaatcaaaccacccagttaacctggactgtactgcctcagggatttagagatagcccccacctatttgggcaagtattgtcaagagatctcttcgaattcttccattctcaggttaaagttttacaatatgtagatgacattctcctctgtgccccaactgaggaagtttcttgagacggcactgaggctctccttaatttcctagctggaaagggatataaggcttcaaaatctaaggctcagctctatcagactttggtaaagtacctaggtctggtcttgtcagaagggaacaagagcactaggcgaggagaggattaatcccatttcctcccttcctctccccagaaccctcaagcagctgagggatgcttgggcattacaggtttttgtaggttatagatacccaggtatgataaaataggttgccctttatatcaccttataaaagaaattcaagtggctaaaactcacttcctgacctgggaacctgaaggtcaaaaggccattaatcagttaaaacaagccttgcttaaagcaccagcccccagtctttctgtagggaagtcctttaatctttatgtatcataaaggaaaggaatgaccctgggagttttaattcaagttcaaggcccagctcaacagccagtagattacttaagtagagagcttgacttggaggctaaaggatggccagcttgcctctgagcagttacagtagtggccctgctagtcccagaggccaccaagttaaccctggggaataacctgtttatgcctcacataaataatgtggcaggcttgctgtcctctaaagcgagtctctggctaacagacagctgcctcctcaagtatcagactttgctgctagaggaatctgcagtccagttaaaaacctgaccttgcctgatcccagacactttcctcccagaggaaactggagaaactgaacataattgtgaacagactgtagtacaacctatgccgctagggaggatctcaaagaaattcccctagaaaatccaggctggacccactttatggatgggagctcttttgtaggacagggagtctgaaaagtgggatatgcagtagtcaccctaaataacattgaaaatgtgcctctctcaccaggcacacacactcaatcagttgagctgatccctctcacaagagcacttgaactaagcaaaggaaagacagctaacatttatactgactccaagtgtacctttctagttctccttgcccatgctgccatctgaaaggaaaggcacttcctcactgctaatgggtcttgcattaaataccatcaagacatcaacaggctattatcctcagtgttcctcccatgagaattagtggtcagacattgcagagggcatcagaagcgggtagatgaaatagccaaaggaaacaggctagcagaccaaagagctaagtcagcagtaagaaggccccaaggtcccaaaacacttgaggcccctctgatttgggagggctacataagggaaataaagcctcagtattcccctacagagatagaatgggccacctctcgaggtatacttttcaaccctcaggatggttacaatcagaagattgcaaagtacgcttgccagcctccagccaatggaagattcttaaaatcctccactgagcctttcacttaggaaagcataagacatcagtgcatccaaagattgttctcaggagaaaatctactaaaaatggtcaaataggttgttaatactcgtgaaaccctcttaaaaataatccctttaacagatgacttcttccccaccacaatcaaaggatgggaagttactcaggggaggactggcagatagacttcacccatatgcccaaaataaatggcattcaatgtcttttggtgtgggtgcataccttcattaactgggtagaggcattcccatgcccaacagaaaaggcctctgaggtggtgagaatactaattagttaaataattcctcactttgggctccctaagtacttccaaaacaacaatggtccctcatttaaagaagcctctacccagtagggccgagtctgctaggactttttattgggtttggtaatacgtcacaccctttagcctctactgtgtcagccatgtcccatttatacaagacaaattgctgggtctgtcctgagcggtttgctcagttcagtaacactaaggaacctcttgatgacttggtatttactgtcttagcattccctttgttagctttacctttagccattaaagacttgtcaggcataaatggaacatggtatgggaacactttcaactgagtaactaactcctcccaggaaagcatttcctccctggtgccagaaaacactttccccaaagataagcctcacaccctcaggctaggaaaagttggccgggtaatagcaaatgcctcctcctgttttaaaagcagaggaaaaggaccatacctgggagatctcaaatattataacaccatacttgtaattgctgaaagctcggaagtttggagaaaaagacataagaaggatgatctaagaaaattggaagccatatggaggggaggctttcagaattcagcgtctcctcctggttgaaagtcctgctgggaatggcaggctctgggtaaccaccctgacacatggcactataatgtaaaaaacaacacataggccttcccagacatgcaccctcatgggattccagaccccctgtatgatgcttagtagtagtggcctacaaatctgtgggtgaacagaacaggagacttctggactgacagcccctgtcacaagggggcattatctgagatattggccagggcatatcgtgtccctggtcttttgaaactccatttgtcggccaggtgtggtggcttacgactgtaatcccagcactttgggaggctgaggcaggtagatgatgaggtcaggagttcaagactagcctggacaatatggtgaaaccccgtctgtactaataatataaaaaaaaaaaaaaaaa

SEQ ID NO: 776 - DNA, 2665 bp, Homo Sapiens
  NM_001009934
gtactctggcggggaaggagaggtcaggcgctccgggctcgcccgctaggtcggggccgcggcgtcccccaccctaagtcccacctccggccgggcatgggtacccgggcgggcctgcctcggcctgggcccactcactggtccagaagcagctgtaggtgcccaccaagcccatgacgacgctgctggccagggtccagcgcttccagagccagaactgagcccagtgagagcgcaccctggagcagcctggattcctggggtgtccccggcagccacacacagccatgcactacccaactgcactcctcttcctcatcctggccaatggggcccaggcctttcgcatctgcgccttcaatgcccagcggctgacactggccaaggtggccagggagcaggtgatggacaccttagttcggatactggctcgctgtgacatcatggtgctgcaggaggtggtggactcttccggcagcgccatccccctcctgcttcgagaactcaatcgatttgatggctctgggccctacagcaccctgagcagcccccagctggggcgcagcacctacatggagacgtatgtgtacttctatcggtcacacaaaacacaggtcctgagttcctacgtgtacaacgatgaggatgacgtctttgcccgggagccatttgtggcccagttctctttgcccagcaatgtccttcccagcctggtgttggtcccgctgcacaccactcctaaggccgtagagaaggagctgaacgccctctacgatgtgtttctggaggtctcccagcactggcagagcaaggacgtgatcctgcttggggacttcaatgctgactgcgcttcactgaccaaaaagcgcctggacaagctggagctgcggactgagccaggcttccactgggtgattgccgatggggaggacaccacagtgcgggccagcacccactgcacctatgaccgcgtcgtgctgcacggggagcgctgccggagtctgctgcacactgcggctgcctttgacttccccacgagcttccagctcaccgaggaggaggccctcaacatcagtgaccactaccccgtggaggtggagctgaagctgagccaggcgcacagcgtccagcctctcagcctcactgttctgttgctgctatcactcctgtcccctcagctgtgccctgctgcctgagcgtccccctacccccccagggcctgctgccttttgggacttaaaccccagcctcccccgtccatccagccctggggctggggggcttcaactatagttgccctgtgactgtagtccacccctgcctgccttgtttgatttggctcttgttctttggttgggcttgtgcctagattaggagaggaagccaggggccctgcactcatgccacctgccaggtagtgtagtatcaggagtggagacaaagtgggctctgggttggggtaggggaagggagggttcagaaagaggaatgaagatgttgtatgacaagaaggaaagttactgagaacaaaaacccagattggtgagataggacacttgtgcagcagatatgccaatgggccatgtttattgtggattggtaagaatcaccaggaaaccattaagccccaatagctacaaggagggtggttaatctgctatatcaaactccttccctgaaaccagcaaacaccgggaaacattttggctcattataatccggtgaacaatgcagtcaggcctgttataaccgctgagcagccacactcgcacctcctgggtgctgtagtctgtgttggtacaggcttctgcatgcctggtaaagtccagccaaggctggtcaaggcaacatctccacacagaaaatctgcaccagttatgtaagctaaaaagctgtgtgaacccaggtgtcccggaaaggggctgcaggacacagcaaaatgccagcagcgtgccggacccctcccttccatcctcctctccaaagaacagaggtcaggaaaaacactggctgggacgctagaagggtcatgtgttaactataatcacatttatggtttggaaccatcaccccaaggtaaaaaaaaaataaaaggtattcccaggtatgtttggcaaaataaaataaaggtaattaaaaacctaagaaatggctgtaaactgagattacaaaaaaccagaggccttttgggagccacaggctgggggctggggccaacataccccagctctgggaccaaaagcctttggagtcctgtccctggatacagatgctcaggccacccacctagcactcctctcatttttgctgctcccccaaaagccagcgctgttctacaatagttcaggtcagacatctaagatccccaggccaaaccatgccacacacgtgtctgttccgaggtcttgttacaaatgaccaaaggttagcctagacctttggtcaggtggtgaaggccctgggaatgcaggttctagaaggggtgggggcatggggcccaggaggttgctagagataggaaatggggcaaatcgcaggtgacctcagcagtacctggatgattcccaccaaggaggaatggccaaaccagatgggtgagaacaagcccaatgtgatgcacacctacccttgctaaataaacgctgctggtcagcctctagcccac

SEQ ID NO: 777 - DNA, 1001 bp, Homo Sapiens
  NM_001009936
gaaaaagatggcgccccgcgcccggggggccccttcctgagcgccccggcccctccctccgccgcctccccctcctccccgcggcgcccccgccccgccccgcccccgccgagaccccgaccccggccccacgggcggacactcggccgggcagccgcgggccgagcgcagccgcctccgccaccgatgcgcctggtggccagactccaagtgggaccggcggacacgcagcctcgcgtgtcaggggaagctgatggagaatcgagctctggatccagggactcgggactcctatggtgccaccagccacctccccaacaagggggccctggcgaaggtcaagaacaacttcaaagacttgatgtccaaactgacggagggccagtatgtgctgtgccggtggacagatggcctgtactacctcgggaagatcaagagggtcagcagctctaagcaaagctgcctcgtgactttcgaagataattccaaatactgggtcctatggaaggacatacagcatgccggtgttccaggagaggagcccaagtgcaacatctgcctagggaagacatcagggccgctgaatgagatcctcatctgcgggaagtgtggcctgggttaccaccagcagtgccacatccccatagcgggcagtgctgaccagcccctgctcacaccttggttctgccgacgctgcatcttcgcactggctgtgcgggtgagccttccatcctccccagtccctgcctctcctgcctcctccagtggggcagaccagagactcccatcacagagtctgagctccaagcagaagggccacacctgggctttggagacagatagcgcctctgccactgtccttggccaggatttgtagactccctgagcctcagtttcctcaactgtaaagtggagatgggtttggtgtcgggaataacgggaccaataaatgatgctttactattaaaaaagaaaatccatgtaaataaaaaaaaaaaaaa

SEQ ID NO: 778 - DNA, 1189 bp, Homo Sapiens
  NM_001009937
cggcgcccagcgcgcgaggacgtgatccgcttctgctccggcttggattgtagccttgacgaggtctgagcgaccatggaccggccggggttcgtggcagcgctggtggctggtggggtagcaggtgtttctgttgacttgatattatttcctctggataccattaaaaccaggctgcagagtccccaaggatttaataaggctggtggttttcatggaatatatgctggcgttccttctgctgctattggatcctttcctaatgctgctgcattttttatcacctatgaatatgtgaagtggtttttgcatgctgattcatcttcatatttgacacctatgaaacatatgttggctgcctctgctggagaagtggttgcctgcctgattcgagttccatctgaagtggttaagcagagggcacaggtatctgcttctacaagaacatttcagattttctctaacatcttatatgaagagggtatccaagggttgtatcgaggctataaaagcacagttttaagagagattcctttttctttggtccagtttcccttatgggagtccttaaaagccctctggtcctggaggcaggatcatgtggtggattcttggcagtcagcagtctgtggagcttttgcaggtggatttgccgctgcagtcaccacccctctagacgtggcaaagacaagaattacgctggcaaaggctggctccagcactgctgatgggaatgtgctctctgtcctgcatggggtctggcggtcacaggggctggcaggattatttgcaggtgtcttccctcgaatggcagccatcagtctgggaggtttcatctttctgggggcttatgaccgaacgcacagcttgctgttggaagttggcagaaagagtccttgaagcagagacaagcctcacctccacttctgtcaagagaggggcctgcagtgcaaaccctcttccgctgagcagctgtctgaactataggccccagtgctgaagaccagttgtgctaagataccggcatggagattgtgccatccgtggtataggctggctggtatgaagtcattggcctgtatgccagagagctaagagaagagaacggggtctgtggcggtactctgaacaatttcctcagaacctcttaataaataagtttggtaatgctgagaaaaaaaaaaaaaaa

SEQ ID NO: 779 - DNA, 1683 bp, Homo Sapiens
  NM_001009941
ggctggggcggccctgaggacgcgtgcggggcaggtcacgcttgggcctggctgcctcaggagccaccctgcacggcgccgggcgaggctgtgcgcgccctcccggaccctccactttggggctttgcggtgtagcggcgcgccccactcccttacgtgttcagtcccgaatcacgtacgggccgctgcagctccaggacggcggacgccagcgctctcggatccccaggcccctccgtgctcatcccggaccgctccgtccctgaggaaaaaccgccccgtgcccggaaccgcggcttctcccacgcggggcaggccggggctgtgagggggcagcccgcctgcggactaggccgggggtttgaggaggcggctctgccggggacaaagccgggggcgtgaggggcggttctgccgggttcggggcgcgcggggcaggttgcgtgaagaggcggaaagtcccactcgccctcggcttctccctgcccggccgccggtgtcccgcccgccgcctccccgcgcagcccggcccgacccgcggcgatggcccagcccggggacccgcggcgcctctgcaggctggtgcaggagggccggctgcgcgccctgaaggaggagctgcaggcggccgggggctgcccggggccggccggggataccctcctgcactgcgccgcgcgccacgggcatcgggacgtgctggcctatctggccgaggcctggggcatggacatcgaggccaccaaccgagactacaagcggcctctgcacgaggcggcctccatgggccaccgagactgcgtgcgctacctgctgggccggggggcagcggtcgactgcctgaagaaggccgactggactcctctgatgatggcctgcacaaggaagaacctgggggtgatccaggagctggtggaacatggcgccaatccactcctgaagaacaaagatggctggaacagtttccacattgccagtcgagaaggcgaccctctgatcctccagtacctgctcactgtttgcccaggtgcctggaagacagagagcaaaattagaaggactcctctgcatactgcagcaatgcatggccatttggaggcagtcaaggtgcttcttaagaggtgccaatatgaaccagactacagagacaactgtggcgtcaccgccttgatggacgcaatccagtgtgggcacatcgacgtcgctaggctgctcctcgatgaacatggggcttgcctttcagcagaagacagcctgggtgcccaggctctgcacagggcagctgtcacagggcaggacgaagccatccgattcttggtctctgaacttggcgtcgatgtagatgtgagagccacatcaacccacctcacagcacttcattatgcagctaaggaaggacatacaagtacaattcagactctcttatccttgggagctgacatcaattctaaagatgaaaaaaatcgatcagccctgcatctggcctgtgcaggtcagcacttggcctgtgccaagtttctcctgcagtcgggactgaaggattctgaagacatcacgggcaccctggctcagcagctcccaaggagagcagatgtccttcagggctctggccatagcgcaatgacataaggatgtttccaagaggaggcaataaagtgcatggtaattcataaaaaaaaaaaa

SEQ ID NO: 780 - DNA, 14138 bp, Homo Sapiens
  NM_001009944
gcactgcagcgccagcgtccgagcgggcggccgagctcccggagcggcctggccccgagccccgagcgggcgtcgctcagcagcaggtcgcggccgcagccccatccagccccgcgcccgccatgccgtccgcgggccccgcctgagctgcggcctccgcgcgcgggcgggcctggggacggcggggccatgcgcgcgctgccctaacgatgccgcccgccgcgcccgcccgcctggcgctggccctgggcctgggcctgtggctcggggcgctggcggggggccccgggcgcggctgcgggccctgcgagcccccctgcctctgcggcccagcgcccggcgccgcctgccgcgtcaactgctcgggccgcgggctgcggacgctcggtcccgcgctgcgcatccccgcggacgccacagcgctagacgtctcccacaacctgctccgggcgctggacgttgggctcctggcgaacctctcggcgctggcagagctggatataagcaacaacaagatttctacgttagaagaaggaatatttgctaatttatttaatttaagtgaaataaacctgagtgggaacccgtttgagtgtgactgtggcctggcgtggctgccgcgatgggcggaggagcagcaggtgcgggtggtgcagcccgaggcagccacgtgtgctgggcctggctccctggctggccagcctctgcttggcatccccttgctggacagtggctgtggtgaggagtatgtcgcctgcctccctgacaacagctcaggcaccgtggcagcagtgtccttttcagctgcccacgaaggcctgcttcagccagaggcctgcagcgccttctgcttctccaccggccagggcctcgcagccctctcggagcagggctggtgcctgtgtggggcggcccagccctccagtgcctcctttgcctgcctgtccctctgctccggccccccgccacctcctgcccccacctgtaggggccccaccctcctccagcacgtcttccctgcctccccaggggccaccctggtggggccccacggacctctggcctctggccagctagcagccttccacatcgctgccccgctccctgtcactgccacacgctgggacttcggagacggctccgccgaggtggatgccgctgggccggctgcctcgcatcgctatgtgctgcctgggcgctatcacgtgacggccgtgctggccctgggggccggctcagccctgctggggacagacgtgcaggtggaagcggcacctgccgccctggagctcgtgtgcccgtcctcggtgcagagtgacgagagccttgacctcagcatccagaaccgcggtggttcaggcctggaggccgcctacagcatcgtggccctgggcgaggagccggcccgagcggtgcacccgctctgcccctcggacacggagatcttccctggcaacgggcactgctaccgcctggtggtggagaaggcggcctggctgcaggcgcaggagcagtgtcaggcctgggccggggccgccctggcaatggtggacagtcccgccgtgcagcgcttcctggtctcccgggtcaccaggagcctagacgtgtggatcggcttctcgactgtgcagggggtggaggtgggcccagcgccgcagggcgaggccttcagcctggagagctgccagaactggctgcccggggagccacacccagccacagccgagcactgcgtccggctcgggcccaccgggtggtgtaacaccgacctgtgctcagcgccgcacagctacgtctgcgagctgcagcccggaggcccagtgcaggatgccgagaacctcctcgtgggagcgcccagtggggacctgcagggacccctgacgcctctggcacagcaggacggcctctcagccccgcacgagcccgtggaggtcatggtattcccgggcctgcgtctgagccgtgaagccttcctcaccacggccgaatttgggacccaggagctccggcggcccgcccagctgcggctgcaggtgtaccggctcctcagcacagcagggaccccggagaacggcagcgagcctgagagcaggtccccggacaacaggacccagctggcccccgcgtgcatgccagggggacgctggtgccctggagccaacatctgcttgccgctggacgcctcctgccacccccaggcctgcgccaatggctgcacgtcagggccagggctacccggggccccctatgcgctatggagagagttcctcttctccgttcccgcggggccccccgcgcagtactcggtcaccctccacggccaggatgtcctcatgctccctggtgacctcgttggcttgcagcacgacgctggccctggcgccctcctgcactgctcgccggctcccggccaccctggtccccaggccccgtacctctccgccaacgcctcgtcatggctgccccacttgccagcccagctggagggcacttgggcctgccctgcctgtgccctgcggctgcttgcagccacggaacagctcaccgtgctgctgggcttgaggcccaaccctggactgcggctgcctgggcgctatgaggtccgggcagaggtgggcaatggcgtgtccaggcacaacctctcctgcagctttgacgtggtctccccagtggctgggctgcgggtcatctaccctgccccccgcgacggccgcctctacgtgcccaccaacggctcagccttggtgctccaggtggactctggtgccaacgccacggccacggctcgctggcctgggggcagtgtcagcgcccgctttgagaatgtctgccctgccctggtggccaccttcgtgcccggctgcccctgggagaccaacgataccctgttctcagtggtagcactgccgtggctcagtgagggggagcacgtggtggacgtggtggtggaaaacagcgccagccgggccaacctcagcctgcgggtgacggcggaggagcccatctgtggcctccgcgccacgcccagccccgaggcccgtgtactgcagggagtcctagtgaggtacagccccgtggtggaggccggctcggacatggtcttccggtggaccatcaacgacaagcagtccctgaccttccagaacgtggtcttcaatgtcatttatcagagcgcggcggtcttcaagctctcactgacggcctccaaccacgtgagcaacgtcaccgtgaactacaacgtaaccgtggagcggatgaacaggatgcagggtctgcaggtctccacagtgccggccgtgctgtcccccaatgccacgctagcactgacggcgggcgtgctggtggactcggccgtggaggtggccttcctgtggacctttggggatggggagcaggccctccaccagttccagcctccgtacaacgagtccttcccggttccagacccctcggtggcccaggtgctggtggagcacaatgtcatgcacacctacgctgccccaggtgagtacctcctgaccgtgctggcatctaatgccttcgagaacctgacgcagcaggtgcctgtgagcgtgcgcgcctccctgccctccgtggctgtgggtgtgagtgacggcgtcctggtggccggccggcccgtcaccttctacccgcacccgctgccctcgcctgggggtgttctttacacgtgggacttcggggacggctcccctgtcctgacccagagccagccggctgccaaccacacctatgcctcgaggggcacctaccacgtgcgcctggaggtcaacaacacggtgagcggtgcggcggcccaggcggatgtgcgcgtctttgaggagctccgcggactcagcgtggacatgagcctggccgtggagcagggcgcccccgtggtggtcagcgccgcggtgcagacgggcgacaacatcacgtggaccttcgacatgggggacggcaccgtgctgtcgggcccggaggcaacagtggagcatgtgtacctgcgggcacagaactgcacagtgaccgtgggtgcggccagccccgccggccacctggcccggagcctgcacgtgctggtcttcgtcctggaggtgctgcgcgttgaacccgccgcctgcatccccacgcagcctgacgcgcggctcacggcctacgtcaccgggaacccggcccactacctcttcgactggaccttcggggatggctcctccaacacgaccgtgcgggggtgcccgacggtgacacacaacttcacgcggagcggcacgttccccctggcgctggtgctgtccagccgcgtgaacagggcgcattacttcaccagcatctgcgtggagccagaggtgggcaacgtcaccctgcagccagagaggcagtttgtgcagctcggggacgaggcctggctggtggcatgtgcctggcccccgttcccctaccgctacacctgggactttggcaccgaggaagccgcccccacccgtgccaggggccctgaggtgacgttcatctaccgagacccaggctcctatcttgtgacagtcaccgcgtccaacaacatctctgctgccaatgactcagccctggtggaggtgcaggagcccgtgctggtcaccagcatcaaggtcaatggctcccttgggctggagctgcagcagccgtacctgttctctgctgtgggccgtgggcgccccgccagctacctgtgggatctgggggacggtgggtggctcgagggtccggaggtcacccacgcttacaacagcacaggtgacttcaccgttagggtggccggctggaatgaggtgagccgcagcgaggcctggctcaatgtgacggtgaagcggcgcgtgcgggggctcgtcgtcaatgcaagccgcacggtggtgcccctgaatgggagcgtgagcttcagcacgtcgctggaggccggcagtgatgtgcgctattcctgggtgctctgtgaccgctgcacgcccatccctgggggtcctaccatctcttacaccttccgctccgtgggcaccttcaatatcatcgtcacggctgagaacgaggtgggctccgcccaggacagcatcttcgtctatgtcctgcagctcatagaggggctgcaggtggtgggcggtggccgctacttccccaccaaccacacggtacagctgcaggccgtggttagggatggcaccaacgtctcctacagctggactgcctggagggacaggggcccggccctggccggcagcggcaaaggcttctcgctcaccgtgctcgaggccggcacctaccatgtgcagctgcgggccaccaacatgctgggcagcgcctgggccgactgcaccatggacttcgtggagcctgtggggtggctgatggtggccgcctccccgaacccagctgccgtcaacacaagcgtcaccctcagtgccgagctggctggtggcagtggtgtcgtatacacttggtccttggaggaggggctgagctgggagacctccgagccatttaccacccatagcttccccacacccggcctgcacttggtcaccatgacggcagggaacccgctgggctcagccaacgccaccgtggaagtggatgtgcaggtgcctgtgagtggcctcagcatcagggccagcgagcccggaggcagcttcgtggcggccgggtcctctgtgcccttttgggggcagctggccacgggcaccaatgtgagctggtgctgggctgtgcccggcggcagcagcaagcgtggccctcatgtcaccatggtcttcccggatgctggcaccttctccatccggctcaatgcctccaacgcagtcagctgggtctcagccacgtacaacctcacggcggaggagcccatcgtgggcctggtgctgtgggccagcagcaaggtggtggcgcccgggcagctggtccattttcagatcctgctggctgccggctcagctgtcaccttccgcctgcaggtcggcggggccaaccccgaggtgctccccgggccccgtttctcccacagcttcccccgcgtcggagaccacgtggtgagcgtgcggggcaaaaaccacgtgagctgggcccaggcgcaggtgcgcatcgtggtgctggaggccgtgagtgggctgcaggtgcccaactgctgcgagcctggcatcgccacgggcactgagaggaacttcacagcccgcgtgcagcgcggctctcgggtcgcctacgcctggtacttctcgctgcagaaggtccagggcgactcgctggtcatcctgtcgggccgcgacgtcacctacacgcccgtggccgcggggctgttggagatccaggtgcgcgccttcaacgccctgggcagtgagaaccgcacgctggtgctggaggttcaggacgccgtccagtatgtggccctgcagagcggcccctgcttcaccaaccgctcggcgcagtttgaggccgccaccagccccagcccccggcgtgtggcctaccactgggactttggggatgggtcgccagggcaggacacagatgagcccagggccgagcactcctacctgaggcctggggactaccgcgtgcaggtgaacgcctccaacctggtgagcttcttcgtggcgcaggccacggtgaccgtccaggtgctggcctgccgggagccggaggtggacgtggtcctgcccctgcaggtgctgatgcggcgatcacagcgcaactacttggaggcccacgttgacctgcgcgactgcgtcacctaccagactgagtaccgctgggaggtgtatcgcaccgccagctgccagcggccggggcgcccagcgcgtgtggccctgcccggcgtggacgtgagccggcctcggctggtgctgccgcggctggcgctgcctgtggggcactactgctttgtgtttgtcgtgtcatttggggacacgccactgacacagagcatccaggccaatgtgacggtggcccccgagcgcctggtgcccatcattgagggtggctcataccgcgtgtggtcagacacacgggacctggtgctggatgggagcgagtcctacgaccccaacctggaggacggcgaccagacgccgctcagtttccactgggcctgtgtggcttcgacacagagggaggctggcgggtgtgcgctgaactttgggccccgcgggagcagcacggtcaccattccacgggagcggctggcggctggcgtggagtacaccttcagcctgaccgtgtggaaggccggccgcaaggaggaggccaccaaccagacggtgctgatccggagtggccgggtgcccattgtgtccttggagtgtgtgtcctgcaaggcacaggccgtgtacgaagtgagccgcagctcctacgtgtacttggagggccgctgcctcaattgcagcagcggctccaagcgagggcggtgggctgcacgtacgttcagcaacaagacgctggtgctggatgagaccaccacatccacgggcagtgcaggcatgcgactggtgctgcggcggggcgtgctgcgggacggcgagggatacaccttcacgctcacggtgctgggccgctctggcgaggaggagggctgcgcctccatccgcctgtcccccaaccgcccgccgctggggggctcttgccgcctcttcccactgggcgctgtgcacgccctcaccaccaaggtgcacttcgaatgcacgggctggcatgacgcggaggatgctggcgccccgctggtgtacgccctgctgctgcggcgctgtcgccagggccactgcgaggagttctgtgtctacaagggcagcctctccagctacggagccgtgctgcccccgggtttcaggccacacttcgaggtgggcctggccgtggtggtgcaggaccagctgggagccgctgtggtcgccctcaacaggtctttggccatcaccctcccagagcccaacggcagcgcaacggggctcacagtctggctgcacgggctcaccgctagtgtgctcccagggctgctgcggcaggccgatccccagcacgtcatcgagtactcgttggccctggtcaccgtgctgaacgagtacgagcgggccctggacgtggcggcagagcccaagcacgagcggcagcaccgagcccagatacgcaagaacatcacggagactctggtgtccctgagggtccacactgtggatgacatccagcagatcgctgctgcgctggcccagtgcatggggcccagcagggagctcgtatgccgctcgtgcctgaagcagacgctgcacaagctggaggccatgatgctcatcctgcaggcagagaccaccgcgggcaccgtgacgcccaccgccatcggagacagcatcctcaacatcacaggagacctcatccacctggccagctcggacgtgcgggcaccacagccctcagagctgggagccgagtcaccatctcggatggtggcgtcccaggcctacaacctgacctctgccctcatgcgcatcctcatgcgctcccgcgtgctcaacgaggagcccctgacgctggcgggcgaggagatcgtggcccagggcaagcgctcggacccgcggagcctgctgtgctatggcggcgccccagggcctggctgccacttctccatccccgaggctttcagcggggccctggccaacctcagtgacgtggtgcagctcatctttctggtggactccaatccctttccctttggctatatcagcaactacaccgtctccaccaaggtggcctcgatggcattccagacacaggccggcgcccagatccccatcgagcggctggcctcagagcgcgccatcaccgtgaaggtgcccaacaactcggactgggctgcccggggccaccgcagctccgccaactccgccaactccgttgtggtccagccccaggcctccgtcggtgctgtggtcaccctggacagcagcaaccctgcggccgggctgcatctgcagctcaactatacgctgctggacggccactacctgtctgaggaacctgagccctacctggcagtctacctacactcggagccccggcccaatgagcacaactgctcggctagcaggaggatccgcccagagtcactccagggtgctgaccaccggccctacaccttcttcatttccccggggagcagagacccagcggggagttaccatctgaacctctccagccacttccgctggtcggcgctgcaggtgtccgtgggcctgtacacgtccctgtgccagtacttcagcgaggaggacatggtgtggcggacagaggggctgctgcccctggaggagacctcgccccgccaggccgtctgcctcacccgccacctcaccgccttcggcgccagcctcttcgtgcccccaagccatgtccgctttgtgtttcctgagccgacagcggatgtaaactacatcgtcatgctgacatgtgctgtgtgcctggtgacctacatggtcatggccgccatcctgcacaagctggaccagttggatgccagccggggccgcgccatccctttctgtgggcagcggggccgcttcaagtacgagatcctcgtcaagacaggctggggccggggctcaggtaccacggcccacgtgggcatcatgctgtatggggtggacagccggagcggccaccggcacctggacggcgacagagccttccaccgcaacagcctggacatcttccggatcgccaccccgcacagcctgggtagcgtgtggaagatccgagtgtggcacgacaacaaagggctcagccctgcctggttcctgcagcacgtcatcgtcagggacctgcagacggcacgcagcgccttcttcctggtcaatgactggctttcggtggagacggaggccaacgggggcctggtggagaaggaggtgctggccgcgagcgacgcagcccttttgcgcttccggcgcctgctggtggctgagctgcagcgtggcttctttgacaagcacatctggctctccatatgggaccggccgcctcgtagccgtttcactcgcatccagagggccacctgctgcgttctcctcatctgcctcttcctgggcgccaacgccgtgtggtacggggctgttggcgactctgcctacagcacggggcatgtgtccaggctgagcccgctgagcgtcgacacagtcgctgttggcctggtgtccagcgtggttgtctatcccgtctacctggccatcctttttctcttccggatgtcccggagcaaggtggctgggagcccgagccccacacctgccgggcagcaggtgctggacatcgacagctgcctggactcgtccgtgctggacagctccttcctcacgttctcaggcctccacgctgagcaggcctttgttggacagatgaagagtgacttgtttctggatgattctaagagtctggtgtgctggccctccggcgagggaacgctcagttggccggacctgctcagtgacccgtccattgtgggtagcaatctgcggcagctggcacggggccaggcgggccatgggctgggcccagaggaggacggcttctccctggccagcccctactcgcctgccaaatccttctcagcatcagatgaagacctgatccagcaggtccttgccgagggggtcagcagcccagcccctacccaagacacccacatggaaacggacctgctcagcagcctgtccagcactcctggggagaagacagagacgctggcgctgcagaggctgggggagctggggccacccagcccaggcctgaactgggaacagccccaggcagcgaggctgtccaggacaggactggtggagggtctgcggaagcgcctgctgccggcctggtgtgcctccctggcccacgggctcagcctgctcctggtggctgtggctgtggctgtctcagggtgggtgggtgcgagcttccccccgggcgtgagtgttgcgtggctcctgtccagcagcgccagcttcctggcctcattcctcggctgggagccactgaaggtcttgctggaagccctgtacttctcactggtggccaagcggctgcacccggatgaagatgacaccctggtagagagcccggctgtgacgcctgtgagcgcacgtgtgccccgcgtacggccaccccacggctttgcactcttcctggccaaggaagaagcccgcaaggtcaagaggctacatggcatgctgcggagcctcctggtgtacatgctttttctgctggtgaccctgctggccagctatggggatgcctcatgccatgggcacgcctaccgtctgcaaagcgccatcaagcaggagctgcacagccgggccttcctggccatcacgcggtctgaggagctctggccatggatggcccacgtgctgctgccctacgtccacgggaaccagtccagcccagagctggggcccccacggctgcggcaggtgcggctgcaggaagcactctacccagaccctcccggccccagggtccacacgtgctcggccgcaggaggcttcagcaccagcgattacgacgttggctgggagagtcctcacaatggctcggggacgtgggcctattcagcgccggatctgctgggggcatggtcctggggctcctgtgccgtgtatgacagcgggggctacgtgcaggagctgggcctgagcctggaggagagccgcgaccggctgcgcttcctgcagctgcacaactggctggacaacaggagccgcgctgtgttcctggagctcacgcgctacagcccggccgtggggctgcacgccgccgtcacgctgcgcctcgagttcccggcggccggccgcgccctggccgccctcagcgtccgcccctttgcgctgcgccgcctcagcgcgggcctctcgctgcctctgctcacctcggtgtgcctgctgctgttcgccgtgcacttcgccgtggccgaggcccgtacttggcacagggaagggcgctggcgcgtgctgcggctcggagcctgggcgcggtggctgctggtggcgctgacggcggccacggcactggtacgcctcgcccagctgggtgccgctgaccgccagtggacccgtttcgtgcgcggccgcccgcgccgcttcactagcttcgaccaggtggcgcagctgagctccgcagcccgtggcctggcggcctcgctgctcttcctgcttttggtcaaggctgcccagcagctacgcttcgtgcgccagtggtccgtctttggcaagacattatgccgagctctgccagagctcctgggggtcaccttgggcctggtggtgctcggggtagcctacgcccagctggccatcctgctcgtgtcttcctgtgtggactccctctggagcgtggcccaggccctgttggtgctgtgccctgggactgggctctctaccctgtgtcctgccgagtcctggcacctgtcacccctgctgtgtgtggggctctgggcactgcggctgtggggcgccctacggctgggggctgttattctccgctggcgctaccacgccttgcgtggagagctgtaccggccggcctgggagccccaggactacgagatggtggagttgttcctgcgcaggctgcgcctctggatgggcctcagcaaggtcaaggagttccgccacaaagtccgctttgaagggatggagccgctgccctctcgctcctccaggggctccaaggtatccccggatgtgcccccacccagcgctggctccgatgcctcgcacccctccacctcctccagccagctggatgggctgagcgtgagcctgggccggctggggacaaggtgtgagcctgagccctcccgcctccaagccgtgttcgaggccctgctcacccagtttgaccgactcaaccaggccacagaggacgtctaccagctggagcagcagctgcacagcctgcaaggccgcaggagcagccgggcgcccgccggatcttcccgtggcccatccccgggcctgcggccagcactgcccagccgccttgcccgggccagtcggggtgtggacctggccactggccccagcaggacaccccttcgggccaagaacaaggtccaccccagcagcacttagtcctccttcctggcgggggtgggccgtggagtcggagtggacaccgctcagtattactttctgccgctgtcaaggccgagggccaggcagaatggctgcacgtaggttccccagagagcaggcaggggcatctgtctgtctgtgggcttcagcactttaaagaggctgtgtggccaaccaggacccagggtcccctccccagctcccttgggaaggacacagcagtattggacggtttctagcctctgagatgctaatttatttccccgagtcctcaggtacagcgggctgtgcccggccccaccccctgggcagatgtcccccactgctaaggctgctggcttcagggagggttagcctgcaccgccgccaccctgcccctaagttattacctctccagttcctaccgtactccctgcaccgtctcactgtgtgtctcgtgtcagtaatttatatggtgttaaaatgtgtatatttttgtatgtcactattttcactagggctgaggggcctgcgcccagagctggcctcccccaacacctgctgcgcttggtaggtgtggtggcgttatggcagcccggctgctgcttggatgcgagcttggccttgggccggtgctgggggcacagctgtctgccaggcactctcatcaccccagaggccttgtcatcctcccttgccccaggccaggtagcaagagagcagcgcccaggcctgctggcatcaggtctgggcaagtagcaggactaggcatgtcagaggaccccagggtggttagaggaaaagactcctcctgggggctggctcccagggtggaggaaggtgactgtgtgtgtgtgtgtgtgcgcgcgcgcacgcgcgagtgtgctgtatggcccaggcagcctcaaggccctcggagctggctgtgcctgcttctgtgtaccacttctgtgggcatggccgcttctagagcctcgacacccccccaacccccgcaccaagcagacaaagtcaataaaagagctgtctgactgc

SEQ ID NO: 781 - DNA, 5420 bp, Homo Sapiens
  NM_001009993
ggcggggagcgcgggctgcggagaggcgggccgggccaagcggagccgagcgagcgggagcgcggcgtccgggaggcggcggagacgcggggctcggagggtcagcctcttatcgtagcaggtctcctcggcacgccccccttgtttcgccccacggccaagcccgccgcgggccggcgtgcgctggtcactgaggcccaggtcgccgccgcggcgcgtttttgaaatcatgaatcctgtttatagtcctggatcttctggggttccctatgcaaatgccaaaggaattggttatccagctggttttcccatgggctatgcagcagcagctcctgcctattctcctaacatgtatcctggagcgaatcctaccttccaaacaggttacactcctggcacaccttacaaagtgtcctgttcccccaccagcggggctgtgccaccgtactcctcctccccgaacccctaccagactgccgtgtaccctgtgcgaagtgcctacccccagcagagcccgtatgcacagcaaggcacgtactacacacagccgctgtatgcagcacctcctcacgtcatccaccacaccacggtggtgcagcccaacggcatgcctgcaacggtgtaccctgctcccatcccccctcctagaggcaacggggtcaccatgggcatggtggctgggaccaccatggccatgtcagcaggtaccctgctgactgctcactccccaactcctgtcgccccccacccggtcactgtgcccacgtaccgggccccaggaacgcccacttacagctatgtgccccctcagtggtgatcacctgcaaatgtttgaggacggagctgtgcagtcacattattggggattccacagctggtgctgcaggccttgcgcctccaaccaggactttcttcttaatgctctcgacacttagctaaacacgactatatcccggcccagcaggccccagcgccgttagtctccagctgactctgtgggttggtcttaaagcaaattctgttttgtggactgcctggcaattttttagctaactgtaatgataaaaagggagtattaatctattctgaatcatatctagttgaatgcatgtttaaaaaaacaaacacaaaaagcttgctcaatctacctgcagtgactgatgcaaaaccatcatatgcaaaatccaaaggaatggaaacgtattttacaacttgtatcactaatgcactgttgtaatgtatgcaaagtcttacagttataagtgttaaagtgaatttcttcatagagcatctgaaatatcttagatgattcttcaaccttttggggttgatgtgggttgccagttagggatgtggacattttagttttcagcgacctgtttctttggcactgactgtcctgggagggagttgcgaggtttgggagagagtagggaagccacagctgcttgggtgcagctggttcatggacatccctttgagtttaggcttggtggagtcagtggaacagggacatgcttaaagctcatcatgaaagattatggtagtgtggccagtgaaatttggggcgaggggggtggtttatgtgtcagcaaagcagtttctctgctatctaaattttcattacagttctcttagagagatgatgtttttatatgtctttattggaaaagtcctatgtaaaactaaattattttcctgggatggaagaaatgtgaaagagaaacagccatgcttgcaggaggtattgtcctctgctttatttagcttagaaaatcattcctttttttttttttttcctggagaaatgtttgaatcagctgaaaacaggtaggcattgctgtttttccccaacaaagaagggcaaaggtttcagctgtatgttatgaagaaagtggtatatttaagaatgagttaaaagggaacaaaactttatttaaaattcctccaatttcttgtagaaaggcagggccgtggatatgtctggaaatgtagaaacctgtagctgcttctgggatcacccacctgatggtggtgacttgtctgctgaggccggctggaggggacgcttagagatggggcgagggggaggccagtgtctgttgtctgcgagcctctcctgccatctcttttgcagctgagggcacttggcacaaagcaagcacagacagcagagagggccaggcagtgctggagtgcgtttgctggcagggtttattgtgggagaggaatttgagtttaggatctgaatcttgtacataagaaatgaaaaggcttccctccaccccgcccccaaaatatgcccgtcctgtatccatgagagtgcatgtcggttctcagtgagggtcagagtgggggtgggggatgtaaggcctgggtccctttcagcggcctctagggcaggagcgtgcgtcttcttcccagtgcagtggtggtttgagtgctgtgggctctggtggggagggggctctgctcctcttcatttgctggtagctgggtcagggcactggcgcccagtgaggatgcccactagcattctgccccagttggttggtggggggacacctgaccactgagcctttggtaaccttattttttatagtaagtacttcttataattttctttttcacatcttattttataagaagtttaggaatatttttgcatggatcattgtaaacagcagattctttattcctgatgtctattaacatagaatgtttactgataagtactttaaattgcttcatgagcacttaatccatcttagtgtctatgtgtgggggcagacatttaccgcaggcacacagtttgtgcccctttcttcaagtctctgttggtaattccatctgtttagtggatggttggcaggattagtaggttctaacggttccaggggttcagctgaccaagtagcagagaagtcttttttcccaattgagtgctaatagattaggataaaatactcacaatgttagtgtatgcttttaaaaagccccacacaacaaaatggaaacatacatgtacaactcctgtgagggctggagtcttggggttcaggaggaggttagaagttacaggcatctcttcaggcttgcttggtacttggcacacacaggatggtgttttaaagagtgggctgcaccccccacacgccatttacatcagcttcataaacacttttcttcctccctgtaacttaaccttttttcccttttatgaagttgagaggctttatgaaataagtttgcattgcacatccgtgcagaaatctttctgactttgaaatttttaggacgtcagctgtcagatacgaaaggtagatatcaggtaagaatctggacttaggaaatagtcacaaaactgtcataggttgtaattttatcaacattcgcttctagtaaaattaaagtcaattaagaaatagaacttgggtcaaaattctgttacaaagcttcataatttgtcccgaagcatatggtggagcattctgagaaatttgctttttgtgtgtttgacattcctaatttgggagtccttcagctgaattactattcttttagaagttgagacagcaggtaagcaaaggacctagttcatgtaaacatggacatcatgatggctatttaaaaaatatttgttctacaccttctcccctgaggcttggggagtgtgttcagccgctgcagtttctctgctcatggaggtcttgtttggatctgtgctggcggctgagcatttagtgtgagccagtgacccatgaacttgccgctctgtgagggccagagtcagggccagtcatggtaatgggcctgaaggcacttccagaaccttttatgtctctcgtgagccatctgttaagaacgttcttcttggtgtggtttgtaggcctacctgtcgctattctgggaaaccttcttgagtgctatgcaaatgtgttcacaggcaatgggggtggtcctgagccttggggtgggcacctggtcagtgagtgtcttgcccttccccagctgggcatacagtaccttgctctttctggtggcatcatctggctgtgatgaatgaggtctaggaaataatttgcatgtgtcttgggggacacaacagtaacgagaggaaatacattattacagcaacttgcgacgtactaatacctgtcagtgttggcccccgtaaggtatgtaaggcacctgtgagtgccagtgagtgctggtgaaaggccaacatgtactagttatgtaagtattggtgtctgctttaaaaaaggagacccagacttcacctgtcctttttaaacatttgagaacagtgttactctgagcagttgggccaccttcaccttatccgacagctgactgttggatgtgtccattgtcgccagtttggctgttgcccggacaggacaggacctccattgggcgcagcagcaggtggcaggggtgtggcttgaggtgggtggcagcgtctggtcctcctctctggtgctttctgagagggtctctaaagcagagtgtggttggcctgggggaaggcagagcacgtatttctcccctctagtacctctgcatttgtgagtgttccctctggctttctgaagggcagcagactcttgagtatactgcagaggacatgctttatcagtaggtcctgagggctccaggggctcaactgaccaagtaacacagaagttggggtatgtggcctatttgggtcggaaactgcatgtttcagaaagtttgtctctttttcctactcattatttgaagaagagagagcctgtggggatagccttatcttggtccacaggactgaagtgaagtcacttgggaaggggagacagaggatgagcggcgtctgtgtagggacccccccccgggcctgcagaagggtggtgtgctcccaggactggcatgacaggtgtctcctcctcaccacaggctgtgcccatgagtccctgtgcagaccagtgggcaaggcagctgggccagatctcaggccagccgtttgtgctcctagcagggttgctgtgctggccacacggagaggccctagagagcctcatggattgtaactaaagaagaaacggttcctttttgtttttttaaaaatgatttttaaataccgttttttacaccgttctctcggtactttttttaagctaagtcagcattgtcttccagtgttaaaggcatccctcacctctgcattgaacttacgtatccatgccaaggaatggaatttccatcctgagccagttcagttaggtgtcaattgatactattttaattttttatgcaatctgatgagatgagctcagatttaaaaatctcaaaagcacgtttattgtaacaagaattgttatgtattaatactgcagttttcaataaagattgacttgtgttgcaaaaaaaaaaaaaaa

SEQ ID NO: 782 - DNA, 3061 bp, Homo Sapiens
  NM_001010855
tttgcagatctgaagagcacagtcaagaccacagacacccgtggaggctcccccaagacatctgcttctctgggactggggacctcgctcaggaccgtggggagttggctgaaggacttggggagcccagaagctgccaccgaaccaagaaccacctctgtgcagaaaagcaaccaccttgttctctattctgctgcccgagacaaccacatcctcctcctcctacacccaaaggctcccatggagagctcagatgtggagctggacctccagaggagcgtgcaggctgtgctccgggagctcagcacccaggcccctgccctgcagagcaaccaaggcatgtggaggtggtccctgcacaagaaggtcgagcgagatcccggtaagagcccagtgctggtccgcattcttctcagagaactggagaaggcggaaagccaggacctccggcatgtcatcattcccttgctgcacactgtaatgtacgtgctcaccaaggccacaggaatcacagaagagctctaccagagaatctatgccttttgcacaaggttactgaccctgcccaccccctactgcacagtcgccttggactgcgcgataaggctgaaaacggagatggctgtcccagggacactgtaccaaaggatggtcattgccgaacagaacttgacgaatgagctgtatccctaccaggagagagtgttcctcttcgtggatcctgagctggtgtctgcgtctgtgtgcagtgctctgctactggagatcgaggcggcccaggcgcagcagacaccagagacctgcatgcgccacgtggtctcccacgccctgcaggcggctctgggggaggcctgtcacgcaggcgctctgcacaggaagctgcaggccagccctcgccgcaccctggagcactatttccacgccgtggtggccgccttggagcagatggccagcgaggccagcccgagccgggagggacacgtagagaggctggaggagatttactgctcgctgctgggtcccgcggcggggcgctgcggtggtgaccttgtccaagagcggccaccaagcattcccctgcccagcccctacatcaccttccacttgtggaccggtgaggagcagctctggaaggaactggtgctcttcctccgcccaagatcccagctgcgcctcagtgctgacttggaggtcttggatctgcagggcctccggccggaccgggagttggcccgggtttctgtgctgtccactgacagcggcattgagcgggaccttcccacgggggctgatgagctgcctgcacccggcagccctgagatggagcgagccgggctgcagcgcaaagggggcatcaagaagcgtgcatggcccctggacttcttgatgcctggcagctgggacgggcccccagggctgcaccggaggacaggccggcccagtggggatggggaaatgctgcccggcgtgtcccggctgcacacagcccgggtacttgtgctcggagatgacaggatgctggggcgcctggcccaggcctaccacagactcaggaaacgggagacccagaagttctgcctcactcccagactcagcctgcagctctactacatccccgtgctggcgcctgagaagcctgcagcatccaggcagccggagctgggagagctggctacgttcctgggccgcgtagacccgtggtaccagagcaacgtcaacacgctgtgccccgccatccacaagctggctgagatgcctccttccctggacacatcccggactgtggaccccttcatcctagacgtcatcacctactacatccgcatgggcacccaacccatctatttccagatctacacagtcaagatctttttcagtgacctgagccaagaccctactgaggacattttcctcattgaactgaaggtgaagatccaagattctaaattccccaaagatggcttttcacccaggaggagaggcgtggctgagggcccaggggcagagctctccctatgctaccagaaggccttgcttagccaccggccccgagaggtcaccgtttccctgcgggccactgggctgatcctgaaggccattccagccagcgacacagaagtttcagggtctagccattgccccctgcctgctgctcctgtcacagaccacacatgtctgaatgtcaacgtgacagaggttgtcaagtcctccaacttggcgggaaagtccttctctacagtgaccaacaccttcaggacgaacaatatccagatccagagccgggaccagaggctgctgacactgtcgctggacaaggacgatcaacgcactttcagggatgtggtcagattcgaggttgctccctgcccagaaccatgttctggggcccagaagtccaaggcaccgtggctcaatttgcatgggcaacaggaggtggaagcaatcaaagccaagcccaagccccttctgatgcccatcaacacattctctggtattgtccagtgagcctgcagggacagcaggcccaggaggaaggatacactaccccaccaactccaaacactcacaccaacagccagagcaaggcccggctccacacggcagctttggccttgaccaggagccagcgagtgcctgggagcacagggagcctaccctggggactgtgatgaggaagggcccacatggaggtctacggatggcccaggcaatgctgtcgctgcttgagaacatacacaccaagcccagcttctcatacaaatgtctactccttcatttagcttcaattcccacttctcccactgtcctctcccacccaagctccccatccagcccttaaaaccagggttaaagctgctgtcttggccagagccctgtggcctaggggaaaattggaagcaaggaacagcaacagcaccacctccctcccaagtctcttcccttcccactctcaggccactgcccacctcactcagcccaggcaggtgtctctatcaggtgagagaaaaatgtcagactcaataaatgtacactgaagtcttaaaaaaaaaaaaaaaaaaaa

SEQ ID NO: 783 - DNA, 4479 bp, Homo Sapiens
  NM_001010862
agaaaaagaaggaggagactgcggcgcagcagcgactagtgggagtccgatgtgggagaggggctgcggccaccgccaccgccgccgccaccaggaaggcggaggacgcaggagccaagagcaagggacgccgccacggtcatcttcgcctgccccgccgccctcttagagacactcattgcctatggatcatcctctcccagcttttgcaagcaccgggctgctcgcccgctgattttcctcctccataggctcactgcggaggcaacggcgaggtgtccgatttgtgcacttgaggcccgcaatccgggacggtggggaatctgcgcctcctggccgggcatgaagaccccgtttggaaaggcagctgcagggcagcggtccaggacgggcgctggccacggcagtgtgtctgttaccatgataaagaggaaggctgcacacaagaagcataggagccgacccacctcccagcctcgggggaacatcgtgggctgcagaattcagcacggatggaaagatggagatgaacctctaacacagtggaaaggaaccgttctggatcaggtacctgtaaatccctctctgtatcttatcaaatatgatggatttgactgtgtttatggattggaacttcacagagatgaaagagtgtcatcacttgaagtccttcctaatagagttgcatcatctagaatcagtgatacacacttggcagaaataatggttggcaaagcagtggaacatatttttgagacagaggaaggttccaaaaatgaatggagggggatggtcttagctcaggcacctgtcatgaacacatggttttacattacctatgagaaagatcctgtattatatatgtaccagctcttagatgattataaagatggtgacctccgcatccttcaagattccaatgattctcctctggcagagagggagccaggagaagtcatagacagcctggtaggcaaacaggtggaatacgccaaagacgatggctccaagagaactggcatggtcattcatcaggtagaagcaaaaccctctgtgtacttcatcaaatttgatgatgatttccatatctatgtctacgatttggtaaaaacatcttagaggtcatcttgaaatttgccaaatatatgagactctaaatctgtagacacagaaagtcttgattgctttccagtttgtaagaaccatcttctccctttttgcacgttttgcttggcaaaaaaattggaacttctgccctctcatacgtttttggaagaaaccttttgcccatctgtccaaccttttcactggttcctctccgcaatttaactgattagtgagaagggtaaagtctgacatccattggctcatacttttttttatcttgggtggtgttaatagattaaaggtagctgaacacctctcacctcactctttttggcacttggactctacactcattgaggtgtgaagcttgctgagatatcccatgtgactggctgggtaagtgtctttgcaatctcaaatctcccccaagtggcttcaaaaatctaacttgggaaagagtgggaagcccattttggtctcttgttcaagttgcattctcagttctaactgtactaaaagtaaggctaataattttgctctctttccggttctttcacctattgctcaactgttttagaattaagaaggtaattactttgcattttagtacctaaccataggctgagaaaccttgcaaaactgataagaagacaagcatttggggaccaaactccaagtggagagatcaagatttctggtggagcttaagtgaaaggttttagtcatcagtggcattagggtctctcttgtctccaatagctctggctggtatctgcagacatggagtaggttttaactgatagaagctgtgcaggcagactttagcacaaatggtctttgccagcccagaggagcattaagccaggctctagctagagccctcagtcacaggcaaaggctgggtttggctgggtttggacagatctgtccagaacctcaaaatgaaagaggagaaacctagaatcaaactgagatacagatttctttgctgtgctaagagagactcaagttttagatttgattcttaggagactgaattcagagtcccagcatgtgaggtgggcaaggcacttgtgagaaccaagaatggctgaaagcaggctatacttccttgcagggactggtgggctcatctattatggtatcccagcaggacttggaacacagtcagtggtaggtaatctgtaggcttaatgatgttttaagtgctggcattggtagatagaaatctaatagatttttgttagtgtttggatttttaactatcctgtttcttggctggccctaagaaacttatatgcagataagggtgagttctactgtggcagaaaagtaaacaatggaagggcctttgagctttccattattaaagagccattggcggaggttaaccaaagcctaggaaagaaaagttgaagtacaagcatggtttttgagagaagcacctggccaaaaccaaagctttctcattgaggttctcacagaagctccattagcagtaacagcctaataaggccatggagttctgcacatttggggctgggactcaaggcagtacaatcatattgggactgtactgcaagatatcttccaaattagtttaagttcacaggtcatggagtccagactaccggcacagattggcatcctgctgaggatgaaacaaagaagatgttctcttttctcctatgttttatctgtctacttttgctttttgatgccactaagtctctactatgatgtttgactgacaacagcaatgtgggtctgtattgccctatgttctaagtcctggggtcatatatttgcttaaaaaaactgttctagtggctggggactagtgtgctttctaatttttttgatgtgaggttgatattgtgataatcttatgtcttcttgaccctttggactctttaatatgtatgacatgcaattgtggggttagattaattcaactcctgaggtcctgaaggaacttcacccagtcaagaggaagacagccaaggctgcagctgctgaaggaaccccatatctgggcagacatctttgtgagatctatatggctgaaatgagaaaaacgagaaattgggaaaggcagaattttggactttaattattttggactttgaattagaaatttaattttgggcagtcctttttcccttggagtttaatagttgatggggtgggggtgaggtcatatagttcaaactaaggcatttttattatgttgttgatattgtattatttggagtattttaatgctatctttgggagtcattgtataattgttgtcagctatgtcaggaaatatggctggacataattgtaaattagggctgcaattgtgatcaaattttcagtctagggtgtaatgtagccttagagttaatttaattactgttctattttgacttatttcagagcctcttgggggcaaaaacaactgctcaccaatcttacattgatgggagcagaacttttctaagatactgttggtctccctggaaggggacagccacagccctgtttgttgaccagagtcttgagcattaaccattgtggcttaagagaatgaaaatgtacaagggtatgatgggatctatcctcttcctctctccatgctcctgactcaagaaaaggaaaagacttgcatctctcaaaaatgtttggaagaaagttctacccatcttctcttacactcattcaatcttatgcttgggaggaggaataacttgatgagattgagaaaatggttataatggataggcagcttaggccactcttggatcttgagttcgttccacacagcaagatgtgggaaagactgcagtccttcactacatggctgggtaaacatctgctttctagacccaactatctctccttggggtgggggaatcccaaagtcgttagacttatgatagaagttcatttcagcctcaggtccaagccatgttctccaatccagctctatcagctataaagctggtatctattttgattcttttttacagttttaatatataaattgttttttagaaaaataacacatgcctatggtaaaagtcaaacagtataaaagggtatactattaaaaagtaagtctctcttcctccttctcacccctggcctcagttccctggtcccattttcaaaaagtaacaactgttaccagttactgatgtatcattccagagatattccatgtatttacaagcatattgtgtgtgggtatgtgtgtatcaggttttttttttttttttacacaaatggtggcatactatacatgctgttctgaattttgcttttttcactgaacaatatattaaagctgatatcttaatccctaaaaaaaaaaaaaaaaaaaaa

SEQ ID NO: 784 - DNA, 1071 bp, Homo Sapiens
  NM_001010878
atgggtctcatggtgaggggtggggtcacctgcaggtcccaggaaaggctgctgggagtggggacagggacagcatcggcacagccaccagttacggcttctccttactgctccttcacaggcagaagccgagccgacgccccggcgcgggcggcaggaaatggccagcccaggcttcgggcgcaggtggacctcagctcggcctcgtcggtgctggtcactgtcctggacgccaaggctctgcccctgactctgctgtcctggggcagcttgtgcgcaactgcccaaaaccacaacaaccaggaaggtgcaccagcccaacccaaaggctccatggctaaccagagggcccttcgatttccacctccttcaggaagcccccctgggctgcacaccaggatgaggctgaccagtcctccccaaccacactttgagccccctcctcccacaacagtgggtgctcccaggtccctacagggggactggtttggcagtgattccagggccgtccgggcgctgaggctcataggctgggcttcccgaagccttcatccgttgcccggttcccgggatcgggcccaccctgccgccgaggaagaggacgaccctgaccgccccattgagttttcctccagcaaagccaaccctcaccgctggtcggtgggccataccatgggaaagggacatcagcggccctggtggaaggtgctgcccctcagctgcttcctcgtggcgctgatcatctggtgctacctgagggaggagagcgaggcggaccagtggttgagacaggaagggagccgacagccgcccttcggatttgatgtcacgtttgcccgtgactgtcctggctatgcgtgcgtcctcagcactgaaggacttggctggtggatggggcacttggctatgctgattcgcgtgaaggcggagcagaatctcagcagatcggaaactgctcctcgcctggctcttgatgtccaaggattccatcggcaagacttctcagatccttggggaaggtttcagttgcactgtatgctgttggatttgccaagtctttgtataacataa

SEQ ID NO: 785 - DNA, 2676 bp, Homo Sapiens
  NM_001010879
gggttctaagggtcggcggcggcggggttgacggctttgcctaggtccctccgcccgtagctgtcgggtcccggccccgctctgcccacagactccgatggctgcggccgcgctgagggccccgactcaggttactgtgtctccagaaacacatatggacctcacaaagggctgtgtgacctttgaggacatcgccatttacttctcacaggacgagtggggacttcttgatgaggctcagagactcctgtaccttgaagtgatgctggagaactttgcccttgtagcctcactgggttgtggccatggaacagaggatgaagagacaccttctgaccagaatgtttctgtaggagtgtcacagtcaaaggcaggttcatccacacagaagactcaatcctgtgagatgtgtgtcccagtcctgaaagatattttgcatctagctgatctccctgggcagaaaccatacttggttggagaatgtacaaaccatcaccagcaccagaagcatcacagtgcaaagaaatccttgaagagggacatggacagagcctcatatgtgaagtgctgcctattctgtatgtcattgaagccctttcgcaaatgggaggttggaaaggaccttccagccatgttgcggcttctgaggtccctggtctttcctggaggcaagaaacccggcacaattactgaatgtggggaggacattcgcagtcaaaaaagtcattacaagtcaggtgaatgtgggaaggcttccaggcacaaacacactcctgtttaccatccaagagtctacactggaaaaaagctttatgagtgtagcaaatgtgggaaagccttccgtggcaagtactcacttgttcagcaccagagagtccatactggagaaaggccttgggagtgcaatgaatgtggaaaattctttagccaaacctcccacctgaatgatcatcggagaatccacaccggagaaaggccttatgagtgcagcgaatgtggaaaattatttagacaaaactccagccttgttgaccaccagaaaatacacactggagcaaggccttatgagtgtagccagtgtgggaaatcctttagccaaaaagccacccttgttaaacaccaaagagttcacactggagaaaggccttataagtgtggtgaatgtgggaattcctttagtcaaagtgccattcttaatcaacaccgaagaattcacactggagcaaagccttatgagtgtggccagtgtgggaaatcctttagtcaaaaagctaccctcattaaacaccagagagttcacactggagaaaggccttataagtgtggtgactgtgggaaatcctttagtcaaagctccatccttattcaacaccggagaattcatactggagcaaggccttatgagtgtggccagtgtggaaagtcctttagccaaaagtctggtctcattcaacaccaagtggttcacactggagaaaggccttatgagtgcaacaaatgtgggaattcctttagccaatgctccagcctcatacatcaccaaaaatgtcataacacatagaggcctcatgaatgcagcaaatgtggaagcgccttcaactcaagatctatcatcatttagctcctgaaagtccacacttaagtagagccttagacctacagggaaagtgctgtctctgtagtattgtagcagtagagagcctttgtgagggagccatctgcctgaagttgaacctcattcttccttgtttctctggtagaaaccatctaccctctaccaccttgcacagtgggcactggtcactcctatgtgctaagacaaggcagacatctgtgtgttctcttaagtctttggaggaaatcttgagcagtctaagcctttagagaaaattcattcttttttctgactgatcacagcatacgtgtgacccagtttgggtcaggagggcccagccttggttctgctggacacttatgtgcaaggattcccttcatgtaaattcttggtctcacatgacacttggtcattcttccagcctccatgtcaccacgtggtgaatggctgcctcacattgctccagtttgtgcactaataaaagccttatatttgaatctacctgtagtcttggggttctgtttactgtgtggggtggctgggagacagacttcaactctatatgaaggaatggatggcttttgtgggcctctgcaggaaagtaagatgacagagtaattctaattctggttttggtcatacttgctttgctacctaaaatctcctaggaaaaaatgcaaggttttggttattctaatttgtggcctggatccctattctttctgtgagactagaggtcatcctgaggagaggccagctgttatgacaagcatgtgtgcttcagggaataggacaattttattccattgtttccagaggatgtcatatgatgcccagtgctgctgagaagcttttcatggggttctataaggaggcatgccctgatatcaaacattccataggccgatgtcacgcagaagacaacgcgagtcacatgtgaactgtaattggtacagaaatacctgggtatttctgtactgtgtgtactgtagcaaactagttggaatgtgcctcttataaaagtacatttacaaatcttcccgtgactgtggctttgagca

SEQ ID NO: 786 - DNA, 7273 bp, Homo Sapiens
  NM_001010888
catgtggattccaagcaggctaaaaagaaaaagaactgattagacctcagacgacccactaaacgggatgacggccacagctgaggtagagacaccaaaaatggagaagagtgcctccaaggaagagaagcagcagcctaagcaggacagcacagagcagggcaatgctgattctgaagagtggatgagctctgagagtgaccctgaacagataagccttaagagtagcgacaacagcaagagctgccaacctagggatggtcagttgaagaaaaaggagatgcactccaagccacaccgccagctctgtcgatcaccctgcctagatcgtccaagtttctcccagagcagcattttacaggatggtaaacttgacttggagaaggaataccaagctaagatggagtttgcgctaaagctgggctatgcagaggaacagattcaatcagtgctaaacaagctgggcccagaatcacttattaatgatgtattggcagagcttgtcagacttgggaacaaaggtgattcagaagggcagatcaacttgagtctgttagtgcctcgtgggcccagctccagagagattgcaagccctgaattgtctcttgaagatgaaatagataacagtgacaatttgaggccagttgtcattgatggaagtaatgtggcaatgagccatgggaataaagaagaattctcctgcagaggaatacaacttgctgtggattggtttctagataaaggccataaagatattactgtatttgtgcctgcatggagaaaggagcaatcccgccctgatgcaccaattacagatcaagatattctacgaaaactggagaaggaaaagattcttgtcttcacaccatcccgaagagtccaaggcaggagggttgtctgctatgatgaccggttcatagtcaaactggcttttgattctgatggcatcattgtgtccaatgataactaccgagaccttcaagttgaaaagccagaatggaagaagtttatagaggagcggttgctgatgtattcttttgtgaatgacaaatttatgcctccagatgatccattaggacgccacggcccaagccttgaaaatttcttaagaaagagacccattgttcctgagcataagaagcaaccatgtccttatggcaaaaaatgcacctacggccacaagtgcaaatactaccatccggagcgggccaaccaaccccagcgttcggtggctgatgagctccgcatcagtgccaaactgtccacagtgaaaactatgagtgaaggcaccctggccaagtgtggcacagggatgtctagtgccaaaggtgagataacctcagaggtcaaacgtgtggcccccaagcgccaatcagatcccagcatccggtctgtggctatggagcctgaggaatggctgtccattgcccgtaagcctgaggctagttctgtcccctcgcttgtgactgccctaagtgttcccacaatcccaccccccaaaagccatgcagtgggtgcactcaacacccgttcggccagcagcccagtgccaggatcctcccatttcccccaccagaaggcctctttggagcatatggccagcatgcagtatcctcccatcttggttaccaacagccatgggacccctattagctatgctgagcaatacccaaagtttgaatccatgggggaccatggctactattcaatgttaggtgacttctccaaactgaacatcaacagcatgcataaccgagagtattacatggctgaagtagaccggggggtgtatgcccggaatcctaacctctgttctgacagccgtgtgagccataccaggaatgacaactattcctcttacaacaacgtgtatttggctgtagctgatacccatcctgaaggcaatttgaagctgcaccgctcagcatcccagaaccgacttcagccttttcctcatggttaccatgaagccttaacacgagtgcagagctatggcccagaggattctaagcaaggcccccacaaacagtcagtcccccacttagctctgcatgcccagcacccatcaactggaacacgttccagctgtcctgcagactaccccatgcctcccaatatccatcctggggcaaccccccagccaggccgtgccctggtgatgactcggatggatagcatttccgactcccgcctctatgagagcaaccccgtgaggcaaagacgacctcccctgtgccgggaacagcatgccagctgggacccgctgccctgtacaactgactcctatggctaccactcctatcccttgagtaacagcctcatgcaaccatgttatgagccagtcatggtacggagcgtgcctgaaaagatggagcagctttggaggaatccttgggttggaatgtgcaatgattccagggagcatatgatcccagaacaccagtatcagacctacaagaacctctgcaatattttcccttctaacatcgtccttgcagtgatggagaagaatccccacacagcagatgcccagcaactggcagccttgattgttgctaagcttagggctgcacgttgatatgacatagtacttatttctttatacaaatatgaatattaatactaataatacactaatacaataattatagtaactaataatttgtgttgcgctttacaagttagagtgtttatatcatttaagcgcttaacaaccctgtgaggtacgtcttactaacatcctcttttatagagaaggaaggtgaaggtcagtgaaattaagtggctagccagggtcacactgctagcaaatgactaagtcaagacacacacccaagtcctctaaatccaagtcccatgcccctttgcactgcaccatgcaggtaatggaggacaaaacccagggggagaggtctagatgtaagaaatcccagaggattccattaccagagttttcctttttctcttttcgtttctttctttctttctttattttttttttttgagacagaatctcactctgttacacaggctggagtgcagtggcactatctctgctcactgcaacctccacctccagggttcaagtgattctatggcctcagcctcccaggtagctgggattacaggcgtgcaccaccatgcccagctaatttttgtatttttagtagagacgtggtttcaccgtgttggccaggctggtctcaaactcctggcctcaagtgatccgcccaccttggcctcctaaagtgctgggattacaggtgtgagccactgcgcccagcctaccagagttttcgtagtcacatattctatattacaaagtatggatgatatatccaatttagagagcaaaagcatcaggatcagatcatatgttgaattaaccttttaggttttttctaatagaaatatttaaagctatttaaaagtaaatgcatactttattgcatggatatctgatcactcaatctatattaatgaaactatagggtcacattgaagcttctagaactatattttaaagctattattagcaattatattgcatgtatgaatatatatatttggtttgagatgtgtgtgtatctctgtataaccttttatatagtgataatgagagggtaggctctacacagtccttcgtctatagctgtataggtcactaatctgacttgatgattttaagtcacatttcatagttttaactagttatgagagagaaattatatggcaatatttgaacattgctttcttaggcaccagagcaaagcaactctgtttcctttgcacattttacctgccaacatttattaacagttcttaccttccaagtctcttcaccttagcaaattagggatcaggttgcagtcttctgcagagaaactgatggttaagctcaagttccaagcatagtatgtgtgtgctacacaagctcagaagagtttgacaaggaccaggggacttactaccacaatccacttcccttatcccaggagagatggccaaacccatgtggcattaaatggtgaataaaaaagcttcactcaaggagggactattggatgctctttggacttctgacctatgcagtattcaacatcattggatgaaatgtaatggaggacagtgcacagccatgtatccactttctcttcctgtccaccctttgggtaataaggtcaatcattggtggaacagaatttctctaggaaacaaaaccaggggattttatttgtggaaaaaggaagtttccaaaaggggatactgcatctttactaatagctggctcagttactcactttaaatccatgcaaagagtgcacttgctgttaaataattgttaaatgagttattagaaggcaggacttttggtttgggcgacaccatttgcgcaacttgtatcttgctcagggtggaaaacttcatagctaaatgcctctagaagaggtgtttattgttttttttaagctgcactaaatgaattccctttttgaatccattgtatatttcaatatttcgaaccatgatcagctcactatttcctgagctggaacttgctaacttctatgatcgttttttcatgaaagttgagaaggccgggccttggccttttgtttcttcatgagaaggtgtgacactgcctataaatgtttcttactgtgaaacactctgaatgtgaggctgtagtcagggttgtttctggtggtttgacaatggcttgcatgctgctttctggctttctgtctctgtccaagttgatcaatactgcatcttaaccaatgtttcacttgagttaaccacagctttacattctatctcctatcttctgatcttcgtataccccagcatattgaaaaagagtaaaagtattttctatcaatcaggtagatccacagagtgacagttgccactgcagtgcttgctatttcacacaaacaccatttcataccttcaacttcttggactttctaaatcggactcgtgtctaaatcagggtatttgacaatctcagatgatgctactgcctatgtgccagttagttcatcttcctaccaagatcatgaatggcaccacactatccactagctgtacaatttacagagaagcacaagattcatcttgtcacctacaattcgtcttgaacatgttcatatttagtactcagaaactgtgtaagctcctcccaatacagaaaatattttttaaggcagcatatgtatttctgatttactaaaaacgattgtcattctcctctcattcttctttttggtatgaaccaaaagcggctaggagcaatgcctcaaataaccagaaatgaccttttgttgatacaaattgtatctctttttttcctgattgtatagaaacaaatgtacaaaactcatctgaagctaggtttggcactgaattttcaccatgaggtttgtggcactgtgtgtcacagggaagtagctcaggggttgtgagggagcttttatttctaaagggcagtagtaatttatagacaaaaacaatttttcaaggcctctttattaccactgcacagctatcatgtgtaaaatttcaagcattatattgcataagttctctttagcctattaaatttaatatgtccttgcaaaagggattttgtgtaaaaagtgtcagtgttagtgactcatctgcaagaatctacaaatggagctatacaactatgaatacataaatacagcatggttcctagttattagagaaacattttctttatattgaggtctacgcacttcttgactttccattttgtctgtaattataaaacagcaaataacaaagaagcattgggaccccctcggctgccttgataataaaatcaagcttccttcatgggactaagcatgtgtccttcaggatacttacctctaagcactcagcaggggttactacaaagcgttttgtgtggttttcaaaaaacagtgtattttgcaagaggtgctttgtaattttaattatttcactgattttctgacctcataggaagtctgtgcctgttgaggccttcaattttgtagcttttctgattttttttcttctttttgtgattttgttgttgttttcattttgatctaaaggagaagtgtgaccccggagtggcatggtcaatccagggcaccctttctgtaagacaactcaaaggaaaagaagccttttcaaaggtaatatcgagccattgcactctctcttaaggtgccaggtatgggagaatgacagatgccttatggaaatggtctacaaaacttttcttcttctaagtaataaaacacatagcatgattctctctccctctctctctctctctctgcccaccccctgctagtttccaggagaatacttctctaaaattcatttttttctattttggaataaattatctttatacagtaattcaaacactgatttccattaacctttggccctgagttttcttctaacatagaagagttcattttgagaggcactcagttaccattcaatctgtgctgtaagtatgggactttgtacaaatgccctttttgagggccaaaaatttcaatacactttgttctactttgtgaaccaggtctggatctgcacagagaaagtaatgctgagctgtccaaagagtccgctcaggtctccctcctaaccctcctctgccttcccctagtttgcttatcctcacgtctgacactgaggagtgcatagtcttcaactgaaatggcactacagttagttctcattggaaacaaacaagtgtatttctggaacctgctcgtctaaaatagtcaatgcctttgtaaagactcagcatattcaatatctattgtatggtagctagctatatacatagattgactatttttagtcctggtttgtgtattgttgagctatagtagtttgctttatccatttgtgggattaaacaatactgtttaatggttgtaaacttttataaaatctctttgggttttttgtttgacccaaacataatgtaagtcttaatgacaaaatacacaaagttaaccagaggtgagtgaaaatatagcccttccccagttttgtctgcccctataatgcacgtgcattgctttgtaatatgctctcgctagcatgaatgtgctatgactacttcatgaggttttgtttcacctataattgtgatggaaaatgctgtattgctgacaacaatgaactgtaaccacagttatttactgcataaactatttgtgtactaaccaaaaaaaaaaaaaaaaaa

SEQ ID NO: 787 - DNA, 7863 bp, Homo Sapiens
  NM_001010891
gggatagtaaaggtcggcccgcgcaagatggcggcccccttggaactcagttgctggggaggcggctggggactcccatcggttcacagcgagtccctggtggtgatggcttatgccaaattttctggtgcacccttgaaagtcaatgtgatagataacacctggagaggttcaagaggcgatgtaccaattttgacaactgaagacgacatggtttctcagccagcaaaaatactaaactttttaagaaaacagaaatataatgctgattatgaactctcagcaaaacaaggggcagatacattggcttatattgctctcctcgaagagaagcttctccctgcagtgcttcacacattctgggttgagagtgacaattactttactgtgacaaagccatggtttgcttcacaaattccttttcctttgagtttgatcctgcctggaagaatgtctaagggagcactgaataggattctcctgaccagaggacagcctcccctctaccacctccgagaagtggaagcacagatatacagagatgccaaggagtgcctaaatcttctatcaaacagattgggaacatctcagtttttctttggagatacgccttctaccttggatgcctatgtttttggttttcttgcacctctttacaaagtacggtttcctaaagttcagctacaagaacatctgaaacagctctccaacctctgtcgcttttgtgatgacatcctgagcagttattttaggcttagtcttggagatggatgacaatcttcgccaaagccctcagcttcctcctcggaaactgccaacacttaaattgactccagcagaagaagaaaataattccttccaacggctttcgccctgagagtagtcatggtttgtggccaaagtcaaacgattgttgcagtaatctcttacaccaagtgtgtgaaggcaaaaagaagataccataataggtattaaggaagactctaaaccaaaaggaactttctatgccatctatttttactattattattaggaagcttgtattctagcttggcactgcatttttaataacaaagagaatgctaaatgaacttggttgggggggcggggaagaaaaacacatcgtactgtatacaaagaactgccttaatcatggcagatttttgcctttggttcacatgttgctgaccaaaggctacaattctgttctgaatgtgcactcctaatttatttgatttaatttattcaatttattaacttagttttcttagaccaggctgaatacctaatatgtggctttttggctgaggctttttacttctgtttagaaatttgatgcctattttaggaaccagaaaaagataaattgcttcagtagaagagaccatatttaactttaaaaagtgaggaggaatgtgctttttaattatgctctcataagtctaatcttttgggggtttagtagcacatagataaatattaaaggtggttacatataataacatctgataatactcatttcagtataacattggtctttgctgatgtgttcgatataggttaggaagagttcttttagtttacttgggcaaatgtggcagttttagacctatgtctttgtagtacatcttcagttgtctttcttgtattaattccagaagaagtgaatgtactggttatcgttactatgctaggctgtaaaattcttactgaaattgcccacttgttagacactactcaggaggagcccatggccagggtagtagaaatactgtgcatctggtccaagttttctatgcttggctcatattctttcataagatgcatattctttcataagatgcatatcatgtagtcaaaagctttctgacaaccaattatttttcatatgtttcacttatagtcgaagaatacaaaggaacaatcagaaatagcagcttttaatgaatattttctatttattggttgctgaactgttaagggatttgctgtgtggtaattttacttataatagaaacttgcttattttagtggttgaggtgcttctgttgtcctaaaactacttctgaggtttttaaaatgtagaaccatgtttttgattagtgtcttaaaagattactgtggtgctcagcaaatcttatcaagtcgtgcaggaacccatatgttaagaaaatgagctttgtagtcaaaagactcatctaatttgagctgagtggagctcagctgtgtttgacccacatcctcccaatttgttctgtatttaggtagttatttatacaagagtctttaagtcattctaaatattttttcttgaaagttttaactaagtgagaaataaggtagtcttcaaaatcttggtcatctgtttggatgagggaaagtacctcatgagttgcacattacttctacaacagggtgtgtgtgtgtgtgtttgtgtgtgtcagtcatcttcaaaggcagattattagattccagcaatctgaaatctattattccagcagtctgaaacctaaatatgttatattggaaatcatgactgtgagactttattgtcctctaggatggatgtatattggagaagggtggttagcacattcatcagacatctgcttatgctgtggtcaaggccagtcatttttaatttatatcagatttatatcagaccctccaaaaagtatttgaaatatattacagttataacgtacaagtacattacatgtatattacaagtatattacatgtaaaacaggacaatttaaaaattttaaattttaaagaattaaaaattttaaaaatttaaattaaaaaaattaaaaatttatagaaccatatcaacactgacagattctaaaattaagtagtaaatttaactccaagtttctccatgggcaaagtcaaaagataatgctaggttatgtcaatttttcttttcaacaaaactgctaatgtctattaggaagaaaaatgtgtttaaagttttacaggaacgtggagctcatgttcttctgatatgtagactttgataaagaagcatactgtaatgttttatgaactgaaattttaatcaaaagaggtcattttagaataacaagtattattcttttttagtagagggaatgactgtcaatatgatttatttgtttttgtgtcatccctactttgaactgctgttagccttacattctcactatagtccataatgcttccagatcaccttttctaagatgcaacatgtgagtttagtgagagtttatatgttgggttacttagttgagctatttatgtataagtaaatgagatgacaggaagctgtaactgagcacaaagtactttagggagcagccacacatacaggaagctcttagaaaagaacttttttttttttttgagacagagtttcactcttgttgcccaggctggagtgcagtagcgcagtctcggctcactgcaacctctacctcctgggttcaagcaagtctcctgtctcagcctcccaagtagctgggattacaggcatgtgccaccatgcccagctaattttgttttttttttagtcgagacggggtttcaccatgttgctcaggctggtcttgaactcctgacctcaagtgattcacctgcctcggcctcccaaagtgctgggattacaggcgtgagccactgcgcccggccaaaaagaacattttgtcaatctgaacagagcacagaacattttttcagactgaacagactgttggaccagcctgtcatgatatgttttagataaagtttgagtgagttcattgggataaatggtccacaatcttaaacagaatactgtgagccaatgccttttggaagtaatggtggaggataatatgattaaagggaacatgcttgtgtttatttttgttggtagtatatgattagaaaaactagataattcccataagatgaagatcttccatgaacaaactaccatcaatcatccatcagattgattttttttttttttttaagtaacactaaagaagctgtaaagaacattgaaggtggtcattccttcaaaactgtgttttgaccacacaaggtgggcattaacaaaccaaatttcaacttaagtttgtttgtattatattgggggtgctgcgagactggagattttataaaagcaagcatttttatttccatttataatttctattcaatattgctagatatattaacatgaaggaatggggaagcttatttcaatcaaagctaaaattttcagaagtctgtaaaaatggaaaaacaccattgaaagaggcagaaacaggtaagggggatagtatcttagaaaacctgttggttaaggcagctgcatgtgataaaagtggtacttgaacttggtagtgtttccttagaacctcctccaaaaatatgcatttaccaggcttgttacaattttttgacagtttttcatcaactgtcaaaaacttcaacccttttaaaacctagatataaatgcttacatgtaaagaaaggaagctaagcagtgggtacctgggatctctctgaactatttttataacttcttgtgagtcttaagtatttcaaaataaaagtggttttaaagtaaattcatagattaaatgtatcattatctatatataaaccatgatttaaaactttaattttctaaacatagtattcaacttagttgaataaatatatgatagaagttaaatagaatttttatttcattcttaagaaaaactcatgtttgtaacaaatgatatctaaagatctattttgccttaccagaaaagaaaaaaaaaaccctaaaaccaaaaactccttttccctaggaagtcaaaaatgctgtgatttaaaatatctaattatatttttttctttctatggtagtggggtttacttctgaggataaaatattttgaaaaagctctgtcccttgacatggtagttctcccgtgccttgtacttgttctctctccatatgcacagtgtgacaagatgctcacctttaatgaagaaggtgtagcttttcgttttaagctgtaattgtctttgtcttgatttggctatttttataactgaaatcctgagcaacagagataatttgggtggtaatgatcatcttttgtatatgttcttgatgttaagaaatattttttgctgccattcagctttgtggaatttatgtttacttttcaatattttcatatttcttaaccagattttaaagaaatttgttgttagttacgtgaaatcaaaggtcaggtcagtaagcccattatcctcaaacttgaagtttcgttggatgttcaaaatgctaatttttgcagagatataaggataaattagttttagtttgtgttcttaagggtttgcaaaataatttggctcccaaactcttgttggggtgtagtgtttgctaggagcccaggatacctgccctggacttaaattgtgattgaagtggagaggtactctaggaatttaaaaagacacaaaattatttttttccagactagtgtgccatggatttctgataagaattaacattcttgaacaaaggtatcagaaagggtaactcgagttgaaggtttgtgaatagaaggggaaatgtgatagaagattattcagaacaaaataagtagacaaaataacaaaagacaggaaaataagtctctttgtatccttattaatcatttgaaattatgctataatattttttaaaactcacctgtttggttctgggtgaagcagttcctgaaggagtgttttgtcagaatatattgttaggagaatagagggttctgtggccaagtaagtttgggaaatagtgggttagacaaagttgagttactgttggcctttcagacctttgatacgctaatgtgcattttaaatctccaagaagcacctctattttatacatcatttccctaatttattttaatatggatttcttgtttttgttttcttgagacggagtcttggtcttgtcacccaggctggagtgcagtggcacgatctcggctcactacaacctccgcctcccaggttcaagcgattctcctgcctcagcctcccaatttactgggattacaggcacctgccaccacgcccagctaatttttgtatttttagtagagatggggtttcaccatgttgaccaggctgattttgaactcctgacctcaggtgattctgcccgcctcaccctcccacagtgctggaattataggtatgagccactgtccccggccagatttttttaaaagtaggtatcttgtgggatttatgttctgagagatacacctaaggaaatgctgccctacagtgtttttgctagttcatactcattacaaaggtttcttgttgttgggtgcccctctagccagtggtagtaaaatgggaagagacaggtcaagactcccttggaccatggcattgagagagggatggctgtcggcatagatatgttggttatttaggcatttgtgagggaggcccctggctcttccagcctgtttccttaggatcccagttggccgggaacagctgtacaagggtctgctgaactggtggtttcagcagactacccagttcctaagcatccatgagacagagggaaccaacttgtatttccagaacaattttccaaaccttttctggctgtactttaaaagtgccaaaaaggcaatgggtgtttatgacactaaagtcacatacaagctagtatgatacatacatcatagaaagcttatagttgctcagtgacaaagcaaaggaagtttaatattttccagttttgttcattaccgaagacagtctacggttcatagttttcactaaattctaagcagattctatatcctaaaacatttaaacctcactaggcctgcaattttgagagggttagctaaatatgtttggtatcacttcagagtctaaaaccagattactaatcgtgtgtaaggaggcattttgtgtgtctttgcaatgtatacaattggattatttggaacaccattttgaatgtgtatttgagagaaagctcgcctgtgggttttgagttgtggtgtaatggtgaacatgtagccacgtgaaaggccgttggatctttgttctgattcttcagtcgtcttcttgcaaattcagagaaatgtcttttaatcatttcgtttacatatcccagatccttggaaatcatgaaaaataacttgccagagtttgcatcagccctcagtaagtcatgaaccatagagaaggtcatggggccatttattctttggaccactggctacttctgaagttctggcttccttctctctaggaggagtcgtgtattcaagcttttaagttaaatgcataaaaatgagttttacttctcttctgacttgatttttaattttatgaaatgggaaataatgtttttccatttttctgttcattttgaagtgggaatttgaggtgtttgtaatgtcatgttactgttctgaaagattgacagtaaagaagacaagaaatatatgtatgtagtatgcatattagttttgtcccaccaagcctatctttgaatggcaaacattttaaaaacatctgttctagttgcacaactactctagcttctttataaagtaaacaatcttaaagtaagcaatgttggccataatttcaatattctagccttgccgagtgtgaatatattttactcagagactatgtacaaatacactaaagtggtgatggtgatcaatattgtaaagaatttattctgataaatgagaaactggatataatgtcaaaatagctattttctcaataaaaatctcaaatctcctgactgcttatgaaaaaaaaaaaaaaaaaaaa

SEQ ID NO: 788 - DNA, 2894 bp, Homo Sapiens
  NM_001010917
cggggtcagcaccgcggagacccccctcgcccggccccgcgacagcctccgagcgcccccggatcatggccaccgaggtccacaatctgcaggagctccggcgaagtgcctcactggccaccaaggtctttatccagagagactacagcgatgggaccatctgtcagttccagaccaaattccccccagagctggacagccggatcgagcggcagctctttgaagagactgtgaagaccctcaacggattttacgcagaggctgagaagattgggggcagctcctacctcgagggctgcctggcctgcgccacggcctacttcatcttcctctgcatggagacccactatgagaaggttctcaagaagatttcccgctacatccaggagcagaatgagaagatctttgcacctcgaggcctcctacttacagaccctgtggagcgtgggatgagggttattgagatctccatctacgaggaccggtgcagcagtggcagctccagcagcggcagcagcagcggcagtggcagcagcagcggtgggggtggtggggcgggggcccggtgactggccgagagtccctgtagggaggtgtatggccggagtgagggccttgcagacctgcggcggctgcgctaccagagcacccgcttctgagtcattctttgggctcaccctgctgcccggggtgggagggagggtgacgggcctcatatttcctgtgggccatcaacctatgccccctgtccctcacccccgtctggatcagtccatttcctgacctgggggcttttccttcccgatggggctggtctgggccacacagagacagatcttcctaggaaggctggggtggggagaacacaacctaggcggcccctctcttccacagcccctctcccaaccctgcgaggggggccgaggcctgccacatagaggactcccacactgcatgacccctcatcccaaacccatatccaccaggactctttcccttgggccctgcgtcccgtggctgtctcccagtatctgttccttctcatgcccctgcagggccccggcctgtctatgatcctgcctccaccaaattcaaggtgtggggagacgggtgccgtggttgggagctgttcagcgcactcctgacctcttctagacctatggctttcctgtcctgcattcagagctagaggccagctcggccttgcgagaagcatccaactttgagactttgcaggctgccaggtgctggttggggggcacagagcctggggctctgggaggtaatatgggggtctgggaaactccgtgaagagacatagccatgcggggcctgaatctcctgaactacagccagtttcctgagattagaacctgtgtgtatgcacatgtgaatgtatgtgtgagtgcacatgtgtgtaagtgcagtgtgcgtaaatgtgtgagtctgcgtgtgttagcatgcctgtatgtgagcgcgtgtgtgagcgcatgtgtgtgcaccagtgcacaagtgtatgaatgtggacacatttataagcacacctgtgtgtgtctgagtacatgtgcacacacgtgtgcacaaatgtgcatttatatgagtgtgagtgcatgcatgtgcatgaacatgtgtgcacaagcatgtgtgtatgagtgttcatgtgtatgagtgtgtgtgtatgcaggtgagtgcatgtgtgtgtgagtgtgtttgtgtgttccccttggctgccaggccaacgactgcttctctgcatcctgctgtcttcgctacctgagggtctgtgacttcttccctgtgtgggtccagcctgaccccctgtaagtaaatgtccaaaagccccttgcccctcccctagggctaccagggaacatactctactgcatatgttctagtggaagagaagccggggttctaggaaagaagagccaaactttggtggcctttggtgccccctctcagctccccatgacaagacaacggggctgcagacactgtgtgttcagcctgcccaggggctggggctctttaaggctttgtaggtgaggtttccatggaccttcaaaggtgccagcagcctgcaggggaaaggcaaactccctccttgcaaggaaaggagatgtccagccaatgatgcccggcttctgaggcccagaggagcaggtgggatgggagcagcccctggggctggtgtcccgaagatgaaatgaagggggctgcctatctcagttggcgggaggtgttagaagtggatgtgcaagaccagccactggaggtagctctctggagtcaaagagaggcctgcttttctaccagacatgggagcagcatgtaggatacaagggcctacccagagaccagagagagtcagcctagtccttgcagcctcaggaagtcctcggcccaagtgagtcctggtccaaggatccccctggagagccgcagttcagtgggctccaccgcagcccctggccacggcctatgccctccctgggcccctgtggggctgggcattgtgtctgacctgtgcatctcccatgggagggctgggcacaggcagtgctatggccttttttttttttttctttttccaataaaagaacttgcccagcgtgaagctctgtgatgctttctctgccccgtgacgatggagggtcagttctatgctccaggaccacatgaggggatactcagctgcctgaactggacctgacatggggagcaggatgaactctgtcttcttggagcttgcagtctactgaagaggcagacacctcagcatctctaatctggaatctttggggcacttgtagccttgggtgggggaacaggttggactgaaagcgaggccaaaagtaatcaattaatgatatcaataaatcctcatttcttga

SEQ ID NO: 789 - DNA, 4986 bp, Homo Sapiens
  NM_001010922
cctttctgagcagctgtgtttgaagaaagctagtgggaaaagttccaggattacatgtcaggaaactacaagaggtagaaacatttgttgatttaccagtgtttttaacttcctgctgggctgaaaactgcttgtttcgtggaaaagcaaaacttgacagcaaacatctaaaatgaagagctcccaaacttttgaggaacaaacggaatgcattgtgaacactctactcatggacttcttgagcccaacattgcaggttgccagccggaacctatgctgtgtagatgaagtagattcaggagagccttgttcttttgatgtggctatcattgctggtcgccttcggatgttgggtgaccagttcaacggagaattggaagcttctgccaaaaacgtcattgcagaaaccattaagggacagacaggagctatactccaggacactgtggaatctctcagcaagacctggtgtgctcaggattccagcttagcttatgagagagcttttctggcagtgtcagtgaaacttcttgagtacatggctcacattgctcctgaagtagtgggacaggtggctatccccatgacgggtatgatcaatgggaaccaagccatccgggagttcatccagggccagggaggttgggaaaatctggagagctgaagagttggagctattcacgagactgaacatcacttccttgttgactgattgggtgattgattcctgggaattcaaacaaacaaataaaaaagcacttttttcattttatcagaactgaacttagctgaataagttattttttactgattgttaaagttgggagcagctgccagaggcctgcagagttggtttttgttttgttttgttttgtcaacttaatgcaaaccacagagattttctactttctgttttcacatgagttttaatgaggttctgttgaagcaaagacccctagacacaaagtaatgacttgttagtagtggaattataagcaacagggcaggcctttgctggaggtattttgagagaaagggagaacaatggaaactatttcttcagatgtagccctgtcttttggtaagaattgtgcctactaattttgcaatttaaaggatttcaggaagctttttggttgaaaaatcttgtttttttttttttagacgtagtctcactctgtcacccaggctggagtgcagtggtgcgatctcagctcactgcaagctccacctcccggtttcactccattctcctgcctcagcctcctgagtagctgggactacaggagcccgccatcacgcccggctaattttttgtatttttagtagagatgaggtttcgccgtgttagccaggatggtctggatctcctgacctcgtgattcgcccgccttggcctcccaaagtgctgggattacaggcgtgagccaccacgcccggcctaaaatcttgttattttaagttgagcattttcattcaaaatcatccctaaacttcatgttaatttcacctgagaaggactattttatgcattttagaggttggaagcaaaaaacaaacaaacaaacaaaaacagttgtttctactaggaaggtcaaagaaaataaaagttactccatttttactgccacaggatgcaggaagtgctggcccacatctaggacagcaaggccaccccagcttagatgaagctagctgcataacacaaagctttaaaagtgtggttcacacaccacttgtggaccttattgaattgctgattcgcattcctagagattctgattctgtaggggtaggctggagcctaggaacctaccttttaaactagttccataggtgattctgatgtacatatagagtgtgacagccatcactatagagaatagattgataaattacaacccacgcgtcaaatctggcttgctgtcttattttgtaaataaagttttattggaatagagcaacattcacttgtttacatattgtccatggccgcttttgtgctacaatggcagagttgaatgattatagaagaccatatggctggttaagtccaaaatatttactagctggccctttacagaaaaagttggctgaccccttctctaaatcaacatttctccttggtaactgaaactctattacagtcctgacaattccagcaaacacagctgtagatagggtttaaactcaaagatatttaactcttctttgggaacttagtctccatatgtttgttagttcttgcataatccacagtttctctgggtcttcagccaatcagagagctctgtagctcctgagtagtccatttctctggccctacaagtgagagtgattggaagcaaagcttatgatttgtatgatcttgtatctcaaaatagtccttaatgatctaatagattagtaggcagtcatcaggtagagactccaaaaaccagactactttcctaaatatcaagaagaaaggcattgctacagtgattcatgaaaagcagcattaataactttggctaaagtttaacaaagctaaccacttcccctctatcagccagccatctatgtatctcctctaaatgcagagaagtaaatatgtagtgctgttaatacatttttgctttttaaagttatgctttgtcctggcgcagtggctcatgcctgtaatcccagcactttgggaggccaaggcgggtggatcacctgaggttaggagtttgagaccagcctggccaacatggtgaaaccctgtctctgctaaaaatacaaaaaattagccaggcttggtggcacgtgcctgtaatgccagctactcaggaggctgaggcaggagaatcacttgaacctgggaggcggaggttgctgtgagctgagttcgcgccattgcactccagcctgggctacaaaagcgaaactgtctaaaaaaaaaaaaagaaaataaataaagttatgctttttcctctattcctagttaaatcacaacaagttagtaatccataaatgatgtgtcctgtttctctttagtagaaattatatttttggctaccagttaagaaacttgtactcctttgtcccttatgttactataaactcaagatgatgagttttgtggtatttgacttcataggcaaaatcaaaatttttactttgttgctattctgttttatgaaataaacttctgtctatgcatttgaactaagtttcagcaaattcaatctaaattgaataattccagctcccagttttatcctatgttgctcataaaacagttccaagtatactgcattatcttgagatttgaagatatggtgcccacggggattatactaggcaaatgcgttaagcagctctggcctaggtgttgtgtattttaagagactctatcttaggagagcttaagtgattgggctgcaggaagaagacattgtaacccaggaattaaaaatggattcagattgcctgattttaacactttagtttcaccataggctaattatgtgacattgggcaagagacataattcttctgtaccttagtttctacatttgtaaaatagagatgatttggtaacttattaataagatttttgtgagagataaataaaacaaatacattttgtaaagggtgagtacttggaatattttaaacactgtgccattagcaatttggaattctgtgttatgcagttcataaggttctagcttgacttttttctctctccattaaccctgtctctcacagatgcaaaccactcttaatggctttactttcacatcaatgtgagtgattcctaaatatgatttatttcccttctcaattccatacccacagatgcttattatttatttatgtgtacctttcttatccccatactctccctgtttgcgatacaactagctcaaaacctcagtcatttttaccttgtctctctctctccagtccaactcacccaactagtttttctcatttgttacttcatttttgtcctggttcttctaccagatttattagcaactgcctggactattaataaagcctcctacttaggctttcaatagattgttctgttcctgctccattccagtctgtcctatatactgccatcagattgatcaaagctgtggtttctttgtctattattttgattcatttttagatatggtatcattcatttttaaatttaacataccaatgaagattacaagacttaaacatcttatcagaagggggcatttattttttaaatcaagaaataactttccaaaagcattgctttgaatgccattctcttaaagtccttcagtggaacttttgagtgtgattagacatgttcattatcttgattgtagtgattttatgggtgatgatttcacaccaacttatcaaactgcatactttgaaatgtgtagtttattgtacatcagcactaccttaataaggttgttttttttaaaaaaaaaaaaaaaaccttcagctgctccctactgttcatcaaataacagtctgatattcaaattcccccagtatctggccctaactgccctatatagccttaatcaatcatgattctcctctacaatcccaatgctctagtataaccgagccagtcactaaagctgccctcctcctactgttccctatgtttcatattcctttttctgaggctctacctgtagacatcttcaagacccaacccaactgtcatgaagccttctccatgaaggctatccatataaccagaataagaagtggtctttgcctccttgaacttttgtttgtaccacttttatgtttcttatccaaaaaatggccttaagttgtaattatctgtatagtcatcttccccactaggataaaggattgctgaatgatacaatttgttgtatacttctgtaacacccctcctcttcattatctggcatgtacatcgatattaaaaatattcattaaatgaatgaatagctgattgactcagaaaaaaaaaaaaaa

SEQ ID NO: 790 - DNA, 3866 bp, Homo Sapiens
  NM_001010923
agctactccaccccactctggctgtagtgtgacattcctgcctgcctgaggaagaaatggtgagcaggggctgcaattgcagacaagtgtcacccagaagccacaagtttctgtgagcaccaggtctacaaactacccaaggcatagcaatggcattatcactggaagaattcgtccactcccttgacctcaggaccctacccagggttctagaaatccaggcaggcatctatcttgaaggctctatttatgaaatgtttggaaatgaatgctgtttttcaacaggagaagtgattaaaattactggtctcaaagttaagaagatcatagctgaaatttgtgagcagattgaaggttgtgagtctctacagccatttgaactgcctatgaattttccaggtctttttaagattgtggctgataaaactccataccttactatggaagaaatcacaaggaccattcatattggaccaagtagactagggcatccttgcttctatcatcagaaggatataaaactagagaacctcatcataaagcagggtgagcaaatcatgctcaactcagttgaagagattgatggagaaataatggtgagctgtgcagtagcaaggaatcatcaaactcactcatttaatttgcctttgtcacaagaaggagaattctacgagtgtgaagatgaacgtatttacactctaaaggagattgttgaatggaagattcctaagaacagaacaagaactgtaaaccttacagatttttcaaataagtgggactcaacgaatccatttcctaaagacttttatggtaccctgattctcaagcctgtttatgaaattcaaggtgtgatgaaatttcgaaaagatataatccgcatcctccccagtctagatgtcgaagtcaaagacatcactgattcttacgatgctaactggtttcttcagctgttatcaacagaagatctttttgaaatgactagtaaagagttccccatagtgactgaagtcatagaagcacctgaaggaaaccacctgccccaaagcattttacagcctgggaaaaccattgtgatccacaaaaagtaccaggcatcaagaatcttagcttcagaaattagaagcaattttcctaaaagacacttcttgatccccactagctataaaggcaagttcaagcggcgaccgagggagttcccaacggcctatgacctagagatcgctaagagtgaaaaggagcctcttcacgtggtggccaccaaagcgtttcattcccctcatgacaagctgtcatccgtatctgttggggaccagtttctggtgcatcagtcagagacgactgaagtcctctgtgagggaataaaaaaagtggtgaatgttctggcctgtgaaaaaatcctcaaaaagtcctatgaggctgcgctgctccctttgtacatggaaggaggttttgtagaggtgattcatgataagaaacagtacccgatttctgagctctgtaaacagttccgtttgcccttcaatgtgaaggtgtctgtcagggatctttccattgaagaggacgtgttggctgccacaccaggactgcagttggaggaggacattacagactcttacctactcataagtgactttgccaaccccacggagtgctgggaaattcctgtgggccgcttgaatatgactgttcagttagttagtaatttctctagggatgcagaaccatttctagtcaggactctggtagaagagatcactgaagagcaatattacatgatgcggagatatgaaagctcagcctcacatcccccacctcgccctccgaaacacccctcagtagaggaaacaaagttaaccctgctaaccttagcagaagaaaggacggtagacctgcccaagtctcccaagcgtcatcacgtagacataaccaagaaacttcacccaaatcaagctggcctggattcaaaagtactgattggtagtcagaatgatttggtggatgaagagaaagaaaggagcaaccgtggggccacagcaatagcagaaacattcaaaaatgaaaaacatcaaaaataacaagatgtgacagaagccacttaggcagcaaacataaatgttgcagtgaaaaaagaagctagccttctagctgaaaaacgagtattccccaatggactccagaagaaacttgattcatcgctgcaaaggaaagaacaaccttaaaacttttaacagataaaacttacagaaacctatgatatagaattcatatagtctattctgttgtgtctaaatctgtaggcattgtgttgttgttctttaggacgtatttatttaacttgcacattttttcagattcttatttctactaccaacaactaagtaattgggaaataattctgtatttcagtttctgagtaaaaccagtctgaaataggataaaagccaccaaatattttcttttttttccagaatttgttttgccattttttagtgctatcatcattcctaacaagactaacttacagaaaaataattatatctgactgatttaaaatgttcaggtttcttatccaaatcccttggaactatggaaaggagtttgatttcacattcacagtgtatttacaaaatacgctgtgtcataaatatgtttgaattccaacagccaaagccattgagagtcataggagttttccataaccttctcttctatgacccaacaacaagctcatgactgaaatttcaccagatttctgagacgatgtcttaatattctatgtgctatgtaccagataattctttagatgaatgtttcttaggattgtaggaaaattatctagttaatcataatatttgatggaaagaaaaagacaataaaattgtaatataataaatttggctgacaagaaaccaaagtgattcttaattagtatacatcagaatgatgctcttatagttgtaccatctataaaaattactttaagggctctcacattttaataatttatcttattatgtattaagtatacaggaacaatattatttttcctttaacaaaatgaagagacaggctatctggttaatgttacataggaatttaatagtaatgcttgaacttcatccatagatcatactctgtacaaaatttgttagctaacatcctatctcataattattttatgttttgtggagaaatttgttgattttgtaccaaagtgtttctgaagacaataaattgtgagtcaactttagaacaaaaaaaattagagttttttcaatgtttatattctgattaagcttactttaccttacattttttctaagtaacaatgaatcctgatttctagtgtcctaaaaattgcttagtgatttgattgtggtaatatcatttcttatctacaatgtctaaagttttatgggacagtttttcttttatttattttgcctgtttgtgcagataagaacagaaacttttctaagacccacatttggttattgaaggccacagcgaatcttaacctaacagccttgacaaactgcaccataggtgtttttagactcatataatttgttatttttcaaacaatagtgaataattaatatttttgtttggaatttgagaacaattaaatttgtacttttagtaactaccattctttgattagaaaattaagagaatgcatatcttactttggttgtaaattatcaagggctttctaatagaaatcatatataacatttctaaatataagtcctttcacatactgtgtttccagttgtcttgatattgaaaagtgtaataaacttcatgctcacctattggagatttgggaaggttgaaaataaacttcctaatttttatttgta

SEQ ID NO: 791 - DNA, 3964 bp, Homo Sapiens
  NM_001010924
ggcggagatgagcaggtccgcgacgctgctgctgtgcctgctgggctgccacgtctggaaggcggtgaccaagacgctgcgggagcccggcgccggagcccaagaggtgacgttaaaggtgcacatcagcgacgccagcacccaccagcccgtagcagatgcgctcatcgagatcttcaccaaccaggcctccatagcctctggcacctcggggactgatggcgtcgcctttatcaagttccagtataagctgggcagtcagttgattgtcaccgcctcgaagcatgcctacgtgccaaactctgccccatggaagccaatccggttacctgtattttcctctctgagccttggcctgcttccagaacgctctgccactctaatggtatatgaagatgtcgtccaaatagtatcaggattccaaggtgcccggccacagcctcgcgttcatttccagagaagggctctgaggttgcctgagaacaccagctacagtgacctgaccgcgtttctcacggccgccagctccccttcggaggtggacagttttccttatttgcgaggattagacggaaatggaacaggaaacagcaccaggcatgacctgaccccagtcacagccgtcagcgtccacttgctgagcagtaatggaacgccggtgctggtggatggtcccatctatgtcactgtgcccctggccacgcagagcagcctgaggcacaatgcctatgtcgcggcgtggcggtttgaccagaagctgggaacgtggctgaagagcggtctgggtcttgtgcaccaggaaggcagccagctgacgtggacatacattgccccccagttggggtactgggtggccgccatgtcccctcccatcccaggtcccgttgtaacacaggacattaccacgtatcacacggtgtttcttttggccattttaggaggaatggctttcatacttttggttttgctgtgtctccttttatattattgcaggaggaagtgcttgaaacctcgtcagcaccacagaaaactgcagctccctgcaggactggagagttccaaaagagaccagtccacgtccatgtcacacattaacttgctgttttcacgccgagcgtcagaattccctggcccgctgtccgtcaccagccacggccgccccgaggcccccggcacgaaggaactgatgagtggagtccatttggaaatgatgtctccgggcggcgaaggggacctgcacacccccatgctcaagctctcctacagcacctcccaggaatttagctcccgggaggagctcctctcttgcaaggaagaggataaaagccagatctcctttgataacctcactccaagtgggacgctggggaaagactaccataagtcagtggaggtttttcccttaaaggcaagaaaatctatggaaagagaaggctacgagtcctcgggcaatgatgactacaggggtagttacaacaccgtgctctcacagcctttatttgaaaagcaggacagagaaggtccagcctccacgggaagcaaactcaccattcaggaacatctgtaccccgcgccttcatcacctgagaaagaacagctgctggaccgcagacccactgaatgtatgatgtcgcgatcagtagatcacctcgagagacctacgtccttcccacggcccggccagttaatctgctgcagttctgtcgaccaggtcaatgacagcgtttacaggaaagtactgcctgccttggtcatcccggctcattatatgaaactccccggggaccactcctatgtcagccagcccctcgtcgtcccggctgatcagcagcttgagatagaaagactacaggctgagctgtccaatccccatgccgggatcttcccacacccgtcctcacagatccagccccagcccctgtcttcccaggccatctctcagcagcacctgcaggatgcgggcacccgggagtggagccctcagaacgcatccatgtcggagtctctctccatcccagcttccctgaacgacgcggctttggctcagatgaacagtgaggtgcagctcctgactgaaaaggccctgatggagcttgggggtgggaagccgcttccgcacccccgggcgtggttcgtctccttggatggcaggtccaacgctcacgttagacattcatacattgatctccaaagagctggaaggaacggaagtaatgatgccagtttggactctggcgtagatatgaatgaaccaaaatcagcccggaagggaaggggagatgctttgtctctgcagcagaactacccgcccgtccaagagcaccagcagaaagagcctcgagccccagacagcacggcctacacgcagctcgtgtacctggatgacgtggaacagagtggtagcgaatgtgggaccacggtctgtacccccgaggacagtgccctgcgatgcttgttggaggggtcgagtcggagaagtggtggccagctgcccagcctgcaggaggagacgaccagacggactgcggatgccccctcggagccagcagccagcccccaccagagaagatctgcccacgaggaagaggaagacgatgatgatgatgaccaaggagaagacaagaaaagcccctggcagaaacgggaggagaggcccctgatggcgtttaacattaaatgagctatcgcagacccacctgactgtggaatataaaattgccaaatatcctttctcatggaagcgcgtacccgttcgtggaggaaacggaacggcagcccagccgtgggacggacgtggacgtttactgcattcctgtttgccgtgtaaatgttagaaaggaattaaagttattactcggaataaaggatgactttggcggatgtcgcccctgcaaggaggtggctgaaagtggtgtccagatgtccttccgaggactcggcgtatccgccaccagggacattaagaaaccgcacgtgatgtcgctatgctctaacgatcacctcagttctccctcggattctgggaacagatgaaactttttgcatcgcttgagtcatttttatcacaataatcctactgtgaagctgtcgttgagaacttaggttggcacgtagcgtctcaaggtatgcgttctctcaaaggaaagctatgcatcgctgcttcgttgtctgattttgcttagattttgctttggttaggttgcgttttggggtttgcctttttttgttgtcgcttaaatgcaatttggttgtaaagatttgattcctttgtgttcatctgttccgcttctcagcggtccatctcagcgtctcccttcaggaaccgctgagtgtcctctcttaacatccaagccttttaatgaaatcgtactgaaatctgtatcagctaagagtcctccaatcctggtcccattaactccaagtgcctttttgacagtgacaacagacagtccctcgctttttgttgttgttggttttcttaacccctttaatggaactgcctggattttatacagttattaaaggatgtctcttttgctttaaactgcatgctgccaagtgccatttggggtcagcatcctcgtttcaacacagtgtgctctctagttatcatgtgtaacgtgggttctgtttagcgaagatagactagaggacacgttagagatgcccttccctgctccatccctgtggcaccattatggttttttggctgtttgtatatacggttacgtattaactctggaatcctatgggctcatcttgctcacccaatgtgggagtctggtttgagcaagcgagctgaatgtgactattaaaaaaaatttaaaaaaaaaaaagaaaatcttatgtactatccaaaagtgccagaatgactcttctgtgcattcttcttaaagagctgcttggttatccaaaaatgaaaattcaaaataaactctgaagaaaaggaaaaaaaaaaaaaaaa

SEQ ID NO: 792 - DNA, 2668 bp, Homo Sapiens
  NM_001010927
ttcattgcctggggatgagagggagagacaacgtgtgtcttacacatctcccaacagccgacttagatgtgatccgttctcccagagggagcaggtttctttgaacttttcctttttatgtacagcatagtgctgagcagatcactgcactgtgcaggagttttaacgacagtcaggccaacggcatggaaggaccgcgggagaatcaggatcctcctccgaggcctctggcccgccacctgtctgatgcagaccgcctccgcaaagtcatccaggagcttgtggacacagagaagtcctacgtgaaggatttgagctgcctctttgaattatacttggagccacttcagaatgagacctttcttacccaagatgagatggagtcactttttggaagtttgccagagatgcttgagtttcagaaggtgtttctggagaccctggaggatgggatttcagcatcatctgactttaacaccctagaaaccccctcacagtttagaaaattactgttttcccttggaggctctttcctttattacgcggaccactttaaactgtacagtggattctgtgctaaccatatcaaagtacagaaggttctggagcgagctaaaactgacaaagccttcaaggcttttctggacgcccggaaccccaccaagcagcattcctccacgctggagtcctacctcatcaagccggttcagagagtgctcaagtacccgctgctgctcaaggagctggtgtccctgacggaccaggagagcgaggagcactaccacctgacggaagcactaaaggcaatggagaaagtagcgagccacatcaatgagatgcagaagatctatgaggattatgggaccgtgtttgaccagctagtagctgagcagagcggaacagagaaggaggtaacagaactttcgatgggagagcttctgatgcactctacggtttcctggttgaatccatttctgtctctaggaaaagctagaaaggaccttgagctcacagtatttgtttttaagagagccgtcatactggtttataaagaaaactgcaaactgaaaaagaaattgccctcgaattcccggcctgcacacaactctactgacttggacccatttaaattccgctggttgatccccatctccgcgcttcaagtcagactggggaatccagcagggacagaaaataattccatatgggaactgatccatacgaagtcagaaatagaaggacggccagaaaccatctttcagttgtgttgcagtgacagtgaaagcaaaaccaacattgttaaggtgattcgttctattctgagggagaacttcaggcgtcacataaagtgtgaattaccactggagaaaacgtgtaaggatcgcctggtacctcttaagaaccgagttcctgtttcggccaaattagcttcatccaggtctttaaaagtcctgaagaattcctccagcaacgagtggaccggtgagactggcaagggaaccttgctggactctgacgagggcagcttgagcagcggcacccagagcagcggctgccccacggctgagggcaggcaggactccaagagcacttctcccgggaaatacccacaccccggcttggcagattttgccgacaatctcatcaaagagagtgacatcctgagcgatgaagatgatgaccaccgtcagactgtgaagcagggcagccctactaaagacatcgaaattcagttccagagactgaggatttccgaggacccagacgttcaccccgaggctgagcagcagcctggcccggagtcgggtgagggtcagaaaggaggagagcagcccaaactggtccgggggcacttctgccccattaaacgaaaagccaacagcaccaagagggacagaggaactttgctcaaggcgcagatccgtcaccagtcccttgacagtcagtctgaaaatgccaccatcgacctaaattctgttctagagcgagaattcagtgtccagagtttaacatctgttgtcagtgaggagtgtttttatgaaacagagagccacggaaaatcatagtatgattcaatccagatatgggttaaattcctcattttacttttaaactggtggtaaagtggaaattgcaaaaaaaaaaaaaaaaaaaaactgttcattcctgggttttgtgcagtatacattttcccacaaaatggttgtaaagatttaagttattttaatttattgtggatcagaaacctagatgaaactggtcagaatctgtaaattacttagtttatatccactttgagcaggtatcaaatgatttaggatccttaaaattacattctaataattaagttatgtggaaaaagtaaggctggggaagtcgtgattaatagttttcaaagggccattttttaaaatcctctgggcattttctttcagctgtttgttagtttttgctttatttaaagcatatttaagttattttaatgtggtttaggggcaaaatgtgcagatacttcatttttgtaagatagattgtaatagatgctgtttatactaaacatgtcataactatctatacagtatatattaaaagaaagcttgtactgtatcttatttgatgatatttattttctctgccaagctgtatagtaaaaggaaaataagtcaca

SEQ ID NO: 793 - DNA, 2805 bp, Homo Sapiens
  NM_001010932
gggagttcagacctagatctttccagttaatcacacaacaaacttagctcatcgcaataaaaagcagctcagagccgactggctcttttaggcactgactccgaacaggattctttcacccaggcatctcctccagagggatccgccagcccgtccagcagcaccatgtgggtgaccaaactcctgccagccctgctgctgcagcatgtcctcctgcatctcctcctgctccccatcgccatcccctatgcagagggacaaaggaaaagaagaaatacaattcatgaattcaaaaaatcagcaaagactaccctaatcaaaatagatccagcactgaagataaaaaccaaaaaagtgaatactgcagaccaatgtgctaatagatgtactaggaataaaggacttccattcacttgcaaggcttttgtttttgataaagcaagaaaacaatgcctctggttccccttcaatagcatgtcaagtggagtgaaaaaagaatttggccatgaatttgacctctatgaaaacaaagactacattagaaactgcatcattggtaaaggacgcagctacaagggaacagtatctatcactaagagtggcatcaaatgtcagccctggagttccatgataccacacgaacacagctatcggggtaaagacctacaggaaaactactgtcgaaatcctcgaggggaagaagggggaccctggtgtttcacaagcaatccagaggtacgctacgaagtctgtgacattcctcagtgttcagaagttgaatgcatgacctgcaatggggagagttatcgaggtctcatggatcatacagaatcaggcaagatttgtcagcgctgggatcatcagacaccacaccggcacaaattcttgcctgaaagatatcccgacaagggctttgatgataattattgccgcaatcccgatggccagccgaggccatggtgctatactcttgaccctcacacccgctgggagtactgtgcaattaaaacatgcgctgacaatactatgaatgacactgatgttcctttggaaacaactgaatgcatccaaggtcaaggagaaggctacaggggcactgtcaataccatttggaatggaattccatgtcagcgttgggattctcagtatcctcacgagcatgacatgactcctgaaaatttcaagtgcaaggacctacgagaaaattactgccgaaatccagatgggtctgaatcaccctggtgttttaccactgatccaaacatccgagttggctactgctcccaaattccaaactgtgatatgtcacatggacaagattgttatcgtgggaatggcaaaaattatatgggcaacttatcccaaacaagatctggactaacatgttcaatgtgggacaagaacatggaagacttacatcgtcatatcttctgggaaccagatgcaagtaagctgaatgagaattactgccgaaatccagatgatgatgctcatggaccctggtgctacacgggaaatccactcattccttgggattattgccctatttctcgttgtgaaggtgataccacacctacaatagtcaatttagaccatcccgtaatatcttgtgccaaaacgaaacaattgcgagttgtaaatgggattccaacacgaacaaacataggatggatggttagtttgagatacagaaataaacatatctgcggaggatcattgataaaggagagttgggttcttactgcacgacagtgtttcccttctcgagacttgaaagattatgaagcttggcttggaattcatgatgtccacggaagaggagatgagaaatgcaaacaggttctcaatgtttcccagctggtatatggccctgaaggatcagatctggttttaatgaagcttgccaggcctgctgtcctggatgattttgttagtacgattgatttacctaattatggatgcacaattcctgaaaagaccagttgcagtgtttatggctggggctacactggattgatcaactatgatggcctattacgagtggcacatctctatataatgggaaatgagaaatgcagccagcatcatcgagggaaggtgactctgaatgagtctgaaatatgtgctggggctgaaaagattggatcaggaccatgtgagggggattatggtggcccacttgtttgtgagcaacataaaatgagaatggttcttggtgtcattgttcctggtcgtggatgtgccattccaaatcgtcctggtatttttgtccgagtagcatattatgcaaaatggatacacaaaattattttaacatataaggtaccacagtcatagctgaagtaagtgtgtctgaagcacccaccaatacaactgtcttttacatgaagatttcagagaatgtggaatttaaaatgtcacttacaacaatcctaagacaactactggagagtcatgtttgttgaaattctcattaatgtttatgggtgttttctgttgttttgtttgtcagtgttattttgtcaatgttgaagtgaattaaggtacatgcaagtgtaataacatatctcctgaagatacttgaatggattaaaaaaacacacaggtatatttgctggatgataaagatttcatgggaaaaaaaatcaattaatctgtctaagctgctttctgatgttggtttcttaataatgagtaaaccacaaattaaatgttattttaacctcaccaaaacaatttataccttgtgtccctaaattgtagccctatattaaattatattacatttcaaaaaaaaaaaaaaaa

SEQ ID NO: 794 - DNA, 1972 bp, Homo Sapiens
  NM_001010987
agaactctgtggatgaaccttgaaggagcctccaagcctgaaccaaagcactacagatcacctgctatcttcatagcaccatgagtgaagaatctgatggaaagcttattgaagacagcctgattcagctgagatgtcactttacatggaagttgttaattgaagcccctgaaattcctgatttagaaaacaggatctgggaagagattcagttcctggacaccaaatacaatgtgggaatacacaacctactagcctatgtgaaacacctgaaaggccagaatgaggaagccctggtcagcttgaaaaaggctgaagacttaattcagaaagaacatgccaaccaagcagatattagaagtctggtgacctggggcaactttgcctgggtgtattaccacatgggcagattggcagaagcccagacttacctggacaaggtggagaacacttgcaagaagtttgcaaatccttcccgctatagaatggagtgtccagaggtggactgtgaggaaggatgggccttggcgaagtgtggtggaaagaattatgaacgggccaagacctgctttgaaaaggctctggaagggaaccctgaaaaccctgaattcaatactgggtacgcaatcaccgtctatcgcctggataaatttaacacagcatcagggaggaataaggcattttctctgcacgtcctaaaacgagctgtcaggctaaatccagatgatgtatatattagggttctccttgccctgaagcttcaggatgaaggacaggaagctgaaggagaaaagtacattgaagaagctctgaccagtatatcttcacaggcctatgtctttcaatatgcagccaagttttatcgaagaaaagggtctgtggataaagctcttgagctcttaaaaatggccttggagacaacacccacttctgccttcctgcatcaccaaatggggctttgctacagggcacaaatgatccaaatcaaggaagctacaaactggcagcctagagggcaagatagggaaactgtggacagattggttcaattggctatatgcaaatttgaaaagactataatgttaaagcgaacatttgagatggcctatgttgacctggctgaaacgtatgcagaaataggccaccacagaaaggctgaggaacattttcagaaagggttacgcatgaagatctttgaagatcagctaaagcaagagattcattaccactacggccgtttccaagaacatcatgggaaatctcaagataaagcaattacccattatttaaaaggtttgaaaatagaaaaaatgtcccattccagggaaaaacttctcaatgctttagagaaattggctaaaagatgtattcaccagaatgtacgggttgtggaaagtgtcagcctccttgggcttatccacaaattgaaaggagaagtaagtgatgctttgctgtgctatgagagggctctgaggctggctgctgacctgaaccctatattttaacatagaggtcaccattatccatttaatggtcttataactaaatagaatgactatgaaattaaataatgcaaacttaaagctgttggaaatttaccttattttgagccttgagaggaatgtggctgtgtggcctgagttatgtagcatgcaactgcaacttctgctttttcctgtaaatgatcaggaaaggccttgtggcaccagacataagaccccctgaaagtatcatccctcctgatggaatggtaaagcaatctttcttggaacatagcaagtagtaaccgatcaaattgctataacgtgtgtactgaccttatgtggaaaatgctgcaaccctgtttactgcctatgtaagtgaaatcttaacttccccattttggaatgctgactccagtcattaggtgtctgtatttcctgagtggttaccctcaagctttgtgctcaaataaactctatacttaatcata

SEQ ID NO: 795 - DNA, 745 bp, Homo Sapiens
  NM_001011
gcgctgtttccgcctcttgccttcggacgccggattttgacgtgctctcgcgagatttgggtctcttcctaagccggcgctcggcaagttctcccaggagaaagccatgttcagttcgagcgccaagatcgtgaagcccaatggcgagaagccggacgagttcgagtccggcatctcccaggctcttctggagctggagatgaactcggacctcaaggctcagctcagggagctgaatattacggcagctaaggaaattgaagttggtggtggtcggaaagctatcataatctttgttcccgttcctcaactgaaatctttccagaaaatccaagtccggctagtacgcgaattggagaaaaagttcagtgggaagcatgtcgtctttatcgctcagaggagaattctgcctaagccaactcgaaaaagccgtacaaaaaataagcaaaagcgtcccaggagccgtactctgacagctgtgcacgatgccatccttgaggacttggtcttcccaagcgaaattgtgggcaagagaatccgcgtcaaactagatggcagccggctcataaaggttcatttggacaaagcacagcagaacaatgtggaacacaaggttgaaactttttctggtgtctataagaagctcacgggcaaggatgttaattttgaattcccagagtttcaattgtaaacaaaaatgactaaataaaaagtatatattcacagtaaaaaaaaaaaaaaaaaa

SEQ ID NO: 796 - DNA, 2001 bp, Homo Sapiens
  NM_001011515
agccaggaggcggaagttcccgcgggcggtggggacggcgccctcaccgcgagtcacttgtcagcccttgtctgaggcggaggcagccccgcgccgcgccggacccgagcatatttcattttctgtcattggactttgagccattagaaccatgagcaactacagtgtgtcactggttggcccagctccttggggtttccggctgcagggcggtaaggatttcaacatgcctctgacaatctctagtctaaaagatggcggcaaggcagcccaggcaaatgtaagaataggcgatgtggttctcagcattgatggaataaatgcacaaggaatgactcatcttgaagcccagaataagattaagggttgtacaggctctttgaatatgactctgcaaagagcatctgctgcacccaagcctgagccggttcctgttcaaaagcccacagtcaccagcgtgtgttccgagacttctcaggagctagcagagggacagagaagaggatcccagggtgacagtaaacagcaaaatgggaaaatcccacctaaacgcccaccaagaaaacacattgtggagcgctatacagagttttatcatgtacccactcacagtgatgccagcaagaagagactgattgaggatactgaagactggcgtccaaggactggaacaactcagtctcgctctttccgaatccttgcccagatcactgggactgaacatttgaaagaatctgaagccgataatacaaagaaggcaaaggaaaagataccccttcacgtctttagtcccaaatacacaaaattacgtgactggcaccatgaagtttcagcacgtgctcttaacgtacagtgatttatgagccttgccccccaagcagccagcacataccttttcatttactttttttttttcaacttcatagcaaaatctgtattaaatttgccttatgaaaaaatagaactttttctatacttttctaacaatttcctattgttgtgagaaaaggaagatgaacatgttttgtgctagttggtagctcacaaatgtaaaaccaaaaaaaaaaaaaaatagaaaattaagggactagatctatttgtggatttgtatctgtttttgttgtgattagggtagtaatcttggaaaacgaattattttcataagttgaatttggttagttggttggttgaagcagaggataatgagcaaataaagtccttgtctaatttggaaaatactttctttatattattaacatctcccaagattactttttaagttcattattatgttacattcaaagttgattgtaaattattctaaataagtaaatataaggaggcaagaataaacaaagactttattaaagaagagtgcgtgcattgtagatttaggtatcttttaaagtaggtactattcaggatggctctatgaagaggaggaggtccagatttggctcctgaaaaaggaaagaagagaattttacccctatttgcaatggagaaatacagtattctttggtttggttggatttgcaaatcctatttcctatcaaaggaaatatctctagtggatatttttagaatatagacaatttctaggtattaactaataagatatggaaaagatagctttgctttttttaatcagaagaacataaaataaattacaatatgaatgattgtgagacatcagagaaatattttacttagtgacgtaaactactgtgcactgctgctattcctaggaagctgtgttttgggcaatacatggaagctaaatatatgaccagaaatgctttctgccttgtaatatagtgtattatatattagagctaaatttagtaataaatgcattttgaagtttggaaaagtattgtaataaagttgcctttaacttagctttgtacttgttctgtttccttgaggctagacacagtgccatccaggacttattacagtataactgggtaaaataaacaattctctgacaaaaaaaaa

SEQ ID NO: 797 - DNA, 1941 bp, Homo Sapiens
  NM_001011516
agccaggaggcggaagttcccgcgggcggtggggacggcgccctcaccgcgagtcacttgtcagcccttgtctgaggcggaggcagccccgcgccgcgccggacccgagcatatttcattttctgtcattggactttgagccattagaaccatgagcaactacagtgtgtcactggttggcccagctccttggggtttccggctgcagggcggtaaggatttcaacatgcctctgacaatctctagtctaaaagatggcggcaaggcagcccaggcaaatgtaagaataggcgatgtggttctcagcattgatggaataaatgcacaaggaatgactcatcttgaagcccagaataagattaagggttgtacaggctctttgaatatgactctgcaaagagcatctgctgcacccaagcctgagccggttcctgttcaaaagaaaacacaagtgacaaataaccctggcactgtgaaaatcccacctaaacgcccaccaagaaaacacattgtggagcgctatacagagttttatcatgtacccactcacagtgatgccagcaagaagagactgattgaggatactgaagactggcgtccaaggactggaacaactcagtctcgctctttccgaatccttgcccagatcactgggactgaacatttgaaagaatctgaagccgataatacaaagaaggcaaaggaaaagataccccttcacgtctttagtcccaaatacacaaaattacgtgactggcaccatgaagtttcagcacgtgctcttaacgtacagtgatttatgagccttgccccccaagcagccagcacataccttttcatttactttttttttttcaacttcatagcaaaatctgtattaaatttgccttatgaaaaaatagaactttttctatacttttctaacaatttcctattgttgtgagaaaaggaagatgaacatgttttgtgctagttggtagctcacaaatgtaaaaccaaaaaaaaaaaaaaatagaaaattaagggactagatctatttgtggatttgtatctgtttttgttgtgattagggtagtaatcttggaaaacgaattattttcataagttgaatttggttagttggttggttgaagcagaggataatgagcaaataaagtccttgtctaatttggaaaatactttctttatattattaacatctcccaagattactttttaagttcattattatgttacattcaaagttgattgtaaattattctaaataagtaaatataaggaggcaagaataaacaaagactttattaaagaagagtgcgtgcattgtagatttaggtatcttttaaagtaggtactattcaggatggctctatgaagaggaggaggtccagatttggctcctgaaaaaggaaagaagagaattttacccctatttgcaatggagaaatacagtattctttggtttggttggatttgcaaatcctatttcctatcaaaggaaatatctctagtggatatttttagaatatagacaatttctaggtattaactaataagatatggaaaagatagctttgctttttttaatcagaagaacataaaataaattacaatatgaatgattgtgagacatcagagaaatattttacttagtgacgtaaactactgtgcactgctgctattcctaggaagctgtgttttgggcaatacatggaagctaaatatatgaccagaaatgctttctgccttgtaatatagtgtattatatattagagctaaatttagtaataaatgcattttgaagtttggaaaagtattgtaataaagttgcctttaacttagctttgtacttgttctgtttccttgaggctagacacagtgccatccaggacttattacagtataactgggtaaaataaacaattctctgacaaaaaaaaa

SEQ ID NO: 798 - DNA, 3654 bp, Homo Sapiens
  NM_001011537
gaaaggctcgtgtgtaccgaagtataggggacctgtctgcagcaggagggactcgaaggacacggaggattatatcactgaaggcataagattcagagtagagacgggatttcaccatgttggtcaggccagtcccgaactcctgacctcaaatgatccgcccacctcagcctcccaaagtgctgggattataggtgtgagtcaccatgcctggccggaagggggtcatctttaaaaaatggagccttctgtgattatgggaaatgatatcatcaagttgaatcgaaaggaagggaagaagcagaattttccaagactaaatagaagactcctccagcaaagtggtgcccagcaattcaggatgagagtgcgatggggaatccaacagaattctggttttggtaagactagtctgaatcgtagaggaagagtaatgcctggaaagagacgtcctaatggagttatcactggccttgcagctaggaaaacgactggaattcgaaaaggaattagtcctatgaatcgtccacctctaagtgacaagaatatagaacaatattttccagtgttaaaaaggaaggcaaaccttctgagacaaaatgaagggcagaggaaaccagtagcagttctcaagagacctagccagctaagcagaaaaaataacattccagctaattttaccaggagtggaaataaattaaatcatcagaaagatactcgtcaggcaacttttcttttcagaagaggcctgaaggtgcaggcccagttgaatacagaacaactgctagacgatgtagtagcaaagagaactcgtcaatggcggacttccaccacaaatggagggattttgactgtatctattgacaatcctggagcagtgcaatgcccagtaactcagaaaccacgattaactcgtactgctgtaccttcatttttaacaaagcgggagcaaagtgacgtcaagaaagttcctaaaggtgttcccctgcagtttgacataaacagtgtcggaaaacagacagggatgacgttgaatgagcggtttgggatcctgaaggaacaaagagccactctcacatacaacaaagggggaagccgctttgtcaccgtgggataggtcccatgtcaaaggaacttttgagtgatgactctgagaagttgaattgcttgaagagttcatcacggaaattcaagaaactttacttcaaaatattcacaaggctaaataactcttatttttatttttgaaggtttttttttttaaaaaaaaaaacgtataaaataatgccctgaaagaataatagggattatacctgtctgttcttaaagatttcatggttggctcagacagaacaatcatctgtttgacttctttggttcctcatgcagcagaaggaagacagaaagatagaaattgattatttttatgatagcagtattcaggatctcatcacctttgcccgtgttttagactttgtcatggtaaatcctggtcttcataaacatgagtaggtcccttggttgctgtcacttgccctttaatagtgttgatgtagtcagtgccgttgccttttcttcattagagacacagaacaatgtattagaatttccagctgtgggtttgaagacttagggggacatccagaacgtgcttcctctttcagacggtgtaaagtcccctggaattacacagctttagtgctgagcttttaacaggaaatgtggccctaggtattagtcttagtttaaaatgttggtgtttagagactgtaaatgcatattcacaaagttatctgatagggccttggaggagaaggtccagttttaaaaaatgacagtttgtgtttaataaatgaaggcatgagaggaagtaagtagcaagttgaaggacaggtagttgagatgaaacacttcaaaaccctggttatagatgtactgtttggatgtagcatagtcttgagtctagcgtccacaaagaattattcaaatgatatttagaagaattataactattacattgaatggagtcccttggatattttgatagtaaaattaatagccataaagtcctagacttcttatttgaagttaaaatttcttatttgaaaagttgaaatttatgagctttgaagattgctaaattaaataatttatagctccaaaaacaaaaatatacttgtatatgtcacagagaaaaaaaatgcaaaatttataatagagttacattaaccttgttgtttacctttcactgatttcttatatggtataaattaaagttcaggcatttatggggagaaaaggccctccccaccgacccgccacctgccacctctgacggagtgggagaagttagtctgtgctaagatagtactgagtccccagatgttgtatactgtaaattacagtataatgccaaatgcagcaaaatcttccagctgtacgttacaagtttggtcattttgaagcttgacattttagtttgccattatgttaaaaacatctaaataggtgttagtttctcaggagtagattgttagtgttgacttttcctgtaaagcagacatcgttcttggcctgccctgcattgtatactagatttcattgttgtctctcatgcttcttgagttgcttcatggtttatgctcgccatggaaagctatcagtaacagtttcatgcttataccaaagaattaaatctgatctttaatatctgatattttcctggtactcgtactgataagggattattggaagtcagtcacagaatttggaaataaattctagtctctccttagctatttgatgcttttcatataggccaagaactcattgcaaaacatttttgcaaggatgaatgcctgtatttggtctaggaacagtacattttagtctgatttagaattactggtagcttattttaaagcaaggaaaagcagctgagctcaagtttgctgtctttagaatggtttgtgaaaatatggtataaaggtgttttcattttcctgttcttacctattattgtatagagctattcatgccattttttgggaaaactttaaaaattgccccaaatactgacattgagtgcattaaataacaaattatctttgatacattaaacttttattcttcatgcatctgtaatttaattttaagtataatgttttgcctttggtacaactaaattaaaactcttggtggtcacatattgtatataaacaaaacaatatgctttgttgaaggaaaattttctttattggaatgtggttgtaatccttgttcagttcttaagtttcggttttttttaaaaacaggatgcaacttaaacttttctttgcatcaaggtatatgcaaaacattggtgccgtgcatcaccaaatgaaagtttgtatttaacgaggaggtgctttacactgtactttttggtgttttttggaaaagttacatttagatctattctgaagctgttcatttttaacaaataaaatgttacaggtttcacatgatttattctcagctctaaagattgagttgtggtttttagattgttctatgttacgaagaactttgtagtggttatctatatttgtagtttttagggtgtgaaaccttatctactagcaaaattggtaaatcactgtagactcttctatt

SEQ ID NO: 799 - DNA, 1746 bp, Homo Sapiens
  NM_001011546
gggaagctcccctccgagactctggatagccgccgggggggcgttgcctggccggctggttgcgtagcaacggcaggcggtgcgtgacgtgcgcagccgcgttccgtcctgaggcgcgcccgccccggggtaagctcgcgccgccgcgtcagctcagcgctgggtctctcggtcccgcagccgtgaggaggacggtctgcatactcgctgcccgccggctccctcccccgcgtccctgcgaccgccgcggcgaagatgattttcagttcacccactagaggcaaagacgtaagagagctaccagcgtattgagaggagatacacaggcactacgagaatggagtttagaagaaggtcagagccctgggcagtgttgggccaggctttagggcctcaggagtgcaagtagctgatgaagtatgtcgcattttttatgacatgaaagttcgtaaatgctccacaccagaagaaatcaagaaaagaaagaaggctgtcattttttgtctcagtgcagacaaaaagtgcatcattgtagaagaaggcaaagagatcttggttggagatgttggtgtaaccataactgatcctttcaagcattttgtgggaatgcttcctgaaaaagattgtcgctatgctttgtatgatgcaagctttgaaacaaaagaatccagaaaagaagagttgatgttttttttgtgggcaccagaactagcacctctgaaaagtaaaatgatctatgcaagctccaaggatgcaattaaaaagaaatttcaaggcataaaacatgaatgtcaagcaaatggaccagaagatctcaatcgggcttgtattgctgaaaagttaggtggatccttaattgtagcctttgaaggatgccctgtgtagattattcagtgccacaaattgaaagcttccatgtttaatgttatcctcttgctatataaataaagcaaatatatttaggccagggtctcactgagggggagctgtcttgtcatcttttagagtaaactattctataaacatatgcaaacagccctaaataaatctaaagtctaaagttttattgatgtgaaattaaattcttattggccaaatgcctgttttgatgagttgatttataaagatttttgttaagctcaggattttaaattacacagttcacaaacagtaaaggccatgtgaagagaattattacatctttattaacctcagcatttactttgtttcttttgcttaggaaattgctcataatctggttataattttggtccaaattctttattcttccttgagctaagcagaataatggaatataatatgtcttcataatataacaacactaatacactaatagtaagattaagttaggcagtcttctaccaaatgtgtaatggagattgcctcaaaattgtgtccacataatccacgctcatcttgcaaagcgctatttcaggcacatcattggaatacaggaagtagccctgcacctgccagtgagctcgccattcactgattggaagagtgacctggcatcttggaaatcattgtgtgtcttcaggagaatgtgcagtgtcttgtaacaactaattataatgcaaattagggctacattgtaatctgctttgttaatgaaaatgataaaacagaatattgacaagctaggacacctgtggtatctttaattgtatctccttcagaagtttgcttcttatggtataataaagtatggaagaatattgagta

SEQ ID NO: 800 - DNA, 3218 bp, Homo Sapiens
  NM_001011547
atgaagccaggagcgcctcaaagtccagcctgctgttgaccaacactaacagatgagcaaggagctggcagcaatggggcctggagcttcaggggacggggtcaggactgagacagctccacacatagcactggactccagagttggtctgcacgcctacgacatcagcgtggtggtcatctactttgtcttcgtcattgctgtggggatctggtcgtccatccgtgcaagtcgagggaccattggcggctatttcctggccgggaggtccatgagctggtggccaattggagcatctctgatgtccagcaatgtgggcagtggcttgttcatcggcctggctgggacaggggctgccggaggccttgccgtaggtggcttcgagtggaacgcaacctggctgctcctggcccttggctgggtcttcgtccctgtgtacatcgcagcaggtgtggtcacaatgccgcagtatctgaagaagcgatttgggggccagaggatccaggtgtacatgtctgtcctgtctctcatcctctacatcttcaccaagatctcgactgacatcttctctggagccctcttcatccagatggcattgggctggaacctgtacctctccacagggatcctgctggtggtgactgccgtctacaccattgcaggtggcctcatggccgtgatctacacagatgctctgcagacggtgatcatggtagggggagccctggtcctcatgtttctgggctttcaggacgtgggctggtacccaggcctggagcagcggtacaggcaggccatccctaatgtcacagtccccaacaccacctgtcacctcccacggcccgatgctttccacattcttcgggaccctgtgagcggggacatcccttggccaggtctcattttcgggctcacagtgctggccacctggtgttggtgcacagaccaggtcattgtgcagcggtctctctcggccaagagtctgtctcatgccaagggaggctccgtgctggggggctacctgaagatcctccccatgttcttcatcgtcatgcctggcatgatcagccgggccctgttcccagacgaggtgggctgcgtggaccctgatgtctgccaaagaatctgtggggcccgagtgggatgttccaacattgcctaccctaagttggtcatggccctcatgcctgttggtctgcgggggctgatgattgccgtgatcatggccgctctcatgagctcactcacctccatcttcaacagcagcagcaccctgttcaccattgatgtgtggcagcgcttccgcaggaagtcaacagagcaggagctgatggtggtgggcagagtgtttgtggtgttcctggttgtcatcagcatcctctggatccccatcatccaaagctccaacagtgggcagctcttcgactacatccaggctgtcaccagttacctggccccacccatcaccgctctcttcctgctggccatcttctgcaagagggtcacagagcccggagctttctggggcctcgtgtttggcctgggagtggggcttctgcgtatgatcctggagttctcatacccagcgccagcctgtggggaggtggaccggaggccagcagtgctgaaggacttccactacctgtactttgcaatcctcctctgcgggctcactgccatcgtcattgtcattgtcagcctctgtacaactcccatccctgaggaacagctcacacgcctcacatggtggactcggaactgccccctctctgagctggagaaggaggcccacgagagcacaccggagatatccgagaggccagccggggagtgccctgcaggaggtggagcggcagagaactcgagcctgggccaggagcagcctgaagccccaagcaggtcctggggaaagttgctctggagctggttctgtgggctctctggaacaccggagcaggccctgagcccagcagagaaggctgcgctagaacagaagctgacaagcattgaggaggagccactctggagacatgtctgcaacatcaatgctgtccttttgctggccatcaacatcttcctctggggctattttgcgtgattccacagacctggcttcagtgtagacagattaaacaaagcccaagcctgtcagccacagaaacaggctctcctcttactttgctgtctaaactggagatcacagaagtcaagactgcaagctcccctgaagagaatccaactcaacctgcacacttgacaagtggagaaacagaagcccagagagagcactgggtttgttcaggaccacccagaaggtgtcacacggggtttccccactctttctgatatattgccttacagacctacctcaaacacactgtttccaccctcttcttgaatgtattcagtagcctttactgaatgtgtgtcttgagagtagaaaaatggaggatacaagaaaaggagcaggaagaaatttgcaaaaatccaagagcacctttgctcccccttatcctccttcctcttcccctttctagttcccctacctctctatctttctattctcaccaataatctctttgttgcatgaatttacccaggagagtcctatatttccattggtggctccacagtggtggctgtcagacccgaaggggtggggagccaagggtggactttaagcatggtgacagatggtattttgggcagaaagctcttagacaatggactatccaaagcactatttaaattctgcctcttcctactctctaacccaaatatgcacaaactctctatggccttgagaagcagttggagagacatgacttgttaaaacctcaaggaatcaagacatgttactctgtatttaagggtaagccccacagcgggcagcacaaacagcctgggagccactgtgcctgtgcttctctgtccttctccctttgcttgccatgaatccgcataccttggaatacactgtgaccccagttaagtgtcccttcgccaggaagctgccgcaacgtccagacctgggtcaagttcccactcctgctcccatagccttgacctgcttctgtcacagcactgatcacactgagatggaagactccagggggcaaggaccaagggccatatcccaagtgactttgtacccagaaaataacagctgttcaataaatgtgtattgagttaattagttaaaaaaaaaaaaaaaaaaa

SEQ ID NO: 801 - DNA, 1743 bp, Homo Sapiens
  NM_001011551
cgcgggcgggcaaacggacggctccgcccagccgccggctcctttaccccgccccactacccccgccttcgcggcgctcgtttcctggcgctccccacctttagcgagaccaacgagagaacaccgcctgcagctagaacagcctggtcaggagcgtaacggagtggtgcgccaacgtgagaggaaacccgtgcgcggctgcgctttcctgtccccaagccgttctagacgcgggaaaaatgctttctgaaagcagctcctttttgaagggtgtgatgcttggaagcattttctgtgctttgatcactatgctaggacacattaggattggtcatggaaatagaatgcaccaccatgagcatcatcacctacaagctcctaacaaagaagatatcttgaaaatttcagaggatgagcgcatggagctcagtaagagctttcgagtatactgtattatccttgtaaaacccaaagatgtgagtctttgggctgcagtaaaggagacttggaccaaacactgtgacaaagcagagttcttcagttctgaaaatgttaaagtgtttgagtcaattaatatggacacaaatgacatgtggttaatgatgagaaaagcttacaaatacgcctttgataagtatagagaccaatacaactggttcttccttgcacgccccactacgtttgctatcattgaaaacctaaagtattttttgttaaaaaaggatccatcacagcctttctatctaggccacactataaaatctggagaccttgaatatgtgggtatggaaggaggaattgtcttaagtgtagaatcaatgaaaagacttaacagccttctcaatatcccagaaaagtgtcctgaacagggagggatgatttggaagatatctgaagataaacagctagcagtttgcctgaaatatgctggagtatttgcagaaaatgcagaagatgctgatggaaaagatgtatttaataccaaatctgttgggctttctattaaagaggcaatgacttatcaccccaaccaggtagtagaaggctgttgttcagatatggctgttacttttaatggactgactccaaatcagatgcatgtgatgatgtatggggtataccgccttagggcatttgggcatattttcaatgatgcattggttttcttacctccaaatggttctgacaatgactgagaagtggtagaaaagcgtgaatatgatctttgtataggacgtgtgttgtcattatttgtagtagtaactacatatccaatacagctgtatgtttctttttcttttctaatttggtggcactggtataaccacacattaaagtcagtagtacatttttaaatgagggtggtttttttctttaaaacacatgaacattgtaaatgtgttggaaagaagtgttttaagaataataattttgcaaataaactattaataaatattatatgtgataaattctaaattatgaacattagaaatctgtggggcacatatttttgctgattggttaaaaaattttaacaggtctttagcgttctaagatatgcaaatgatatctctagttgtgaatttgtgattaaagtaaaacttttagctgtgtgttccctttacttctaatactgatttatgttctaagcctccccaagttccaatggatttgccttctcaaaatgtacaactaagcaactaaagaaaattaaagtgaaagttgaaaaataaaaaaaaaaaa

SEQ ID NO: 802 - DNA, 5993 bp, Homo Sapiens
  NM_001011649
aggaagaagcgccgggaaagatggcggcgtctgtggtttgaattccagcggcgccgccagagtctgaacaagagctggggtggagggggcggggacctggggagcccggcgggtcgctatcgcggggggtactagtggcgccgccgccacagacaccaacgctgtcgccacctctgtagccatgatggacttggtgttggaagaggacgtcaccgtccctgggacgctcagcggctgcagtggccttgttcccagtgtaccagatgacctggatggcatcaaccccaatgctgggttgggaaatggtctgctcccaaatgtgtcagaagaaacagtgtctcccaccagagcacggaacatgaaggactttgaaaatcaaatcactgaattgaagaaagaaaactttaacctaaagctccgcatctatttccttgaggaaagaatgcaacaggaatttcatggccccactgaacatatctacaaaactaacattgagctcaaggtggaagtagaaagtctgaagcgggaactccaggagagagagcagctgctcatcaaagcctccaaagcagttgagagcttagctgaagcaggtggctctgaaatccagcgggtgaaagaagatgctcgaaagaaggtgcagcaggtggaagatctcctaactaaaagaatactccttttggaaaaggatgtgacagccgcccaggcagaactggaaaaggcctttgcagggacagagacggagaaggctcttcggttgcgtttggaaagcaagctttcagagatgaagaagatgcacgagggggacttggcgatggctctggtcctggatgagaaagacagactgattgaggagttgaagctgtctttgaagagcaaagaagctttaattcagtgccttaaagaggagaaatctcagatggcatgtcctgatgagaatgtgtcatctggagagctccgaggactttgtgctgctccaagggaagaaaaggagagagaaactgaggctgcacaaatggagcatcagaaggagagaaacagctttgaagagaggatccaggcacttgaagaggacctgagagagaaggaaagagaaattgctacagagaagaaaaatagtctaaagagggataaagccattcagggtttaaccatggcattaaaatcaaaggaaaaaaaggttgaagaacttaactctgaaattgaaaagctcagtgctgcctttgctaaagccagagaggccctacagaaagcacagacccaggaatttcaggggtctgaagactatgagactgctctatcaggaaaggaagccctttcggctgcgctgcgctcacaaaacctcaccaagagtacagagaaccacagactgcgtagaagcattaagaagatcacccaggagctgagtgacttgcagcaggagagggagagactggagaaggacctggaggaagcccatcgagagaagagcaaaggagactgcaccatccgtgatcttagaaatgaagttgaaaaattacgcaatgaagtgaatgaaagagagaaagcaatggaaaatcgttacaagagtcttctgagtgaaagcaataaaaaattgcacaatcaagagcaagtgatcaaacatctaacagaaagtaccaatcagaaggacgtgttgcttcagaaattcaatgaaaaagatttggaagtaatacagcagaactgctatttaatggctgcagaggatcttgagctcaggagtgaaggcttaataacagaaaagtgctcttctcaacagccaccaggcagcaaaaccatcttctctaaggaaaagaaacaatcatcagactatgaagagctgattcaggtcttaaagaaagagcaggacatctatacccatctggtcaaatctctgcaggaatcagacagtatcaacaacctgcaggctgagttaaacaagatttttgccctgcggaagcaactggagcaggatgtgctttcatatcagaatttgcggaagaccttggaggagcagatcagcgaaattcggaggcgggaagaagaatcattttcactttatagtgatcaaacatcttatctaagtatttgccttgaagaaaacaatcggtttcaagtggaacatttttctcaagaagaacttaagaaaaaggtcagtgaccttatacagctagtgaaggagctgtatacagacaaccagcacctgaagaaaaccatttttgatctctcctgcatgggtttccagggaaatgggtttccagatagacttgcgtctacagaacaaacagagcttctggctagcaaggaggacgaggacacgatcaaaattggggaggatgacgagattaatttcctgagtgaccagcatttgcagcagagtaatgagattatgaaagacctttccaaaggaggctgcaaaaatggatacttaaggcacacggagtctaagatttcagattgtgatggggcccacgcacctggctgcctagaagaaggtgcattcataaacctgcttgcccctttgttcaatgagaaggccacattattactggaatccaggccagaccttctgaaagtggtacgggaactgcttctgggacaactattcttgacagagcaggaagtttctggagaacaccttgatggtaaaactgagaagacacctaagcaaaaaggtgaacttgtacattttgtccaaaccaactcattttccaagccacatgatgaactgaagttgtcttgtgaggcccagctagtaaaggcaggcgaagtgcccaaggtaggactgaaagatgcctcagtgcagactgtggccacggagggcgacctgctgagattcaagcatgaagcaacaagagaggcttgggaagagaaaccgatcaacactgcactcagcgcagagcatcggccagagaacctgcacggggtgcctgggtggcaggctgccctcctttccctccctggtattaccaacagagaggctaagaagtcccgcttgccaatcctaataaaaccatcccggtcattaggaaatatgtatcgtctccctgccacccaggaggtggtgacgcagctgcagagccagatcttggagctgcagggggagctgaaggagtttaaaacttgtaataagcaacttcaccaaaagttaattctggctgaagcagtgatggaggggaggccaacgcccgacaaaacgttgctgaatgctcagccccctgtgggagcagcctaccaggacagcccaggagagcagaaaggaattaaaaccacatcttctgtctggagagacaaggaaatggacagtgatcagcaaagaagctacgagattgactctgagatttgcccacctgatgaccttgccagcttgccatcatgcaaagaaaatcctgaagatgttctgagcccaacttcagtagctacttacctgagttccaagagtcagccttctgctaaagtcagtgtgatggggactgatcagtcagagagcattaatacctcaaatgagacagaatacttaaaacagaaaatccatgacttggaaactgagctggaaggctaccagaatttcatatttcagcttcaaaagcactcccagtgcagtgaggccataattacagttttgtgtgggacagaaggggcccaggatggcttgagcaagcccaagaatggttctgatggggaagaaatgaccttttcaagtttgcaccaagtgcgatacgtgaaacacgtgaaaatcctcggtccgctggccccagagatgattgacagcagggtgctggagaacctcaaacagcagctggaggaacaggaatacaagctgcagaaggagcagaatttgaacatgcaacttttcagtgagatccataatctgcagaataagttcagagatctctcacctcccagatacgattcattagttcagtcccaagccagggagctctcccttcaacggcagcagattaaggatggccatggcatctgtgtcatctcccgtcaacacatgaacaccatgattaaggcatttgaggagttgctgcaggccagtgatgtggattactgtgtggccgagggtttccaggaacagctgaatcaatgtgctgagctgctggagaaattggaaaagctatttctcaacggaaaatcagttggagtggaaatgaacacccagaatgaactgatggagaggattgaggaagacaacttaacctaccaacatcttctgcctgaatctcctgagccttcagcctctcatgcgctctctgattatgaaacatctgaaaagtccttcttctcacgagaccagaagcaagataatgagacagagaagacttcagttatggtgaacagtttttctcaagacttactaatggaacacatacaggaaattcgaactttgagaaagcgtttagaagaatctattaaaacaaatgagaagctacggaaacagttggaacggcaaggatctgaatttgttcaaggttctacaagcatttttgcttctggttcagagcttcatagttctctaacatcagaaattcatttcttgaggaagcagaaccaggccctcaatgcaatgctcattaaaggatccagagataaacagaaggagaatgacaaattacgagagtccctctccaggaagaccgtgagcctggagcaccttcagcgggagtatgccagcgtgaaggaagaaaatgaaaggctgcagaaagaaggcagcgagaaggagagacacaaccagcagctgatccaggaggtccgctgcagcggccaggagctgagcagggtgcaggaggaggtgaagttgaggcagcagctgctctcacagaatgacaagctattgcagtctctccgagtggagctgaaggcgtatgagaagctggatgaagagcacaggagactgagagatggtgacaaatatcccatggaaagtgataattcatttgatctgtttgattcctcccaggcagtgacaccaaaatcagtttcagagactcctccactctctgggaatgacacggactccctctcctgcgacagtggcagttcggcaactagcactccgtgtgtgtcccgcctggtcactggccaccacctgtgggccagcaagaatggccgccatgtcctgggcctgattgaggactatgaggccctgctcaaacagatcagccagggacagaggctccttgctgaaatggacattcaaacccaagaggctcccagctccacaagtcaagagctgggaacaaagggtccacacccagcaccactgagcaagtttgtgagcagtgtgagcacggccaagctgaccctggaagaggcctacaggcggctgaagcttctctggagagtctcactccccgaggatggccagtgcccccttcactgtgagcagattggagaaatgaaggcagaggtcaccaaactacataaaaaattgtttgaacaagaaaagaagttgcaaaacaccatgaagcttttgcagctgagcaagcgccaggaaaaagtcatctttgatcaattggtcgtaacccacaaaatccttcggaaggccagaggaaacctggagcttaggcctgggggagcccatccaggaacatgcagtcccagcagaccaggctcctgagaagaactttcagccaataaagcttgtgcttcccccaccgagctcacgctgtctctttgttccaagtgtggttcctatttattgaggaagaaagagctgtctggccaaaggaaatctattttttcccttcatgttttctctctgaaagttggcttgagagttgttgtcagaaaggtgcaggtgctccacaaacgggtggtaaaaaggcctcgagctcttggatgttgtatttcagatcaggggcaggcaccggagttgaggctgtgcgccttggtgggcttcacgtcttcccctggatttgcttagtactcagccagtgccacagtttgaagattctcattaaatgattcatttcatttcaccttga

SEQ ID NO: 803 - DNA, 2869 bp, Homo Sapiens
  NM_001011658
acatcccagggtatcgcgagaactgcttcggcgttctggctacaggttcggggcgcgggtctcttccgcggaaactgacattgcgtttccgttgtcggcctcccactgcagtatcaccttctcccccaagtgtgacaaccaaagatgtctccagatattgccagatgtcctcttggaagcaagatcgctccgggttgagatccacagagctaaacgttttagagtaccaaccattgtgtgctgtgaggtaaaggagccatatattgaagaccatgtctgggagcttctactttgtaattgttggccaccatgataatccagtttttgaaatggagtttttgccagctgggaaggcagaatccaaagacgaccatcgtcatctgaaccagttcatagctcatgctgctctcgacctcgtagatgagaacatgtggctatcgaacaacatgtacttgaaaactgtggacaagttcaacgagtggtttgtgtcggcatttgtcactgcggggcatatgaggtttattatgcttcatgacataagacaagaagatggaataaagaacttctttactgatgtttatgatttatatataaagttttcaatgaatccattttatgaacccaattctcctattcgatcaagtgcatttgacagaaaagttcagtttcttgggaagaaacaccttttaagctgaatgcagaaaattccaaaataaatgatgtcaccacaatggtgtatactcaggaatgtgtacattgtaagttacttgattaaatagcctggaaaacttttgtgtattctcagcttatctaaacctaatgaaattccttttatatttaaaaatagtacattctgtctcatgtcacgtatcaatagatcaattggtatttccttgtgaacagtgttatttataaagagttcattatcaataatcatgttttttttttttttttttttctgatacagagtctcactctgttgccaggctggagtgcagtggcgcaatcttggctcactgcaacctccgcctcccaggttcaggcgattctcctgcctcagcctccaagtagctgggactacaggcgcgtgccaccacgcccggctaatttttgtatttttagtagagacagggtttcaccatattggtcaggctggtcttgaactcctgacctcgtgatctgcccgccttggcctcccaaagtactgggattacaggcgtgagccaccgtgcccaaccatgaaatatttttacttaaaaattgggaataagctcgctttttttttttttgagatggagtcttgctcctgttgtgcaggctgtagtgcagtggcacgatcttggctcactgcaacctccacctcccgggttcaagcaattctccttcttcagcctcccgagtagctgagattataggcgtgcaccaccacacctggctaatttttgtatttttagtagagacagggtttcaccatattggtcaggctggtcttgaactcctgacctcgtgatccacccacctcaggaagtgctgggattacaggcgtgtgagccaccacgcccggccatgaaatatttttacttaaaaattgggaataagctttttggttttttgtgggtttttgtttttgttttttgttttttgtttttttgagatggagtcttgctcctgttgtgcaggctggagtgcagtggcacagtcttggctcactgcaacctccacctcctgggttcaagcaattctccttcttcagcctcccgagtagctgggattacaggcatgcaccaccacacctggctaatttttgtgtttttagtagagacggggtttcgctattttggccgggctggtttcaaactcctgacctcagttgatccacccgcctcagcctcccaaagtgctaggattacaggcatgaaccaccgtgcccggccaggaataagcttttgacttacccaattcagataggttgatctttggggttttttttttttttttgagatggagtttcgctctgttgtccaggctggagtgcaatggcagttgtttcaccgtaacctctgcctcctgacttcaagcaattctcctgcctcagcctcccaaagtgctgggattacaggtgtgagccaccgtgcccggcccagataggttgatcttaatgtaacaacccaaaaataaatgtcatagtcaagatttggtagataaatttaaaattaaaatattctgcagttgggagtgaaatgtgatagcacatacgttgacattatgcatttagagatgttataaaaatgtataggcagtatacacagcactactcaagaagccaaagaaacacttgtgcagtgctaagtgtcacatgtctgcttccaccagaggctaggaatagtgatcctgctataatgtgagaacccaaatcatgtttataaaataggacgctgggagcagttgcaggccacagtgaagtgtgttgcttctgtcactttatattcttatatttcctttccctcagacagtaaactgttgatactcgtacttgtaaaaaattgtaaggcaatttttagtattgttgtcaaagaaaagcttggattacattaacatttgtattcagtcttttaggtgatacaccagagggggctgggaattgtctctttgttcctataagtagatcttaatgtaaaatagtaaatgtccattgaaaagcaagtaatacagcctgtgctaattgggagcacttgaacaattttgttccattctgagtaacttttgagcaagtaattctaagctttgtcttgtatccttgtgtgaaattgcataatttttaccctatttgatttcttaaataaagatgtttgctcaagataaaaaaaaa

SEQ ID NO: 804 - DNA, 1575 bp, Homo Sapiens
  NM_001011671
gctacttaaggtcctgctgcgtgagccattgacgtgtttggagctggagacggcctgggtgctggcgaagcggaggccggagtaagaagactgttagaatgccctcggtaacacagaggctgagagatcctgacataaatccttgtttgtcggaatctgatgcttccaccagatgtctggatgaaaataactatgacagggaaaggtgttccacttacttcttgaggtacaaaaactgccggagattctggaattctatcgtgatgcagagaagaaagaacggagtgaagccatttatgcctacggcagcagaaagagatgaaatcttgagagcagtgggaaatatgccctattgaatgtttgcattaaaagtgtttatataacttagaagcagatgaatatttctaataaatgattgctgtaatatttaagactgtacacccctcacccagacagaccttaagttcttcaagtggagacagtgaagtcaccccgtgtcctttttgcttgctctcagtgccatgccgatggtatgttgctgttggctgtgttgtggcatgagtttgcatgactttctggaggcatggagttaggtaaggctacatgagaaattgagcttttccactgggttttgaaagaagagtatgatgtgaacaagtaaagactgaatggggctgagatgaaggcaatgtttccaaggaaaggaaatgttatgagcaagagtgtgaggcaagagaagctggaaccacattcagagagtatcctgtagattgctccacctagaatctcaggtgggtggagcagtggtgggagaagactggaaaggtaagttgaaggtaaggaatgtgtggtgggcctcagatcccaggctcattcctcaaatcacttcttacttccctcacttatctttgtttaaataaggttagtacattcactaggggcaaatgggtttttctaaataaatgacataaaaaagaactggttgtctttctttaaagaaagtcttagttacaggattctgtgattaaaatccttaaatattgggttgccttctgcagctgtagtatcagtttttgaaccacagtaatgggaagaaagacaaatggattcccttagaagtaagatttctatttgcaggatgagttgggcagggaaaagggtcagggttcatcaggtgaactcaacactgggatgagactagaacttcactttatgatataaacacaatacgattattcaatgtggtgactggggtagactgtgaagcagccctccttatgcccactgccttttagaatcgtttgttttattcatggtagttttatgaagacatactattattgaatgaaatttaatgtgtacttgaaaacattgcttttgtcccttctcttcatctggtcttgggtcaagaacattgttttaatggctgccgacaatgaactgtctgtctgagtctaaaaccaagctcaggtttctaagccacatgaccttgattgttaaatgtagttatatttgaataaaaaatgaatcatttccaaaaaaaaaaaaaaaaaaaaaaaaaaaaaaaaaaaaaaa

SEQ ID NO: 805 - DNA, 2365 bp, Homo Sapiens
  NM_001011724
agaccagaaacggaagagagcgcgggggatgtgtttggcgtggggcgcactgttcagttgctctcctggatggctttatgtctccgcggtgtttcctagagtctcggcgtttctacctcttcgcaccctttcctgccaccctttgtcccctggaagcccggagacatcagcggctgcaattttgctactcgctgctcggcgtggaactgtcaggacaaaaaataatatccaaagatattttggcactaacggcgctatctgtagcaagaaagttgagcagtgtgaactgttgagacttccaaggagacttcagacaaccaagacagtgtaaaggaaaacagagaaaaagacttgttagacattattaagggcacgaaagttgaattgagcacagtaaatgtacaaacaacaaagccacccaacagaagttcacttaaaagctacaactggcgggcctcaaagagctttaggacatgctccaaagaagagaaatgagcccctgagtcctgagttggtggcagctgcatctgctgctctgttttgacaagcaaacaagccagaactgctcaggcagctccgtagcatgaggaagagtcaggggcacagagagatggagagagacctagttagtttcaataacaaaatatcagatatgaaaattgccagatgtgctacagctagaattaatataaggccagagcatcagattcagtttgaccaaggctatgacaattatcctggcctggagaagactgctgatcttagaaacaggaaaaatatattcagggggaagagatgtaatagatttcacattatggcagttactaaagaagcacgtgaacagacacatcaccttcactttgggatatggaatttgataagcagttagccacagaatatgaacaaccccttgagaatgagattgaagaactgatccaggggacaaaagaggggaaactgagagttcccaattaataatgaagcagcttcatatctaagatctctggtggactttttctgcccgtggacgccgctgaagaagcatcgttaaagtctctcttcaccttgccgtcatgtctaagtcagcgtctccaaaagagcccgaacagctgaggaagctcttcattggagggttgagctttgaaacaactgatgagagcctgaggagccattttgagcaatggggaacgctcacagactgtgtggtaatgagagatccaaacaccaagcgctccaggggctttgggtttgtcacatatgccactgtggaggaggtggatgcagctatgaatacaacgccacacaaggtggatggaagagttgtggaaccaaagagagctgtctccagagaagattctcaaagaccaggtgcccacttaactgtgaaaaagatatttgttggtggcattaaagaagacactgaagaacatcacctaagagattattttgaacagtatggaaaaattgaagtaattgaaatcatgactgaccgaggcagtggcaagaaaaggggctttgcctttgtaacctttgacgaccatgactccgtggataagattgtcattcagaaataccatactgtgaagggccacaactgtgaagttagaaaagccctgccaaagcaagagatggctagtgcttcatccagccaaagaggtcgaaggggttctggaaactttggtggtggtcgtggagatggtttcggtgggaatgacaactttggtcgtggaggaaacttcagtggtcgtggtggctttggtggcagctgtggtggtggtggatatggtggcagtggggatggctataatggatttggtaatgatggaagcaattttggaggtggtggaagctacaatgattttggcaattacaacaatcagtcttcaaattttggacccatgaagggaggaaattttggaggcagaagctctggcccctatggcggtggaggccaatactttgcaaaaccacaaaaccaaggtggctatggcgtttccagcagcagcagtagctatggcagtggcagaagattttaattaggaaacaaagcttagcaggagaggagagccagagaagtgacagggaagctacaggttacaacagatttgtgaactcagccaagcacagtggtggcagggcctagctgctacaaagaagacatgttttagacaaatactcatgtgtatgggcaaaaaactcgaggactgtatttgtgactaattgtataacaggttattttagtttctgttctgtggaaagtgtaaagcattccaacaaagtgttttaatgtagatttttttttttgcacccatgctgttgattgctaaatgtaatagtctgattgtgacgctgaataaatgtctct

SEQ ID NO: 806 - DNA, 2879 bp, Homo Sapiens
  NM_001012302
acgcggaagtcaggtaggagcacccgccgctggcagccactctcctggccgccaaaccccagctggaactccggccacagccagcatgcagggcgaagagagcctccggatcctggtggagcccgaaggggacagcttcccgctgatggagatcagcacctgtgagaccgaggcctccgagcagtgggactatgtcctcgtggcccaacgtcacacccagagagacccccggcaggcgcggcagcaacagttcctggaggagctcaggagaaagggcttccacattaaggtgatccgggaccagaaacaggtcttctttgggatccgtgctgacaacagtgtctttggcctgtaccgcactctcctcctggagcctgaggggcctgccccccacgccgagctggccgcgccgaccaccatcccggtcaccacgagtctcagaatccgaatcgtgaacttcgttgtcatgaacaacaagacctcggctggtgagaccttcgaggatctgatgaaggacggggtctttgaggccaggttccccctgcacaagggggagggacgcctgaagaagacgtgggcgcggtggagacacatgttccgggagcagccagttgatgaaatcaggaactactttggggaaaaggtggccctgtacttcgtctggctgggctggtacacctacatgctggtgccggccgccctgacgggcctcttagtctttctgagcggattctcgctgtttgaggccagccagatcagcaaggagatctgtgaggcccacgacatcctcatgtgtcccctcggcgaccacagccgcaggtaccagcggctctcggaaacctgcacttttgccaagctcacccacctctttgacaatgatggcacggtggtgttcgccatcttcatggctctctgggccacggtgttcctggagatctggaagcggcagcgcgcccgcgtggtcctgcactgggacctgtacgtgtgggacgaggaacaggaggaaatggcacttcagctcattaactgccccgactacaagctccggccataccagcactcctacctacgcagcaccgtcatcctcgtcctgaccctgctcatgatctgcctcatgatcggcatggcccacgtcctggtggtctaccgcgtcctggcctccgcgctcttcagcagctcggccgtgcccttcctggaggagcaggtgaccacggccgtggtggtgaccggggctctggtgcactatgtgaccatcatcatcatgaccaagatcaacaggtgcgtggccctgaagctttgtgacttcgagatgcccaggaccttctcggagcgagagagcaggttcaccatccgcttcttcacactgcagttcttcacccatttctcgtctctcatctacatcgccttcatcctgggcaggatcaacggccaccccgggaagtccacgcgcctggcgggcttgtggaagctggaagagtgccacgccagcggctgcatgatggacctcttcgtgcagatggccatcatcatgggcctgaagcagacgctcagcaactgcgtcgagtacctggtcccgtgggtgacccacaagtgccgctctctgcgggcctccgagtccgggcacctgccccgggaccccgagctcagggactggcggcgcaactaccttctgaacccggtcaacaccttcagcctgttcgacgagttcatggagatgatgatccagtacggcttcaccaccatcttcgtggccgccttcccgctggcgccgctgctcgcgctcttcagcaacctcgtggagatccgcctggacgccatcaagatggtctggttgcagcggcgcctggtgccgcgcaaggccaaggacatcgggacctggctgcaggtgctggagaccatcggtgtgctggcggtcattgccaatgggatggtcattgccttcacatctgagttcatcccccgagtggtctacaagtaccgctatagcccatgcctgaaagaaggcaactctactgtcgactgcctcaagggctacgtcaaccacagcctgtccgtcttccacaccaaggacttccaggaccctgatgggattgagggctcagaaaacgtgactctgtgcagatacagggactaccgcaatccccccgattacaacttctccgagcagttctggttcctcctggccatccgcctggccttcgtcatcctctttgagcacgtggccttgtgcatcaagctcatcgccgcctggttcgtgcccgacatccctcagtcggtgaagaacaaggttctggaggtgaagtaccagaggctgcgtgagaagatgtggcatggaaggcagaggctgggtggggtgggggcaggctctcggcccccaatgcctgcccatcccaccccagcatccatcttcagtgccaggagcacagacgtgtagggccagagcccgtccagaggccaccaggagctgagacagtgccaccaccagcacctcccacaagcccaccgctgtgcgtgttgaggggtgctgtgagaaggctgtgcccatgtggggccgcaggaatcccctgtatgttcagggctgtgagctgccaccctattccgcctgctccgtctttgtgggggctctcaggcttggcacagccctgacttgaactctgggtgaccctgggcacccacagaactgggagtgagggctcctcaggcagccacaaggcaggaaaactggcgcaaatttcctgggcctccctctgacttctgggcgccagatcctgccgtgcccccatcctggctgttgggggtgtcctgagcccacctcgctggcctgttcccttcagccaacccgtttctgcagtaaaattaagcctgtctgtcttgcaaaa

SEQ ID NO: 807 - DNA, 3133 bp, Homo Sapiens
  NM_001012506
aattggcgtagcgcttgctgagcggcggcggcaaccgacgtacacaaggggcttgagcgttctgtggagagagtgcgagagatggtttaaagcttgaaactgaattactggatggaaaaaccaagctaatattgtctccatatgaacataaatcaaaaatttctgtgaagatgggaaataaggccaagattgcaaaatgtcctttaagaacaaaaactgggcacattctaaaatcaacacaagatacttgtattgggagtgaaaaacttttgcaaaagaagccagttggttcagaaacatcacaggcaaaaggtgaaaaaaatggaatgactttttcatccactaaggatttatgtaaacaatgtatagataaagactgtcttcatatccagaaagagatttcacctgcaacccctaatatgcagaagactagaaacaccgtaaatacatctctagtaggtaaacagaagcctcacaaaaaacacatcacagctgaaaacatgaagagcagtttggtgtgtctaacacaagaccaactacaacagattttgatgactgtaaaccaaggaaatagatctctttccctgactgagaatggaaaggaggcaaaaagtcaatatagtctatatttaaacagtatttctaatcagccaaaggatgagaacattatgggattattcaaaaaaactgaaatggtttcatctgtcccagctgaaaataaatctgtcttaaatgaacatcaggagacatctaaacagtgtgagcaaaaaattgccatagagaatgaatggaaaccagctgatatattcagtactctgggggaaagggaatgtgatagaagttcgttggaagcaaaaaaagcccagtggaggaaagagctagatgaacaggttgctttaaagaagaaagaaaaagaagtttctgaaaaatggaatgatccttggaaaaaatctgaaagtgataaaataatatgggaaaaacatcaaattcttgaccaatctagggaaacagtactgctggagcaccctttcagtgctgtgaaacaagaactgcaaagaaaatggattgaagagttgaataagcaaatagaagatgaccgtcaaagaaaaatagaggaaaaaattatatattcaaagggtgaggaacatgacagatgggcaatgcactttgattcattaaagagttatcctggttctcaatctcagctgttctctcagtcaacacacaaacaacctgagtacttctgtgtctctcctgacactcaggagctggctgatgtcagcagtgtttgtacacctacaaccggaagccaggttgaaccttcagaggaggagcatatagcaaaacctattaaggatgtggttatggcaaacagtaagaaaacaaactttctccgttctatgactgctctcttggacccagctcagattgaggaacgagacagacgacgacaaaaacaattagagcatcagaaagccatcactgcccaggtagaagagaagcgcaggaagaaacaactggaggaagagcaaagaaagaaggaagaacaagaagaggagcttcgcttagcacaggaacgtgaagagatgcagaaacagtatgaagaagacatacttaagcaaaaacaaaaggaagaaatcatgactctcaagacaaatgagctattccagacaatgcagcgagcacaggaactggcacagagactaaaacaagaacaaagaatccgagaattggcgcaaaagggacatgacacttctagactgattaaaaatcttggtgttgatacaatacaaatggaatataatgcatctaacatttcaaattcaagacatgattctgatgaaatcagtggtaaaatgaatacatatatgaattctacgacttctaagaaggatactggtgtgcaaacagatgacttaaatataggaatattcaccaatgcagaatcacattgtggatcattaatggagagggacatcacaaattgttcatctcctgagatttcggcagaacttattggacagtttagcaccaagaaaaacaagcaagaactaactcaggataaaggagccagcttagaaaaagaaaacaatcggtgtaatgaccagtgtaatcagttcacaagaatagagaaacaaacaaaacacatgaagaaatatcctaaaaggcctgattggaatataaataagccacctaaaaggtatattccagcatcagaaaagtaccctaaacagcttcaaaagcagagagaagaaaaaaaagtaaggaggcagatggaattgcttcatttggtagaaaaaaataatcctgggcacctctctcaaaacagaggcatttcaccagaaatttttcattcatctcatcaagaaacggagtcaaagttgaggtggcatctagtcaaaaaggaagaagagcctctgaatattcattcattcagcaaggaaaggtctccatcatcaccagttccagtagtgaaaaacagaacccaacaaactcaaaatacattacatttaccactaaaaaacagtagctatgagagagagaatttgatctcaggaagtaatcaaacagaattatcatctgggatttctgaatcatcccattttattccgtatgttcgaacaaatgagatctattaccttgatcccgatgcaccattgtctgggccttcaacccaggaccctcagtaccaaaattcacaagactgtggccaaaaacgacagctatttgattctgactgtgtcagggatccacttcttaatcctaacatggtgaaaaatagggatcgacagcaagcaatccttaagggactttcagaactgagacagggccttctccagaagcaaaaggagttggaaagtagtctcctgcctttagctgaaaatcaagaagagagttttggttcttcattttaaatgtagaaaatcaaatccttcacatttgatttgtgtcttccaaattataaaatgtgctcactggctcaactgtatttttcaaatagcctagatttacttatttttttaaatgctcattaaaaacttgtatactatgtagtaaaatgctgtacttgttctatacaataaaacagatacttcttttgtaaaagcttagtagtaaaaaaaaaaaaaaaaaa

SEQ ID NO: 808 - DNA, 567 bp, Homo Sapiens
  NM_001012507
ccgggcgcgttccgttggcggcggattcgaacgttcggactgaggtttttctgcctgaagaagcgtcatacggaccggattgttttcgctggcccagtgtccccggagcttgtgtgcgatacagagagcacctcggaagctgaggcagctggtacttgacagagaggatggcgctgtcgaccatagtctcccagaggaagcagataaagcggaaggctccccgtggctttctaaagcgagtcttcaagcgaaagaagcctcaacttcgtctggagaaaagtggtgacttattggtccatctgaactgtttactgtttgttcatcgattagcagaagagtccaggacaaacgcttgtgcgagtaaatgtagagtcattaacaaggagcatgtactggccgcagcaaaggtaattctaaagaagagcagaggttagaagtcaaagaacatattcttgaaagttatgatgcattcttttgggtggtaacagatcataaagacattttttacacatcagttaatatgggattattaaatattggctataagtgaaaaaaaaaaaaaaaaaa

SEQ ID NO: 809 - DNA, 2220 bp, Homo Sapiens
  NM_001012511
aaccggaaggggggctgtgaggacgtgttccgaggaagccagagccggagccgtggcctgcggggccggcgacatggatcccctgttccagcaaacgcacaagcaggtccacgagatccagtcttgcatgggacgcctggagacggcagacaagcagtctgtgcacatagtagaaaacgaaatccaagcaagcatagaccagatattcagccgtctagaacgtctggagattttgtccagcaaggagccccctaacaaaaggcaaaatgccagacttcgggttgaccagttaaagtatgatgtccagcacctgcagactgcgctcagaaacttccagcatcggcgccatgcaagggagcagcaggagagacagcgagaagagcttctgtctcgaaccttcaccactaacgactctgacaccaccataccaatggacgaatcactgcagtttaactcctccctccagaaagttcacaacggcatggatgacctcattttagatgggcacaatattttagatggactgaggacccagagactgaccttgaaggtggggtccctgctgggggacagagagaaggcctcttgttttagcctcatccaacagtttagtaactgtgtttatattttgattacgtgtcctcaaattgtgatattttgatgacaagacagagcccttgagtttgggatcctttctgttggagttgagttattgtgagcctgaaagtacccagttcctttgccagtgcttgaaacaaaccatgaagtggcctctcttaggatccaggtcttttcccatttactgaacttatcatgaaagtgagtgctactacgaggggtccaatcacaggctgagaaattgtgttacagaatctactcttggaagaatgaagacgtggctgtcctttggtacctcgctttaaggtggctttcccttaggacccctactgtggactgccttataactaaaaccttttgtattttagtaactgaatccccactgtgcagtgttagggctgcctggttgtttgcagtagattagagctttagaagcttctagagcttctaaagcccgtgctggtgatcccagcgactcttcactccctagccttaggtattcctagaagccctgaccagttggcactgctgagactccagcccctgggagtggtttacagaaacattacacagactctgatgtcagtcatgatgtttcagcctctgcccttttcctgtatcaaccctgatggataatagggcgtgggttctgtctgttatcagggtgtggtcccctgtgaatgaagcactcccagccactgagctgtgagaaacagtcactcggaagtgtgagctttatcttagtttttgttggatcatgttgagtctgtcagctccacaggacttcagtacgtttctgaacagtccctgccatctctacgggggagagggtcaggcaagctgcaagtgacactcacctcctgctgacagttgcagtgtctcagatggcctggaagggtggtctccagcagcctgctgggcgctcccctttcatgagagccacctgcagtgacctgaactgatacatgttgattagtctgccctttctttagaaaactgctactctccttttcatatctcagaaaaacagtagaggccttttaggaccaaactccatgtcacactgatgaagagccagtgggggttagagcgtcctgttaaggcacatgctaacttcccactcaagtctggcagcgctggggcatcagcacacctcttgccacccacactgataccagaggggaaggctgtgaggtggctgggggttgagacttgaggtttctaactttcctctgcacacctgtggctacctggtgtttgtctcttgattccctccacctgcctcacaccctgcctccgtcgggattttccacctacaccattcaaaaggaacataggagagggcatgaaggggctaggctgaagcactctgatgactggggccaatttgtggctgaaaatgaatacattttttgaaatttatggtcattttcaagtgatttagaaggttgatccttagcctcatacagtgatgaaataatctgtgtgttcagagccaagcaggactttagcaagagtctgattgtattgtcactatctcggggaaaaaaaaatacaaatacatttctctgatctctgatggcaatgaagtttgacttgtaa

SEQ ID NO: 810 - DNA, 7295 bp, Homo Sapiens
  NM_001012515
aggtcagggggctggggacgcgcgtggggatcgctacccggctcggccactgctgggcggacacctgggcgcgccgccgcgggaggagcccggactcgggccgaggctgcccaggcaatgcgttcactcggcgcaaacatggctgcggccctgcgcgccgcgggcgtcctgctccgcgatccgctggcatccagcagctggagggtctgtcagccatggaggtggaagtcaggtgcagctgcagcggccgtcaccacagaaacagcccagcatgcccagggtgcaaaacctcaagttcaaccgcagaagaggtatgagtctaacatcaggaagccgaaaactggaatattaatgctaaacatgggaggccctgaaactcttggagatgttcacgacttccttctgagactcttcttggaccgagacctcatgacacttcctattcagaataagctggcaccattcatcgccaaacgccgaacccccaagattcaagagcagtaccgcaggattggaggcggatcccccatcaagatatggacttccaagcagggagagggcatggtgaagctgctggatgaattgtcccccaacacagcccctcacaaatactatattggatttcggtacgtccatcctttaacagaagaagcaattgaagagatggagagagatggcctagaaagggctattgctttcacacagtatccacagtacagctgctccaccacaggcagcagcttaaatgccatttacagatactataatcaagtgggacggaagcccacgatgaagtggagcactattgacaggtggcccacacatcacctcctcatccagtgctttgcagatcatattctaaaggaactggaccattttccacttgagaagagaagcgaggtggtcattctgttttctgctcactcactgcccatgtctgtggtcaacagaggcgacccatatcctcaggaggtaagcgccactgtccaaaaagtcatggaaaggctggagtactgcaacccctaccgactggtgtggcaatccaaggttggtccaatgccctggttgggtcctcaaacagacgaatctatcaaagggctttgtgagagggggaggaagaatatcctcttggttccgatagcatttaccagtgaccatattgaaacgctgtatgagctggacatcgagtactctcaagttttagccaaggagtgtggagttgaaaacatcagaagagctgagtctcttaatggaaatccattgttctctaaggccctggccgacttggtgcattcacacatccagtcaaacgagctgtgttccaagcagctgaccctgagctgtccgctctgtgtcaatcctgtctgcagggagactaaatccttcttcaccagccagcagctgtgacccccgccggtggaccccgtggcgttaggcaaatgcccaacctccagatacctccgatgtggagagggtgttatttagagatcaaggaaggaagtcatccttccttgatatatatacagcctttgggtacaaattgtgtggtttcttgaggattggactcttgatggatttctatttttatataactatacagtaagcatttgtattttctctctctaggtataagttactagtttggaatgtccatcaggacctttaataaatgagttaaaaatttgtcttatgagacacacctatttaagtacagattttggctttattgcccaaaaccctcctgaaagggtacggagagtcccctctgtgggctggcagtgtgaatgagatctgtttagtctcgtgcatatagttgctgttttttaaatgaacacagttgagtatttgaagtgaatttgaaaaagaaatgttacttaatctttccctaagcccatgggttacagaatgctagggaggcaatttggttacctgcaatggctgcttttgccagcgaggccaccattcattggtcatcttggtatttgtgtgtgaatctcactttcctcaatgtaaaaaggaatcaagtatggatttcagaggtgctcttagattccccatacacccaagggtaataaacgtgtacaagtacagtgttcatgatacgtgccttggtgggagtccgtggtgccacagggaaggggctcccactgcttctggtctccagggacagtgctgctggaaaggctagtgatgagcttcaccctggagctcctcccgggaccttgcaagcctctccatccagcatcttctctatcttagttgaatgccttctttctgaacatttgttttaagaattattttataaagtcaacaatactttgcttgaattctttcttaatttacgattttttattataaaaatgtatagtgatacaatgggacatgtgaagaatacagaaaagtaaccactttaatgcaataactgttatcataatattgtatttcgtggtagtcctttcctgtagatatttttaatgccatttaatgccattgtcaccttggatttatgagtgaaaagtgtttctaaaaatatagaaataatgtcagatcagagtctgatcttctatgtttgtatttaaatggattaaaagatccccggtggttccatgaagaatttgtaaagatcactttctctttcctccaagccctgaaactttgttcttcaaaagagcgtttctttttttttttttttttagccagtttataaagtggaagtattaggagattcataaatcttctatattgagaattggctatgttaataaatattacaacatcattaaggttttagctaagtttgattcatgctgtctgttaaatcaaaactgatctaaatcagaattattaaatgtgaggagcttttttaatacaggaaaagaaacatgtcatccacttgagttaatagttttcctacgttgatgacagccctcatgagtagcatccacatttttaaaatttcaaattggtttttctactagtagattgtgtttctagagaaagatacaaggcataggtgattgtttaggattttcctctagcctttgccattacctttttggggatgaggttcacagtagactttgagtgaccgtcccaccgtgaagtgaattctctgagctggtggtgtggtgctggaaggaaggttatttttggagccactctctccccttaaggatatttcccaagggcctgcttcaattctttgatgactttagaggtgaaaaaatatttttatggagatgatgcagaaaactccaattcaggagcccttgcgagtatatctgaagcacttatttgctaaggaaacctgaattgatagcagtactgtgctgtctggaataatgtccttgatactgagttgggaccagactggcttttatagtgacaggcaaagaggaatttattgagatcactgctcatggcatttgttgctgtaagaagtgttgcctttgattgttactaaccacggatgggtaacggtcatacattaggctagtgtttggtaggacaaaatctttttagagctttgagaattgtcatcctgttggtcaactttgaaatacaaatgtttgccctggtaattagcaatgaactgctggcagtttcttcagctgtgtatatacggatctggcttttaattgatgaatcaacttctacagaaacttttgcagggacagtgttgatgaggcagtttagcttgccagggtgatgataaagcccaggtccctgcatgtatagtgctcttctaaagaatatgcattcttgaactacttaactttttaaaaatcacaataaatttttgcactcaaaatttgcttcgtatcaggagaaatgaactcattgttttgttttgtttttttttttttttaagatggagtcttgctatgtcacccaggctggagggcagtggtgcgatctcggctcactgctacttccacctcctgggctcaagtgatcctcccacctcagcctccaagtagctgggactacaggagtgcttcaccacgctgggctacttttttatattttttgtagagatggggttttgccatgttgtccaggctggtcttgaactcctgggctcaagggattctcctgcctcagtctcccaaagtgctgggattacaaggatgagcctctgcacctggccctgaactcattattaaaagccctttaaatgtgaggctgggtgccgtgccttacatgtgtaattccaatactttggaaggccaaggttggaggattgcttgatcccaagagttcaagaccagcctgggcaacatagggagaccctgactctacaaaaaataaagtaaaaattaactgggtgtagtgtcacatgcctgtagttccagctacttaggaggctgaggtggtaggattgcttgagcccagcagtttgaggttgcagtgaggtgtgattgcaccactgcactccagcctgggtgacagaggaagaccctgtcccaaaaccaaaaaaaagaaaagaaatacagagactgggtcatttacaaaggaaagaggtttaattgactcggttcggctttctgaggaagccttaggaaattgacaatcatggcagaaggggaagcagatgtcttacatggcagtgagtgagagcaagcaaaggggaagagcccccttataaaaccatcagatctcgtgagaactggctgtcacaagaacagcatgggggaactgtctccatgttccaatctccttccaccaggtccctccctcaacacgtggggattatggggattacaatttgaaatgagatttgggtggggaacagagccaaatcatatcattccaccctggcccctcccaaatcacatgtcctttttacatttcaaaaccaatcatgccttcacaacagtcctccagagtcttaactcattccagcattaacccaaaagtccaagttcaaagtctcatccaagacaaggcaagtcccttctgcctgtgagcctgtaacattaaaagcaagttagtgacttccaagatacaatgggagtacagacattggtaaatgttcccattccaaatgggagaaattggccaaaacacaggggctacaggccccatgcaccactgcactccactgtgcaagtctgaaacccggcagggcactccttaaattttttttttttttttttgagatggagtctcgctctgttgcccaagctggagtacagtggcacgatctcggctcactgcaacctccgcctcttgggttcaaaggatcatcctgcctcagcctccggagtagctgggctactcaggcgtgtgccaccatgcccggctaatttttgtatttttagtagagatggggcctgaccatgttggtcaggctggtctctaattcctgacctcgtgatccacccgcctcagcctctgaaagtgttgggattacaggcgtgagccaccatccccggcctactcaataaatcttaaagttccggaataatctcctttgactccatgtctcacctccaggtcacgctgatgcaagaggtgggctaatctttctagtaaattccatatttaattcaagaaaccataacttaaggcatgtaaaagagatcctttgctcaatgtgatgccattgtgcttatccaaagtatattattattacccacaaagggtgagagattaggctgcagccataccccaagtggagtgagcagcaagacctgccccctgctcagagtgtagatgactgggggcacctgcattcctaggggctctgccgtatgagctcctgtcgatgcggcaaaggaccaccttgcccaacgacagcgggaaggcagaatttaaagctggcagctgtaagcgaacgtctatgtgtgcgcacgggggcacgtgaaggcacaggtgcatcagccaagaacctccaattcacctcttaaccttctcacctcacctgaaaccccttctgccagaatcctgaaggtggcccaggaacagggctcctaacgttaggtggaaatgggaaattcattgagatgtcacaagctggaataagaaaattctgagctcacccggaaactaatgccctaaattaagattattcagcttctcaatttttaatagcaaaatggagacctgagtgtggataacttttagtatctgtgggggatcctggaaccaattccctgccaatatagaaggacaactgtctacagtacttgaagtattattaactacattcgccatgctgtatgttagatccccagaacatatttatcctgcatatctaaaattttgatcattttacaaactttctattttttttgtcaattttctccagctagacacttgtgcaatacggctattatctgatctttgccttaaatgttgtgcttcttttccatatgcacgtattttgcaaaatataaagtgtgtagagctatatagcactcagccaagtggtgggtacctgcaggtgcttcagagaagtaaattgatgctgctaatatttgttgaatggcacgaatatgatgagcaatagcaggtggtgcccttcagccagaccatcgctccgtgcgtctgatgcatcttgccaaagagtagttctgggaggtggttgcctctagagaacacattcctcctattctggggtcccgtgagagaaagaaatgcttttgcttttgatgtgggactcttactaagcctttcttcagagaaaaggaagtgaaaaatgcaccccatgataatcagtttcttacaacatactgtgatagtaccggcttcgttgtttttagctggaatcattagcttccatttttagaataacagctattggctaaattaggctacagtaggccattaagatggatgttggaattaaaaacatttttggaaaaaagcctgctttgagcctttgttataagcccttgggtagagatctgggtcctgtttctgatttcttgtgagccttcactctgacagttttgtttccagaaacacactcttagcctgctcctgaaatgggaacagacaggccaacttcccctctccagtctcccctgcgggtcaaagctttactttcctgtcatgttaagaaagaatagatttaaccttgataatccatgtagtattctgtatttttaccttttccttatctgaaaaaaagtgtatatatggcatggaattgattgcacaggcacatggcatgttggcttgtgaaccaattgttaaaatttcaagttaatcattaaaataatatctttcaaattaagttatattaaaaacaaaggtaacattctaaattcaaaaaaaaaaaaaaaaaa

SEQ ID NO: 811 - DNA, 2012 bp, Homo Sapiens
  NM_001012516
agagagagggacgcgagcgggatccaaacttccggtgcctgcagagctcggagcggcggaggcagagaccgaggctgcaccggcagaggctgcggggcggacgcgcgggccggcgcagccatggtgaagattagcttccagcccgccgtggctggcatcaagggcgacaaggctgacaaggcgtcggcgtcggcccctgcgccggcctcggccaccgagatcctgctgacgccggctagggaggagcagcccccacaacatcgatccaagagggggggctcagtgggcggcgtgtgctacctgtcgatgggcatggtcgtgctgctcatgggcctcgtgttcgcctctgtctacatctacagatacttcttccttgcgcagctggcccgagataacttcttccgctgtggtgtgctgtatgaggactccctgtcctcccaggtccggactcagatggagctggaagaggatgtgaaaatctacctcgacgagaactacgagcgcatcaacgtgcctgtgccccagtttggcggcggtgaccctgcagacatcatccatgacttccagcggagggggacctacctgccgcagacgtacatcatccaggaggagatggtggtcacggagcatgtcagtgacaaggaggccctggggtccttcatctaccacctgtgcaacgggaaagacacctaccggctccggcgccgggcaacgcggaggcggatcaacaagcgtggggccaagaactgcaatgccatccgccacttcgagaacaccttcgtggtggagacgctcatctgcggggtggtgtgaggccctcctcccccagaaccccctgccgtgttcctcttttcttctttccggctgctctctggccctcctccttccccctgcttagcttgtactttggacgcgtttctatagaggtgacatgtctctccattcctctccaaccctgcccacctccctgtaccagagctgtgatctctcggtggggggcccatctctgctgacctgggtgtggcggagggagaggcgatgctgcaaagtgttttctgtgtcccactgtcttgaagctgggcctgccaaagcctgggcccacagctgcaccggcagcccaaggggaaggaccggttgggggagccgggcatgtgaggccctgggcaaggggatggggctgtgggggcggggcggcatgggcttcagaagtatctgcacaattagaaaagtcctcagaagctttttcttggagggtacactttcttcactgtccctattcctagacctggggcttgagctgaggatgggacgatgtgcccagggagggacccaccagagcacaagagaaggtggctacctgggggtgtcccagggactctgtcagtgccttcagcccaccagcaggagcttggagtttggggagtggggatgagtccgtcaagcacaactgttctctgagtggaaccaaagaagcaaggagctaggacccccagtcctgccccccaggagcacaagcagggtcccctcagtcaaggcagtgggatgggcggctgaggaacggggcaggcaaggtcactgctcagtcacgtccacgggggacgagccgtgggttctgctgagtaggtggagctcattgctttctccaagcttggaactgttttgaaagataacacagagggaaagggagagccacctggtacttgtccaccctgcctcctctgttctgaaattccatccccctcagcttaggggaatgcacctttttccctttccttctcacttttgcatgtttttactgatcattcgatatgctaaccgttctcagccctgagccttggagaggagggctgtaacgccttcagtcagtctctggggatgaaactcttaaatgctttgtatattttctcaattagatctcttttcagaagtgtctatagaacaataaaaatcttttacttctgaaaaaaaaaaaaaaaaaaaaaaaaaaaaaaaaaaaaaaaaaaaaaaaaaaa

SEQ ID NO: 812 - DNA, 2483 bp, Homo Sapiens
  NM_001012614
tcgtcggagcgcggctcagcggcgcggcggagactcggcacggcggcggccaggcgcaggcgggcgggcggagcagcggacggcgccgaggccgccccacgcgccgggctcgcggcggcgcagcgcgccggagtggtcggggcccgcggccgctcgcgcctctcgatgggcagctcgcacttgctcaacaagggcctgccgcttgtaagactttgaccccgacgcaggcttcagtgattgccgcggatcagaagcctgagcactttggctcgagacaattaaggacgtgggatgaggctccgagacaggacgcggttctgcctggggatcctgaagataaaaagctttgaaaagtcgaattcatggtcgtggaagctgagcccatattaagagatgtcaggcgtccgacctccgatcatgaacgggcccctgcacccgcggcccctggtggcattgctggatggccgggactgcacagtggagatgcccatcctgaaggacgtggccactgtggccttctgcgacgcgcagtccacgcaggagatccatgagaaggtcctgaacgaggctgtgggggccctgatgtaccacaccatcactctcaccagggaggacctggagaagttcaaagccctccgcatcatcgtccggattggcagtggttttgacaacatcgacatcaagtcggccggggatttaggcattgccgtctgcaacgtgcccgcggcgtctgtggaggagacggccgactcgacgctgtgccacatcctgaacctgtaccggcgggccacctggctgcaccaggcgctgcgggagggcacacgagtccagagcgtcgagcagatccgcgaggtggcgtccggcgctgccaggatccgcggggagaccttgggcatcatcggacttggtcgcgtggggcaggcagtggcgctgcgggccaaggccttcggcttcaacgtgctcttctacgacccttacttgtcggatggcgtggagcgggcgctggggctgcagcgtgtcagcaccctgcaggacctgctcttccacagcgactgcgtgaccctgcactgcggcctcaacgagcacaaccaccacctcatcaacgacttcaccgtcaagcagatgagacaaggggccttcctggtgaacacagcccggggtggcctggtggatgagaaggcgctggcccaggccctgaaggagggccggatccgcggcgcggccctggatgtgcacgagtcggaacccttcagctttagccagggccctctgaaggatgcacccaacctcatctgcaccccccatgctgcatggtacagcgagcaggcatccatcgagatgcgagaggaggcggcacgggagatccgcagagccatcacaggccggatcccagacagcctgaagaactgtgtcaacaaggaccatctgacagccgccacccactgggccagcatggaccccgccgtcgtgcaccctgagctcaatggggctgcctataggtaccctccgggcgtggtgggcgtggcccccactggcatcccagctgctgtggaaggtatcgtccccagcgccatgtccctgtcccacggcctgccccctgtggcccacccgccccacgccccttctcctggccaaaccgtcaagcccgaggcggatagagaccacgccagtgaccagttgtagcccgggaggagctctccagcctcggcgcctgggcagagggcccggaaaccctcggaccagagtgtgtggaggaggcatctgtgtggtggccctggcactgcagagactggtccgggctgtcaggaggcgggagggggcagcgctgggcctcgtgtcgcttgtcgtcgtccgtcctgtgggcgctctgccctgtgtccttcgcgttcctcgttaagcagaagaagtcagtagttattctcccatgaacgttcttgtctgtgtacagtttttagaacattacaaaggatctgtttgcttagctgtcaacaaaaagaaaacctgaaggagcatttggaagtcaatttgaggtttttttttttgttttttttttttttgtatgttggaacgtgccccagaatgaggcagttggcaaacttctcaggacaatgaatccttcccgtttttctttttatgccacacagtgcattgttttttctacctgcttgtcttatttttagaataatttagaaaaacaaaacaaaggctgtttttcctaattttggcatgaacccccccttgttccaaatgaagacggcatcacgaagcagctccaaaaggaaaagcttgggcggtgcccagcgtgcccgctgcccatcgacgtctgtcctggggacgtggagggtggcagcgtccccgcctgcaccagtgccgtcctgctgatgtggtaggctagcaatattttggttaaaatcatgtttgtgactgtaaccatttgtatgaattattttaaagaaataaaaatcctggaaagagccagcgtg

SEQ ID NO: 813 - DNA, 919 bp, Homo Sapiens
  NM_001012633
ccccagccagctgtcccgagtctggactttccctctgcccctccccactctcaggctggtggggtggggaaagcagcccattcctgggctcagagactcccaccccagctcagagggagcaggggcccagccagggacggaccctcattcctcccagggaccccagacctctgtctctctcgggccttggctccttgaacttttggccgccatgtgcttcccgaaggtcctctctgatgacatgaagaagctgaaggcccgaatgcaccaggccatagaaagattttatgataaaatgcaaaatgcagaatcaggacgtggacaggtgatgtcgagcctggcagagctggaggacgacttcaaagagggctacctggagacagtggcggcttattatgaggagcagcacccagagctcactcctctacttgaaaaagaaagagatggattacggtgccgaggcaacagatcccctgtcccggatgttgaggatcccgcaaccgaggagcctggggagagcttttgtgacaagtcctacggagccccacggggggacaaggaggagctgacaccccagaagtgctctgaaccccaatcctcaaaatgaagatactgacaccacctttgccctccccgtcaccgcgcacccaccctgacccctccctcagctgtcctgtgccccgccctctcccgcacactcagtccccctgcctggcgttcctgccgcagctctgacctggtgctgtcgccctggcatcttaataaaacctgcttatacttccctggcaggggagataccatgatcgcggaggtgggtttcccagggcaaggctgatctgttgccgtattagtccgttttcacacagctataaagaatgcctgagactgggtgatgtataaagaaaagaagtttaactga

SEQ ID NO: 814 - DNA, 880 bp, Homo Sapiens
  NM_001012636
gccttggctccttgaacttttggccgccatgtgcttcccgaaggtcctctctgatgacatgaagaagctgaaggcccgaatgcaccaggccatagaaagattttatgataaaatgcaaaatgcagaatcaggacgtggacaggacgacttcaaagagggctacctggagacagtggcggcttattatgaggagcagcacccagagctcactcctctacttgaaaaagaaagagatggattacggtgccgaggcaacagatcccctgtcccggatgttgaggatcccgcaaccgaggagcctggggagagcttttgtgacaaggtcatgagatggttccaggccatgctgcagcggctgcagacctggtggcacggggttctggcctgggtgaaggagaaggtggtggccctggtccatgcagtgcaggccctctggaaacagttccagagtttctgctgctctctgtcagagctcttcatgtcctctttccagtcctacggagccccacggggggacaaggaggagctgacaccccagaagtgctctgaaccccaatcctcaaaatgaagatactgacaccacctttgccctccccgtcaccgcgcacccaccctgacccctccctcagctgtcctgtgccccgccctctcccgcacactcagtccccctgcctggcgttcctgccgcagctctgacctggtgctgtcgccctggcatcttaataaaacctgcttatacttccctggcaggggagataccatgatcgcggaggtgggtttcccagggcaaggctgatctgttgccgtattagtccgttttcacacagctataaagaatgcctgagactgggtgatgtataaagaaaagaagtttaactga

SEQ ID NO: 815 - DNA, 7368 bp, Homo Sapiens
  NM_001012651
gtggcattgggaggcccggcctgggggaggagacggcgttccgttagcggcgttggggtttggctgcagtggcagtgctttctcttctgctcacggggacccgctcaggctggaggccagccagctcttgccgccacctcggtcgcgatgggggcgcaggaccggccgcagtgccacttcgacatcgagatcaaccgggagccggttggtcgcattatgtttcagctcttctcagacatatgtccaaaaacatgcaaaaacttcctttgcttgtgctcaggagagaaaggccttgggaaaacaactgggaagaagttatgttataaaggttctacgttccatcgtgtggttaaaaactttatgattcagggtggggacttcagtgaaggtaatggaaaaggtggagaatcaatttatggtggatattttaaagagaatgtggtcttttgcaaaatgaaaagatgaaaactttattctcaaacatgacagagcgttccttttatcaatggcaaatcgagggaaacataccaatggttcccagtttttcataaagagtgttacaccgtgcgctccaaagtaccacaaagcctgctccacacctggatggggtgcatgtagtctttggactggttatttctggttttgaagtaatcgaacaaattgaaaatctgaagaccgatgctgcaagcagaccatatgcagatgtgcgagttattgactgtggagtacttgccacaaaatcaataaaagatgtttttgagaaaaaaaggaagaaaccaactcattcagaaggctcggattcctcttccaattcctcctcttcttcagaatcatcttcagaaagtgaacttgaacatgagagaagcagaaggaggaaacataagaggaggccaaaagttaaacgttctaaaaagaggcgaaaggaagcaagcagttcagaagagccaaggaataaacatgcaatgaacccaaaaggtcactctgagaggagtgataccaatgaaaaaaggtcagttgattccagtgctaaaagggaaaaacctgtggtccgcccagaagagattcctccagtgcctgagaaccgatttttactgagaagagatatgcctgttgttactgcagaacctgaaccgaagattcctgatgttgcacccattgtaagtgatcagaaaccatctgtatcaaagtctggacggaagattaaaggaaggggcacaattcgctatcacacacctccaagatcaagatcctgttctgagtcagatgatgatgacagcagtgaaactcctcctcactggaaagaggaaatgcagagattaagagcatatagaccacctagtggagaaaaatggagtaaaggagataagttaagtgacccctgttcaagccgatgggatgaaagaagcttgtctcagagatccagatcatggtcctataatggatattattcagaccttagtacagcaagacactctggccaccataaaaaacgcagaaaagaaaaaaaggttaagcataaaaagaaagggaaaaagcagaaacactgcagaagacacaaacaaacaaagaagagaaggattcttataccgtctgacatagaatcctcaaaatcttccactcgaagaatgaaatcctcttgtgatagagaaaggagttctcgttcttcctcattgtcatctcatcactcatcaaagagagactggtctaaatctgataaggatgtccagagctctttaacccattccagcagagactcatacagatcaaaatctcactcacagtcttattctagaggaagctcaagatcaaggactgcgtcaaagtcctcatcacattctcgaagtagatcaaagtccagatctagttccaagtctgggcaccgaaagagagcatcaaaatcaccaagaaaaacagcttctcagttaagtgaaaataaaccagttaaaacagaacctttaagagcaaccatggcacaaaatgaaaatgtagtagtacaaccagttgtagcagaaaatattcctgtaataccactgagtgacagtccccccccttcaagatggaagcctggacagaaaccttggaagccctcttatgagcgaattcaggaaatgaaagctaaaacaacccatttgctacccatccaaagcacttacagtttagcaaatattaaagagactggtagctcatcatcctaccataaaagagaaaaaaattcggaaagtgatcagagcacttattcaaaatacagtgatagaagttcagaaagctcaccaaggtcaaggagcagatcttctaggagtagatcttattccagatcatatacaagatcacgtagtctagctagttcacattcaaggtctaggtctccatcatctagatctcattcacgaaataaatacagtgatcattcacagtgtagtagatcatcttcatatacttctattagcagtgatgatggaaggcgagctaagaggagacttagatccagtgggaaaaaaaatagcgtttcacataaaaagcatagcagcagctctgaaaagacacttcacagtaaatatgtcaaaggtagagacaggtcttcatgtgtgagaaagtatagcgagagcagatcatctttagattattcttcagacagtgagcagtcaagtgttcaggccacacagtcagcccaggaaaaagagaagcagggccaaatggaaagaacacataataaacaagaaaaaaacagaggtgaagaaaaatccaagtctgaacgggaatgccctcattcaaaaaaaagaactttgaaagagaatctttctgatcaccttagaaatggcagtaagcccaaaaggaagaattatgctggtagtaaatgggactctgagtcaaattcagaacgagatgtcactaaaaacagtaaaaatgactcccatccatcctctgacaaggaagaaggtgaggccacatccgattctgaatcagaggttagtgaaattcacatcaaagtcaaacccacaaccaagtcgtccacaaatacttcactgcctgatgataatggtgcttggaaatcaagcaaacagcgcacatcaacttctgactctgaggggtcctgttccaattcggaaaacaataggggaaagccacaaaagcacaaacatgggtcaaaggaaaatcttaaaagagaacacaccaaaaaagtgaaagagaaattgaaagggaaaaaagacaaaaagcataaggctccaaaacgaaagcaagcatttcactggcagcctccactagaatttggtgaagaggaggaggaggagattgatgacaagcaagttactcaggaatcaaaagagaaaaaagtttctgaaaacaatgaaaccataaaagataatattctaaaaactgagaaatccagtgaagaggacctttcaggtaaacatgatacagtgactgtttcatcagatcttgatcagtttactaaagatgatagtaaactcagtatttctcccacagctttaaatactgaggaaaatgtggcctgtttacaaaacattcagcacgttgaagaaagtgttcccaatggagtggaagatgtgcttcaaacagatgacaacatggagatctgcactcctgataggagttccccagcaaaagtagaggagacttcccctctaggaaatgcacggcttgataccccagatataaacattgttttgaagcaggatatggcaacggaacatcctcaagcagaggtagtaaaacaggaaagcagcatgtccgaaagtaaagtgttgggtgaagtggggaaacaggacagcagctctgctagcttggctagtgctggagaaagtaccgggaagaaggaggtggctgagaagagccagatcaacctcattgataagaaatggaagcccctgcaaggtgtggggaacctggcagcacctaatgctgccacatccagtgctgtggaagttaaggtgttgaccactgtgcctgaaatgaaaccacaaggcttgagaatagaaattaaaagcaaaaataaagttcggcctgggtctctctttgatgaagtaagaaagacagcacgcttaaaccgtagaccaagaaatcaggagagttcaagtgatgagcagacgcctagtcgggatgatgatagccagtccaggagtccaagtagatctcgaagtaaatctgaaaccaaatcaagacacagaacaaggtctgtctcctatagtcactcaagaagtcgatcgagaagttccacatcatcttatcgatcaagaagctactctagaagtcggagcagaggatggtacagcagaggccgaaccagaagccggagcagttcctaccggagttacaaaagtcacaggacgtccagcaggagcagatccaggagcagctcatatgatccccacagtcgatccaggtcctacacctacgatagctactatagcaggagtcggagtcgaagtagaagccagagaagtgacagttaccaccgaggcagaagttataatcggcggtccaggagttgtagatcttatggctctgacagtgaaagtgaccgaagttactctcatcaccggagccccagtgagagcagcagatacagttgaaaacgtccggatacaaattatatcttatttgtaaatatctggcaacttagcttaagaaatgtaatgacagtctgttgttctatttcaatatcagaggtgaatttcaaaaatagacacttcttaattgttactggttcatttacatgtggggagaagaatttaaaatacagatatgtctcctaaaaatatttttatgccacattttacagtagccaactatggaaatgaatttcattttcttgaatcaagaaatcgtgaaatttatctatgtataatttgcaatattattttaagtctatttcactctatcttacgtatcccttagaatacagattctttttgcctgtttttccagttttagcatatatgctgccaagcatagaactgtgaaggagaactgttaaaggcggccaaatatttatatactgattacatagagtcttgtacatatgtgctctaaaaacaaaccacccagaattgatactgttggtaaccaggagtataaggcagtggctctggggttcttaattcattcctaacttctttgatacttcacaggattaggaaagtggtcatcatacatcccacacagtctgtattacttcaggcttgtgggcaaggttaggaagaatcaatcagccttaactataaatacctgcactgtctctgaggacttactattttatgttctttttaatcaataccgatcagaagtttaggttataaaaacaattctacttcatgctttggtgcttggtaatttttggtgcgtctttaagcattactcttatatatcatatattaaaataccataaaaatgaaattcagacaaaatcactggcaccaaaaatggtttattctgagctgtcttcactttgactatttggggggcttctctcaagtacagatgtgggttggggtcccctggagcaggcaggattggcagtaagagatattggccactcaagtctactgtgtgtgtgtgcctctggaagagtgaagaatggacttcaaaagtaacatcaaaaatctaactgccaccatcctggagacattttgcagggctttcctttcaagtctttcaagtacaggatattaccacaacagcagctgaactgttgtaaccagcatgtttttcctatttccactgtgacctgcagctgactcaaagccttgcgtgacctgacccaggtgcaagagacaggggaagagggatagagggtatagcataaattacatattttcatggctttgggtggttcctccaaaaataattggacctgtaaaaactagtgtgtgtgtgtgtgtgtgtgtgtgtgtgtgtgtggtttttttttttaatctttactttgaatttgttccccaagtgtacttaatcaccttagtgccagtttaatccagttatgcagaagaaattcatattggttgcctgatgtagagctcagcaccaccctaccacaggccttgtctggtgtatttgggaagtggaaaagagccctcagttggagggagctgacaacccttggtggagggagggtgcccttgaatgtattaaaactatcacccaaagaaggtatgaaaacagggtaaggtggtcagttgtttgccaggtcaatagacagaaagtacattagaaaacaggacttaggccaaacaaacaatactggatactgaatacaaaacagtatgatttatattaaaggtttccaaaggttgcctgcaaaggagaatattactactagtcagcaggaaaaaaatgcattcagaacccaagcagaaactgccaaatgtaattaggttaagaaaagttacccttgggcagtgtattagttttctattgctgtgtgacaaattaccccaaatttagcagtttaaaaaacaatacccatagcagttctgtagctcatgagtctggcacagtgtggctggattctctgctcagggtcttaaaggctgaaataagggttggcaggacaacattccttcatggaggctctggggaagaatctgcttctaagttcattcaggttgttggcggaattcagttctttgctggctctcagctggaggcccctctctcacctcaaggctgcctgcattccttcttatgtggtcccctccagcttcaaaccagccttcctgctctttctcatgcttcatatctctctcccgtcctcctgttttaggggcatatgattagctcaagcccacagatatattttaaggttgattgtgcgatagaacataattgcaggagtactgtctcatctcatcatattcacgggttctggagattagctcattgaaagtgggaggggcattttcaaattctgcctaccacaggcaataactgcccatctcagctgtaggtggaatttttacccagaaaagataggccctagaagcctcatttcttttctccatggaaaaggacagccctctgctgcagcgttcaacttgtgtgtttactgacagagtgaactacagaaatagcttttcttcctaaaggggattgttctacattttgaagttattttttaataaaattgaattatgttgtgtattgtgcttcttaataggaaatgcattattggactgtttttgtaacatcctgtttattgcaaatagctagtatcgttcaaaaactgtataaaatacttttgtacatattagcaatgtctaatttgtatacacttcagttaaatttccctaaaacttgaaaggggaccttgtagaaattaaaatatatacttagtctaagtctgaaaaaaaaaaa

SEQ ID NO: 816 - DNA, 843 bp, Homo Sapiens
  NM_001012715
aggcaaagccgggagaaactgctgagacgaggtggcagcggggaccacgtgagatggcgtatgtggccttgagcgataaacctcacctgtcgggggaggtgggcgaggaagcctgcagctcctggaacccaccacttttctctcccaggcccttgcccaggctgtggcctctgcctggaaccccttttcttcccatccgagcccttcccttcagtgcctcttcctctgggaagtcctctctggtgcccagcccgtcctcttctgcccactctgggtttcgcaccccatgcttaggccctgattgcctgctttgcacacagggctgtgagctccatgagggcaggaaccacatggctgttcacagctgtgttgccagggcctggcctggagaccctcaggaagtgagacatctgaatcctctgctctgtgaccctggcagccaggtagagccatcttggccatggcacccaggcttggagcaagcagcagcctcatgggtggggaaccacgtttccccagcacatcggcaggccctaaggggacattcgcttggctctgccctcagagcactgatgcccgggggacactgccctttgtgtgtcccatgtaagagaggatgcaaccttagagggggcaggggtaaacatggtcccaggccctgttgtcccctcctaagaaagttcccagttctgcctgtccatccctggccttttccctgtgctgtctgggacagtgggtggagctgccgctgagcggtgggacctagaaaacacatactgacctataggaggcactgcccagagctcctaactggggtggggtgcaaaggaaaggtgggtgagg

SEQ ID NO: 817 - DNA, 860 bp, Homo Sapiens
  NM_001012716
ggaggaggggccaaagccaggactttgagaccggcgcgcggtcaagcccaggcagctctccctaaccctccagcactgggcaaacgctgcccgatgacgcccgcctcgggggccacggcatcactggggcgactgcgagcccggccgcggagccgctgggacgcggcttacctcccggctgtcgctgctgtgtgtgttgcccgcgccagtcacgtccctaatgggaccctccgtttcggcgtctgtaaggcgaggaggacgatgcgtcccctccctcgcaggattgaggttaggactaaacggggtccgcagcgcccggcagctcccgagcgctctccccagccgcgcctccctccttcccgccacccgtcccgcaggggcccgcggcgtcacctctcaggctgtagcgcgcctgcatgccgaataccgacagggtgccggtgcccgtgcggtcgtccttcctgacgccgcagcggaggatgtgttggatctgccccaggatttccaggtcccagatgaagagataattctacttactggatataggatgcattagatcttcttaccttaaaaaaaaaaaaaaaggcagcaatgatcaaaatactaataaattactcacagactcagtgtattttttcttggagtaaaagtccaggatgggtaatagaatacctgctgttggcttttggaaaaattggtactgtatgtagcaaaataatgtgaaacccatatgcatggatattcttaacaatttgaagaaatcgtcacagctttcctgggttgttgagcctctaagatggtcttttcctctgatgtgataataaagtgtttattctgaactctaaaaaaaaaaaaaaaaa

SEQ ID NO: 818 - DNA, 1480 bp, Homo Sapiens
  NM_001012727
ccagccccgccgccctcgcaataaggggcctgagcgcgcgggggagaagcgggagcgggagcgggagcgagctggcggcgccgtcgggcgccgggccgggccatggagctgtggccgtgtctggccgcggcgctgctgttgctgctgctgctggtgcagctgagccgcgcggccgagttctacgccaaggtcgccctgtactgcgcgctgtgcttcacggtgtccgccgtggcctcgctcgtctgcctgctgcgccacggcggccggacggtggagaacatgagcatcatcggctggttcgtgcgaagcttcaagtacttttacgggctccgcttcgaggtgcgggacccgcgcaggctgcaggaggcccgtccctgtgtcatcgtctccaaccaccagagcatcctggacatgatgggcctcatggaggtccttccggagcgctgcgtgcagatcgccaagcgggagctgctcttcctggggcccgtgggcctcatcatgtacctcgggggcgtcttcttcatcaaccggcagcgctctagcactgccatgacagtgatggccgacctgggcgagcgcatggtcagggagaacgtgcccatcgtccccgtggtgtactcttccttctcctccttctacaacaccaagaagaagttcttcacttcaggaacagtcacagtgcaggtgctggaagccatccccaccagcggcctcactgcggcggacgtccctgcgctcgtggacacctgccaccgggccatgaggaccaccttcctccacatctccaagaccccccaggagaacggggccactgcggggtctggcgtgcagccggcccagtagcccagaccacggcagggcatgacctggggagggcaggtggaagccgatggctggaggatgggcagaggggactcctcccggcttccaaataccactctgtccggctcccccagctctcactcagcccgggaagcaggaagccccttctgtcactggcctcagacacaggcccctggtgtcccctgcagggggctcagctggaccctccccgggctcgagggcagggactcgcgcccacggcacctctgggagctgggatgataaagatgaggcttgcggctgtggcccgctggtgggctgagccacaaggcccccgatggcccaggagcagatgggaggaccccgaggccagacgcacactgtccgagccctctgctcagccgcctgggacccaccagggtgcagctgggctccagggtccagcccacaagctgcatcaggctctctgggagaggaggggcctggagggccaggagtcccagactcacgcaccctgggccacagggagccgggaatcggggcctgctgctcctgctggcctggaagactctgtggggtcagcactgtactccgttgctgtttttttataaacacactcttggaagtggcaaaaaaaaaaaaaaaaaaaaaaaaaaaa

SEQ ID NO: 819 - DNA, 2639 bp, Homo Sapiens
  NM_001012753
gtccttgcgcagccggtggttgatatccgctgtatccatccccgagagggacctggtacctctacccaggtttctatcgctctgtctcctgcgctgtgcccttctgtagtcacaggagctgtagagaggaccccaggacatctgaaagccaggaaatgatgtttcaggaccctgtggcctgtgaggatgttgctgtgaacttcacccaggaggagtgggctttgctggatatttcgcagaggaaactctacagggaagtgatgctggaaactttcaggaacctgacctctatagggaaaaagtggaaagaccagaacattgaatatgagtaccaaaaccccaggagaaacttcaggagtctcatagaagggaatgtcaatgaaattaaagaagacagtcattgtggagaaacttttacccaggttccagatgacaggctgaacttccaggagaagaaagcttctcctgaagcaaaatcatgtgataactttgtatgtggagaagttggcataggtaactcatcttttaatatgaacatcagaggtgacattgggcacaaggcatacgagtatcaggactatgcaccaaagccatataagtgtcaacaacctaagaaagccttcagatatcacccctcctttagaacacaagaaaggaatcacaccggagagaaaccctatgcttgtaaagaatgtggaaaaacctttatttcccattcaggcattcgaagacgcatggtaatgcacagtggggatggaccttataaatgtaagttttgtgggaaagctgtccattgtctcagattatatcttatccatgaaagaactcacactggagagaaaccgtatgaatgtaaacaatgtgttaaatcctttagttattctgctacccatcgaatacatgaaagaactcacactggagaaaagccttatgaatgtcagcaatgtgggaaagcattccatagttccagttcttttcaagcacataaaagaacccacactgggggaaagccatatgaatgtaaacaatgtggcaaatccttcagttggtgtcattcctttcaaatacatgaaagaactcacactggggagaagccctgtgaatgtagcaaatgtaataaagcattccgtagttacagatcctatcttagacataaaaggagtcacacgggagagaagccttatcaatgtaaggaatgtagaaaagcattcacgtatcccagttcccttcgtagacatgaaaggacccactctgcgaaaaaaccttatgaatgtaagcagtgtgggaaagcattatcttataagttttcaaacacacctaagaatgcgctctggagaaagaccttataaatgttagatatgtgggaaaggcctttattctgccaagtcatttcgaagacatgaaaaaactcacactggagagaaaccctataaatgcatgccatgtggtaaagccttcaatctttccagttcctttcagtatcatgaaaggactcacactggagagaaaccctatgagtgtaagcaatgtgggaaagccttcagatgtgccccacaccttcgaaggcatggtaggactcactggagagaaaccctatgagtgtaaggaatgtgggaaagccttcagatctgcctcacaccttcaaattcatgaaaggacacaaacacacataagaatacactctggagaaagaccttataaatgtaagacatgtgggaaaggcttttattctcccacgtcatttcaaagacatgaaaaaactcacactgcagagaaaccctatgaatgcaagcaatgtggtaaagccttcagtagttccagttccttttggtaccatgaaaggactcacactggagagaaaccctatgagtgtaagcaatgtgggaaagccttcagatctgcctcaatccttcaaatgcatgctgggactcaccctgaagagaagccctacgagtgtaagcaatgtgggaaagccttcagatctgccccacaccttcgaatccatggtagaactcacactggagagaaaccctatgagtgtaaggaatgtgggaaagccttcagatctgccaagaaccttcgaattcatgaaaggacacaaacacacgtaagaatgcactctgtagaaagaccttataaatgtaagatatgtgggaaaggcttttattctgccaagtcatttcaaatacctgaaaaatcttacactggagagaaaccctatgagtgtaagcaatgtgggaaagcctttatttctttcacttcttttcgataacatgaaaggactcacactggagagaaaccctatgagtgtaagcaatgtggaaaaaccttcagatctacctcacaccttcgaaaacatggtaggactcacactggatagaaaccaaagcaggtgaatcacctgaggtcaggagttcaagactggcctgatcaatatgatgaaacccctgtctctactaaaactacaaaaattggccaggcgtggtggcctgcttctgtaatcctagctagttgggaggctggcacaggagaatcgcttgaatctggggggcagaggttgcagtgagccaagattgtgccattgcactctagcctgggcaacaggagcaaaactccgtctcaaaaaaaaaaaaaaaaaa

SEQ ID NO: 820 - DNA, 5474 bp, Homo Sapiens
  NM_001012756
gatctctcgattccgtccggttctgagtcggggcctggcccagcccaggagacctctgggagcgctgcccgcggaaggagtgcgcaggcgcggaatctccgacttgccatggtcgtctttgtctgccggcctgcttccttgtatatccacaggagctgcaaaacctcttagagttctaagggcgctccctgaattttgggatgctgctttgttccccaaccataacatccaagtccagtgtcatttttctgctcacaagtttaaagtcagcacttaaaagaacagcaacagatgattgagaaagaaatgtaaagaaggttctctttgtgtgagtaagcaagaacctgaaaataattcttccgggccgggtgcggtggctcatggctgtattcccagcactttgggaggccaaggcgggtggatcatgaggtcaggagttcaagaccagcctggccaacatgaagaagcctgggaagtttataaacagataaagacgcaacatgaaagacttgtaagttaagtctcatctttctctgtgaaaagacagactgagggaaaatttaggaaacaaagtatttcctctgaacagtcattgattcttcaagactacccttctgtgtatggaactcagtttaaaagaatttgaaacctaatttatatacaatctatacctaaatatgggagaagctatataagaaccattaagaatataaagagaatgttacattttatccctttttgtaatcatctcatctcagggtaatcaatgtgagaaaagtcttccatcataaatttaacttcattagatacctgagaattaatattgaaaatacaccatatgaatttagtgaatgtgggaaagctttcatccttattacatcttatttgatactagggaaatctcctgattaaattcacatgcatgataggcatgttggaaagtcttcagcatgaatcagatctccttcagcatgatcaaattcatactggagagaaaccttatgaatgtaatgaatgtagaaaaacttttagcctgaagcaaaaccttgtagagcataagaaaatgcatactggagagaaatctcatgaatgcactgaatgtggtaaagtgtgctctcgagtctcatctcttactctacaccttagaagtcacacaggaaagaaggcatataaatgtaataaatgtggaaaagccttcagccagaaggaaaacttcctttctcatcagaaacatcacactggagagaaaccttatgaatgtgaaaaagtttctattcagatgccaaccatcatcagacaccagaaaaatcatacaggaaccaaaccctatgcatgtaaggaatgtggcaaagcctttaacggcaaagcatatctcactgagcatgagaaaattcatactggagaaaaaccatttgaatgtaatcagtgtggaagagccttcagccagaagcaatacctcattaaacatcagaacatccatactggaaagaagccctttaaatgtagtgagtgtggaaaagcttttagccagaaggaaaacctcattatacatcagagaatccatactggagagaaaccttatgaatgtaaagggtgtgggaaagctttcattcagaagtcaagcctcattagacaccagagaagtcacacaggagagaaaccttatacgtgtaaggaatgtgggaaagccttcagtggcaagtcaaatctcacagagcatgagaaaattcatattggagagaaaccctacaaatgtaatgaatgtggaacaatcttcaggcagaagcaatacctcattaaacatcacaatattcatacaggagagaaaccctatgaatgtaataaatgtggaaaagccttctctcgaatcacatcacttattgtacatgtgagaattcatacaggtgataagccttatgagtgtaaggtctgtgggaaagccttctgtcaaagctcatctcttactgtgcatatgagaagccatacaggtgagaaaccctatggttgtaatgaatgtgggaaagccttttctcagttctcaacccttgctctgcacatgagaatccatactggtgaaaaaccttatcagtgtagtgaatgtgggaaagctttcagccaaaagtcacatcacattagacaccagagaattcatactcattaaagttctctatgaatgccttggatttagcaaaacgttcagcagattttacacttaatagtgtattggaaaattcattttacattaaagtgacatgaatgtgggaagtccttcagcagcaattcaaaacttaaatactatgatgtttaataagtattatagtgtaaagaaaacccgtacccccaaaactcccacaacaagcattatcaatgctgtacttctaggagtatactcattaaagttaggatctagtcatggacactacttaatgtgttcctggaaggcctacagatgcattaagaaatagatatgagatgtatgaggatttgaaattaagagacaaaattatcatttttgtgatgttttgctacatatatgaattgtaaaactagaatcatcaaaattatttgttgttgaagcagtcataaaactgagactgagacagaatattgaattcagaaatgtgtgcatgaatatatggggaattggtaattgatagaggcggtatcccagattggtggggaaatcatggattacttaaaaattaattgactcttcatatggaaaaataatatctcccatcataatataaaatatttttcttatgaattcttaaagtactaaagactaaaatgcaaaaagcaatacttaataatataacagttttataagaagatgtttttaaaaccttagggcaggaaagaacttctaaaacattccagaatacccggtagttccactcttgagtatggtagtcccctattttctgcaagagatggactctaagacccccagtggatacctaaaacccagataggaccaaactctatgtctatgtttttttcttatatatacatacctatgataaaatttagtttacagattagacacagcaagagatttaaaacaataataaacataatatggaacaattataacaatatactgtaatcataaaagttatgtgaatatgatctttctctcagaataccttattgtactgttctcaactatttatgaactgtggtgactacaggtaactgaaaccatggaaagcaaagctgtggataagggggaactactatatatatgcatctacccaagaaacatgaacacagggagtcatgtactggtctatagctgtatagttcattgcaccatgagttatagtagccagaagttgggaaacaaatgctgtctcttgtgaaatagatgaataaaatgtgatagtaacatagtagagtactctctagcagttaagtgacaaattaagtctatatattaacagaaatatttttaaaaaattagagtgaagaaaaatgatgaacatattgtaatgatgcttctgtgaatttgaataaaatcaacactaaccagccctagtactaagaattggttatggataaattatgtaaaactaaagaatggattgaaaggatatgtatatactcagttcccaaaagtggagtggttacctctaggaagaaaggaggtggaagggaaatgttaccaagcatggtagttaaaggatacttcaattttgtatctatttcttattaaaaagaaacattctaagtaaacataacgaaatattaattctgggtggtggtaatatttgtgttcattctatcattcgtgctatttatttccttaaacttctgaaagttaaaaagtccagataggagtgaggaagctgtacatgaaacataatggacttacattcctagtcagatactaatattctgtagaagatatttctaaaatcttatctttaaaatatgaaataatttttaattggggtggcaacttaaattcaattaaaataactcatgtgtcacaagagtaaattttacataatctgtacgtagttctaatctgtatatagtcttggaggttatgatttgccacagattggttggatcacatacatttaaggatcatattattaaataatatatgcacagacatggagagaattagtttttactaaaacatttatcagaaattttaatactctgcataaccagtattagcattagaaattagccacttttaaaatgagaaaactgtgtcactcttcaatttttttataagccattgaggaaaacattaactcctggatttcagcttcacttttaacctgcagactaaatttctttctcaattatgtcagacacacccaagtcaatcccaacccccttgttaccttgggaagaccgtgctgaaaaaggagatcttccacctaaacagtgttctcttatttgaagcaaatctttttgagaatttgtttacttgatttctttccacaataaactgacagagaacgctactaatgatttttttttttttttgagacggagttttgttcttgttgcccaggctgcagtgcaatggcacaatcttggctcactgcaacctctgcctcacaggttcaagtggttctcctgcctcagcctcttgagtagctgggattacaggcatgcgccaccatgcccggctaattttgtatttttagtagagacggagttgcaccatgttggccaggctggtcttgaattcctgacctcaggtgatccacctgcttcggcctcccaaagtgctaggattacaggtgtgagccaccacgcctggctaattttgtatttttagtagagatggggtttctccaaaggctggtcttgaactcccgacctcaggtgatccgcccaccttggcctcccgaagtgctgggattacaggcgtgagccaccgtgcccggcctgatgtttttgaatgattatgaaaatgggtatacagcattaaaaccttagactgattttaaatatattaatttcttttaaactcaatataatgttaatattactgtagcacttactagcatttctgaaggttggtcttgagataagattgaaaatgacagttgttgattttctgaggtaatatacccaaataaaatatatgtatgtgtacatgaatctaaactgtcttcttctgttcctcattttgctttacttaaataatctttcatattttttaagtgttttgcccatgtgcttgggtagccttgaagtcaccagaataactaggactcaaattcagaccaaaccaggactagctttttgtgccatgagttagccatggtcctggacccagcaaaaagaatgattatgatggtcagagtaagatgagcaattgcaacataatattctctaatattgtatactgtaaatttattcagctgccctcgtttactcacagtttgcttatttgccaccataagaaatggtacaataaaaattcatgtaatcacccctta

SEQ ID NO: 821 - DNA, 840 bp, Homo Sapiens
  NM_001012978
agacccagagccaatgcgtggattagtccctcctcctagttgcagtctggtagttgtcgctggccgtgtgacggctcgctgttgccctgaaggcaggcgagccagctgcccaggaaaggtggaaagtggtagaagctgacccctgagccctggcaggtctttaagtgcgtttgtgcagccgatttcaaggctaagagagaaagactgcctctgatccctgaaggaagaaaaaaaaaaaaaaaacaggaaaaaaactcaacatggaaaatgtccccaaggaaaacaaagttgtggagaaggccccagtgcagaatgaagcccccgctttaggaggtggtgaataccaggagcctggaggaaatgttaaaggggtttgggctccacctgccccgggttttggagaggatgtgcccaataggcttgtcgataacattgatatgatagatggagatggagatgatatggaacggttcatggaggagatgagagagctaaggaggaaaattagggaacttcagttgaggtacagtctgcgcattcttataggggaccctcctcaccatgatcatcatgatgagttttgccttatgccttgaatcttgaggttaataatcataaaatccctgctttctaaattcgcatttttcctggtgtacctttaatgtgaaccttttggcattcttctgcaattttctgattggagattgcattttgacctagtctgtaagtttttctgtcagaagaggactttcatcaactttcatggaaagatgtttattgcatactgtaaagttaataaagcaatttaaaagcagtctaaaaaaaaaaaaaaaaaaaaaa

SEQ ID NO: 822 - DNA, 7142 bp, Homo Sapiens
  NM_001012981
gactcgcctctccgcgcccgacccgggagtagcggacacaccccctcccggcccggctgtccgcctccgcccagcctttcctcagcctgcttcatttttctcccagtcgtccagcctcccggtttccgactttgcactaagagggatgcactctggaaaaccacattgcgcggtcacatcttgtttggagaagaggccaggcttttgcatcttagagtatacgttcaccttttcaagggcctggcatagatttgattaatcagcctggaataccctgttcctgccgacctggccgtttttacctccgtaccttatcacactcccaggaacattaagcagggagcgcttggagtcttctttgggtccccaccttgagctagacgtgaagttgacccctgggctgcagcatggctgtcgccctcgactctcagatcgacgcgcccctggaggttgagggatgcctaataatgaaggtggaaaaggaccctgagtgggcatcagagcccattctggaaggatcggatagctctgagaccttccgcaaatgcttcaggcaattctgttatgaggatgtgactggaccccatgaagctttcagtaaactctgggaactttgctgccggtggctgaagccagaaatgcgttccaaggagcaaatacttgagctgctggtgattgagcagtttctcaccattttacccgagaagattcaggcttgggcacagaagcagtgtccgcaaagtggagaggaagcggtggccctggtagtgcatttggagaaagagactggaagactaagacagcaggtcagcagtcccgtgcaccgggagaagcactccccacttggagcagcgtgggaggtggcagacttccagccagagcaggtggagacccaacccagggcggtgtctcgggaggaacctggaagcctccactcaggacaccaggaacagctgaaccgaaagcgagaacgtcggcccttacccaagaatgctcggccttctccctgggttcctgcccttgctgatgaatggaataccctagatcaggaagtgacaaccacacggcttcctgctgggtcccaggaaccagtgaaagatgtccacgtggccagaggcttttcctacagaaagagtgtgcatcagattcctgcccaaagggacctctaccgggatttcaggaaggagaatgttgggaacgtggtctccctgggaagtgcagtgtctacatctaacaagataacccggttggaacagagaaaggagccatggactctaggtctgcattcctctaacaagagaagtatcctacgaagcaactacgtcaaggaaaagtcagttcatgctattcaggtccctgcaaggagtgcaggaaaaacatggagagagcagcagcagtggggtttagaagatgaaaagatagcaggtgtgcattggagctatgaggaaacaaagactttcctggcaattctcaaagagtctcgcttttatgaaacacttcaggcctgtccccgaaatagccaagtgtatggtgctgtggctgaatggttgcgagaatgtggcttccttagaaccccagaacagtgtcgaaccaagttcaaaagtctccagaaaagctatcgaaaggtgagaaatggccacatgctagaaccctgcgccttctttgaggacatggatgctttgttgaaccctgcagcccgtgctccgtccactgataaaccaaaggagatgatacctgtccccagactgaagagaattgccatcagtgctaaggaacacatcagcttggtggaggaggaggaagctgcagaagattctgatgatgatgaaataggcatcgaatttatccgcaagtctgaaatccatggtgcccctgtcttgtttcagaatctcagtggcgtgcactggggctatgaagaaaccaagacttttcttgatatcctccgtgagactcggttttatgaagcgcttcaagcctgtcatcggaagagcaaattgtatggggctgtagctgaacagcttcgagagtgcggcttcctccggacaccagaacagtgccgaaccaagttcaaaagccttcagaagagttaccgcaaggtgaaaaatggccacgtgctagagtcctgcgcgttctacaaggagatggatgccctgattaactctcgggcatctgctccttcccccagcaccccagaggaagtcccatcaccttcaaggcaagaaagagggggtattgaggttgaaccccaggaacctacaggctgggaacctgaagagacctcacaggaggcagtaatagaagactcttgcagtgagagaatgagcgaggaggaaattgtgcaagagccagagttccagggacctccaggtctactgcagagcccaaatgattttgaaatcggaagtagcatcaaggaggatccaacacagatagtatataaggacatggaacagcatagggcattaatagaaaagtctaaaagagttgtttcccagagtaccgaccccagcaaatatcgcaaaagggaatgcatctcaggaagacaatgggaaaatcttcaaggaattagacagggaaagccgatgtctcagcctagagatttagggaaagccgttgtgcatcagaggccttttgtggggaagagaccctacagacttctcaaatatggagaaagctttggaaggagcactcgtctgatgtgccggatgacccaccacaaggagaatccttacaagtgtggtgtctgtgggaagtgctttggtagaagcaggagcctgatcagacaccaaagaatccacacaggcgaaaaaccttttaaatgtcttgactgtggaaaaagctttaatgactcctcaaattttggtgcccaccagagaatccacacaggagagaaaccctacagatgcggagagtgtggaaaatgctttagtcagagctctagtcttattatacatcagagaacgcacaccggtgagaagccctatcagtgtggagagtgtgggaaaagtttcaccaacagttctcatttcagcgcccaccggagagttcacactggggagaatccctacaaatgtgtggactgtgaaaaaagtttcaataactgtacgagatttcgagaacatcggagaatacacactggagagaagccctatggatgtgcccagtgtggcaaacgtttcagtaagagttctgttcttaccaaacatcgggaagttcatgtgagagaaaagcctctgccacaccctccatctctgtattgccctgagaacccacataagggaaagactgatgaatttaggaaaactttttgatgatgatcttctcttcctaaatgcccccttagccattttaccctaatctcattcttggaagcaatcttttcttagctatgaagtgtaatttccaagataaacttgagaatataaataaactaaacactttcatcctgttctcacctctgcctctaacttcatcagtctgttcctcctcttctgtgtgtctcagcttctcctttaagaatgtggcgaagatacattgtccgagttcagaatgaaatacccttcagtacattgaggccactgcaactggattgctaagttcggcaacattcaagatcttccatatgggtgagagttgtcttcaaggatataaaaaatgccaaaagtttttttgttgttattacctactccgtgagatcctggatgaaacttgataacagattttcacatttagatagaactttgaggagtctgatcggaactacatcaaatccatcttggttttgaagagatccacaaaagaagagtgaagattttatagctttcctcagaagtctgttacagtgtacctttttttttttttttgtcaagaagttgatccaaatagctagggcagaatccctgtattgtcactgaaatcctgttactaatgccttgccctccatggaggtgagaagcaattgatcacccctcatccttttctgtacccgaagacttaaatcccctggctgctgcttctccagcctataagtaatcccaggtcctcctactgtttctcatagccctgcacttgcctctcagttgctctgggtgctcctgccggcctcttccgaactaccatgccctcctcagatagaataggaggcctgctcgtggtgtgtctcactaaagcaaagtaggatttcagatgcgttctagttctatcctctaacttctctggctcttatctagaacatgactggcatgttggcatatttcgtacctcccacccctgcactgcagtataatattataatagtgtttctaaaactttaaggggatagggaagaggtaatagacacctgaagcatttctaagaccagttggactcctttggcctgctgtcgatcagatagccacctcagcttagaccagcgctctcaggtctggctgttaaatctcccagtctcttttcctgaggcttctagtccctgttcaccgcatcagaaacctaactgtagtgtgccaagtaacttaacacaactctagagctcactgggtgaaaagtgggaacatttataaaaacttcaatccagaaatccagaacaccgtttttgttttcctcatttacttgttttgtctgaaaaatctctttgagaacccccggcagtaacccagtaaacactgaaggaaaagttctgatgggggatggttaattgacttttgaagttacagatgaaacccagagatttgattttccatggccagttgcttcaggatggagtcagtggcgtttattcccttagtatgtaggtgacccagggtggctttgctttggcaagggagaagtcacaagtttaatgggaagggaaccggagttagggctgtttgtgggtgattattttgctcttctctctccctttctttgtcaaatgctcttatttgaagccatctggaaatgatatttttccttttggtatgtttcaatcttttgaaacttgttcagcaaagtacctaggagggtaggcactgtagaaagaaatctaatttatggtgccagaatagggtgtggcctgttggaaggcaggtgactcaggtagacattgataaatgtttctgatttacatttgttggaaatattatgactgttcacatctcaataggttgatttttctgtgttgtccaagttatagatttctaatgctaagtacagttccatgttggtagtgtgcgtagcacagtaagatgtttgtggtgccagtgggcttgtgtttatattgtgtagatgttctggaattccagctctagagaagatgtaaattaatagaaatcaccacttaataatatgtacacaggattgatattatgtggaagcatgattcaggaaagtagatgacttattcataaatatgaagcactgttacatgtaaggccatgttctagccacagtgaatgatagaaaaaggaaggaaggggcatggtgcctgggctcaaggaactcacagtttgatagaggaagcatcacagcaaaagttggggccacttacaccatggcagttacagaaggccaggagctcagtcatgagaacatcaccttcccctgcagaagagttgcgctaagttgcccagaatcatattctgtaccttcatctctcaaccttccccagtggcaggaaagggtcaagcaagacccattccctctctagtgggacaaactgattctgtttaactctcatatgcctgggagcaagctgaggtggaatttgggttcccctatctctactcctaattgtaaatgggctgtctagacatgtgttacattaatttgatgaactttgttctgaagaaatggaaggtctcccccccattttagaccaacactacctgtctccctgcattttatttgttttcacctggtacatgtaagtcaaaatgaataatcatgttctgaccaatgtgtcttttagatcacataacattgcctttatgaagattcatagaaaaaggtttttttatctagatctcagtgccaaggaaagctctgatcctaagcgcagtatgtgtacacacacacgtctacatgtgtgtgtagatctgtatgtatgtattacaaacactgtgatttttgtaacttaagctgctttttctctctttgttctggctgctggaaagttcaacaaaacttacagcccacctcaaccaactaccccaacctatatttatttaatttcatcttatttccttgtaaattgtgtcaaatcctgtttttgaaaagcagcatagactgacaacttttcactatcatcttatcgaaggcattttggaaactggggtcgtatgtcccacctaggcttgctttgttactgccacaaatacctccagttcttaccagtgatgttattatgcattcaacctaattcattcatctggaaagaaacagttttttaaaaagggaaacctcacacgtaaatggctcagggcagcctggccttggtggaatgagcatgagactggaagctgaaagaagcaagttttaatcttgtcactaaatgagtgttgtttgacacatcatagcctctctgggcctcggctcctcatctgaagagaagttgaacttaactgctaagttgctctggctctaatgtttcatgaggctgtggagcgtgatatagatgcggaagaggttagaagaccaggctgccggcccagctgtcctgtgcctgccacatctggccataccaaatccatcgcatgcttcaggaaagggaggggatgctgtgacagcaaactcagcccaggagcttgttggggaaggagaaagggcaagtccctcgtggtccacagcaggcaccccccaagcacctcgataaccagtggcaggtaggctgaagtgaaggaagcctctgtcaggaggtctggcgcccagtgacagacaagacagctgtgagggagctggggcagccctggctaaaggaatgtctgagtaacttgtgaaactggaagcctctgcctctgaatgcattccaagacctggtgcaaatggatgtccattcattgttttgtatcagtgttcacttagatgtcttcttgaaaacttgtttgtggaataaatgtctaaaataaatggctcccactggtttctgccataaaaaaaaaaaaaaaaaa

SEQ ID NO: 823 - DNA, 1974 bp, Homo Sapiens
  NM_001012991
atttcgcccaccggaatgatcaccaagacacacaaagtagaccttgggctcccagagaagaaaaagaagaagaaagtggtcaaagaaccagagactcgatactcagttttaaacaatgatgattactttgctgatgtttctcctttaagagctacatccccctctaagagtgtggcccatgggcaggcacctgagatgcctctagtgaagaaaaagaagaagaaaaagaagggtgtcagcaccctttgcgaggagcatgtagaacctgagaccacgctgcctgctagacggacagagaagtcacccagcctcaggaagcaggtgtttggccacttggagttcctcagtggggaaaagaaaaataagaagtcacctctagccatgtcccatgcctctggggtgaaaacctccccagaccctagacagggtgaggaggaaaccagagttggcaagaagctcaaaaaacacaagaaggaaaaaaagggggcccaggaccccacagccttctcggtccaggacccttggttctgtgaggccagggaggccagggatgttggggacacttgctcagtggggaagaaggatgaggaacaggcagccttggggcagaaacggaagcggaagagccccagagaacacaatgggaaggtgaagaagaaaaaaaaaatccaccaggagggagatgccctcccaggccactccaagccctccaggtccatggagagcagccctaggaaaggaagtaaaaagaagccagtcaaagttgaggctccggaatacatccccataagtgatgaccctaaggcctccgcaaagaaaaagatgaagtccaaaaagaaggtagagcagccagtcatcgaggagccagctctgaaaaggaagaaaaagaagaagaggaaagagagtggggtagcaggagacccttggaaggaggaaacagacacggacttagaggtggtgttggaaaaaaaaggcaacatggatgaggcgcacatagaccaggtgaggcgaaaggccttgcaagaagagatcgatcgcgagtcaggcaaaacggaagcttctgaaaccaggaagtggacgggaacccagtttggccagtgggatactgctggttttgagaacgaggaccaaaaactgaaatttctcagacttatgggtggcttcaaaaacctgtccccttcgttcagccgccccgccagcacgattgcaaggcccaacatggccctcggcaagaaggcggctgacagcctgcagcagaatctgcagcgggactacgaccgggccatgagctggaagtacagccggggagccggcctcggcttctccaccgcccccaacaagatcttttacattgacaggaacgcttccaagtcagtcaagctggaagattaaactctagagttttgtccccccaaaactgccacaattgctttgattattccatttatgctggagattacaaattttttttgtgaaaaaatcagatcttggtgaggacctcgagcagtaagatataaataactcccataagcttagcgttccagtaatggaacactaggcataaatggtttattcagttgtgcaaatgaaagccatctgacagttggctcacattgaacacctgtggagattaaggacgaggacaactatattgatgggcttggatgaactggggcagggcagctcatatttcgggagccaggagaacgagtgagtgctaaaacctcctgttttctgtgttaaacattccgtccctgtttgagacatcagtatgtacagttaacttttgttgagtgtttagcaggtactagggacatactagtgttttccttaatgtatttaatcttcataattatgaaatgggtgctattattagccccatcttatagatgaggcaactgaggttcagggataaagtaataaaattgcctggggtcacccagccactaaaaaaaaaaaaaaaaaaaaaaaaaa

SEQ ID NO: 824 - DNA, 7616 bp, Homo Sapiens
  NM_001012994
cggcgggtggcggcggcccccagcacggccggtgcaaggcctcgggttaagcggcggccgagcggggctcggcccggggtgctcggggagctcgccgcggcgggcagcaggaggaagcggcggcggcgcgtcccgagcggtgcgcgccatggcgggcgggccccccaaggccctgccgtccacggggccccactccctgcgcgacatgccgcacccgctggccggctccagcagcgaggaggccgtgggtggtgacagcacgcccagcccggacctgctgatggcccgcagcttcggtgacaaggatctcattttgcccaacggtggtactccagcaggtacttcaagtccagcttcttcatcttcccttctcaacagacttcagcttgatgatgatattgatggtgagactagagatctcttcgttatagttgatgatcccaagaagcatgtgtgtacaatggagacttacatcacctataggatcaccaccaaaagtactcgggtggagtttgacctgccagaatattctgttcgtcgaagataccaggattttgactggttgaggagcaaactggaagaatcccagcccactcatctcattccccctcttcccgagaagtttgtggtaaaaggtgttgtggatcgtttttcagaagagtttgtggagaccagaagaaaagctttggataaatttctaaaaagaattacggaccatcctgtgctgtctttcaatgaacactttaatattttccttactgctaaggacctgaacgcctacaagaagcaagggatagcattgctgaccagaatgggcgagtcagtcaagcacgtcactggcggctacaagctgaggactcggccgcttgagtttgctgccataggtgactacttagatacatttgcactcaaactgggaaccattgatcgaatagcccagcggatcatcaaagaagaaatagagtaccttgtggagctgagagaatacgggcctgtgtactccacatggagcgccttggagggtgagctggctgaacccctggagggtgtgtcagcttgcattgggaactgctctacagccttagaagagctgacagatgacatgacagaagacttcctacctgtgctcagggaatatattttatactctgactccatgaagagtgtattgaagaagagggaccaagttcaagcagagtatgaagccaaactggaagctgtggctctgcggaaggaagaccgccccaaggtaccggcggacgtcgagaaatgtcaggatcggatggagtgtttcaatgctgacctgaaagctgacatggagaggtggcagaacaacaagaggcaggacttccggcagctactcatggggatggctgacaagaacatccagtattatgagaagtgcctcatggcgtgggagtcgattattccactactgcaggagaaacaagaggccaagtaaagttctttcttgggacggagactcttctacctacacagggcctggcaccctataccggaatgtccctgcagtgccagagacgcagtgctgggaaaacaaccacagaaacatctctcctttgtgtatttttccctcccccacctttcaccccacagtggttttcaattagtatttattccatggtggagtctgtgaggctagaatatctctcagcaagagcagcatacctccatgttgtgaaggcatctgttcagtgaagcactacgaaaatttgaaaccaagggacaagacaacctgcagctgacgctctgacatttcatgacagtttcctctttagggacagctgagttgccagttgtgggagagaacccggggcctgcttttcaaggatgaggaggaggcaggaacagaaggcagctgctgctttctgtggaaacctggcccctctggaattggcctctgtgggcattgactcgtcttggcctaggaggcattggtgcctccctggcaagtccttaacgtacagtacctgtagctgtgagtgtggcctgctgcctgcttgtgatgagtgataccgtcttactgtttctgtttcacatagggacatttaaatcaatgtcaatgtgcgtccatgcttgagtgagcaagccagcgtccttgtcctcctgcaatgcctttgggaagctcaggggaatgctccccaagcttgtttctgacactagaatgcaacagattggaaactttttgtgtaaaatgaaaaaaacaaagtgctggttttttttttttttctgtgaaggtcttcagtgttttgcttgttcactgtcatcagagcagggattagacctgttagggaatatctattgtcttgaagtcagagtagctccccattgttgagatcagtgggcatataccaagctccacccccagtgtcagctttgtgcaatttgcctttacctcaccaaaaatacctactttaatatttcctcctgtgtcctctgaatgtctgggcgagcttttggtgagagggctggtatgtcatgttgttatgatacagtcgaaatttgtcaatgcagtgtgaatgttctacataaagtgctttaacccttaacatttcctggtcaggaaggaaaatcagtacctggacgggcctcgaaaatgacaaatgcaacagcgagccctttgtgtccagctaagctaaagtctcctcagtgtgcagccagattcctggggactgctgagtgtggttacaggctgcatttcagacaatgaccaggtttacttttcagatcacaaagcaaacagtcaccaaggatctgtcttccaactcttttttttttctgctgaaatgaagctacatgtcatgtttgtgttctttcatctgtggctcatccctgtaaaactacgaatctgagcctcaaataagcagtagtttttttgttgtttatttttaatgaaacagctgtgttaaggcgctgcttcagatgcaagttcacctggaaatactggtcagcgggcagcacgtcaaggtcacttaagcccacttttaactgcaggtcatcctcgcatcagccaaggctgtggtgctgttgatgccgcagttggacagcataggacggcttggttctgtttcattgtgtttgacaatgttgcagtttaaatgataatgtttaaatcaattggtacttgcctgtagtgttaaaccctatttgtgccattctcaagtcctttgatgtgaattttcagtttggtacagttagaaatgactcattgatgcggacaggtaagaacaacccatgtacccccgagtgattgcatgctttattctacctctaagccatcgtgttgacgtgggtatggacgcctgggtctgacctgacactgtgctgggagaatcaggatgtgtgtctaatggcgagctgacagccctctgctgatatttggcagaaggcaccagaccagcccagcagcaaatgctcatctttgggaacataggaagctttaccttggggaaggtatgctttacaaatgtccagtgtaatgaatgtttggaaaaaactggagttacaggaaaatgaaatctgactatctgctagttgccaaaacccagaaacattcctgtgtaatggttagttgggaaagaaggcagcacttgaaaaaatttaccaggttcctcactgggagatgtgggaaggggcgtgggacgcacgcggtcactccctctcctagtgagaggcagatggctggctctgaagggaggcaggcaccgtgggatttgggcttgctctgcttggtccccatgtgatgccctgtgctgtaagatatcagaaagacctggaacaaggcaaactttatgtcctcctggcatgttattgataacagagccaggaagtccagtgtacattacagattttctgggagaaatagtccttccagagaaaggattccttcccagcctccaggctggtgtctcatgaggtgaggaggctggcccagaaggaaggggacgttaggtggtgaagcaggctcccctgggcctctgagggccagcagtcccaaccatttgcctcttcgttttgaccaagcacaaaagagatattccctagaagtgtcacacggaggcttctgtgccaaagactgccttgtagaggtctcatcacctcacacttcttgacttcacaaaattgtggccctgagatcagtactcctctcttaagtatttattattattattatttactttacctcaagcagacagacataggttttgaggcttgaatacatggcagtggaatacaaggccctccctagcagccgccccaggcctggaaagtgggagatttcattcgcccgggttaaaaatccagaggaagacagaagagaggagtcctaggaactgagcagattttagagacgcaaatgatgtttaagagagccttgtgatttgtagcaagcatgggcactgctttttcttactaatgtggtagatctacacgaacattctaggctgttctgctcagagcgaggaaccactgctcctcaatggggagggaacataccacccagccaggcttagcattgggttttatcctttaataaaagttttataatgaatcctgttcaccttaaagtgtgattatggagatgattggctccatattccaccacgtcattccttcaactcaccagacacctttctttagttgaaataaaccagcatgacctggagatcatggtgactgtaagctaagtctgttttcatgccagatttcagccccacccagagtgtgctctagatgttgttgatttgaatggttttcccagttcccactccacatggggaagttgaatgaatgcacacctgctgctcacttcttgtgaggctgccttttgtgatcaaataacaggaagttctgctttagaggagggcacgatgaccatgtggcagtctgcaagtggaattttgggatggcagcccgaggaacatccagagttactgtgtgacttggtcctgccatcgttagctttgaaatcacaggcattgggctctgttttgacaccattcattggactgcgggacagtcattctttacgttctctcttgagctggtgagagaggaggaagagggaagtcaagagcaacctccaaggcctatgtcagcctcttctccttgggtcttggggtgggttagaactgggttccagtctggccagatgggttgctggctgcactgagggtgattcttctcagaagatgggctgcctgtggtcaggacagggcataccagtctggactccaccttcccagacacctactttaaggacctgtggaaactgggtgatccaattatagggctggggcaaccctgctttggccaccctcatttacaaacttaggttgggagcttgggtttcctgtctcacttccaaaagccttcaagatggcagcagatggacacaccctctcatttcttgtgtcttgtctgtcagatggcaggaggcctgtatcagtaaatttgaggaaaatgttctctcctgggccagcctcacagcttgcgttgggtgtgttggaattgttctcttcggccttgttctgccttgtgatcttttcaattcagtgaataaaccaggaatccattttttcaccaacccaccctgtagattgtcagctttttgtttgagagatgcctggtctcacagttacatgtatcagagtgtgtgtaagttgtctgtgttagaaaggttggggtgggggctttgttgcaggggattagactgttctttcttcatcataatttgagatacatcctgagtatgactgtctaaccctttctgtgtggcagaaaaatatgttttccaggtagtttttactactacagagagtctgtaaataagtgctttaaaaaaataacaaaccaataagatatttgtctcctatataaacattctgtgtatttagcacttgaaaatcaacaaatccagaatttaaaaaaatgccacagacttttcaaagcccaactctacttttttgagaatttgtccgtacctactaatatgccttattcttcttcacctagtgttttaaaagtcctgggtagaaagagttttagaaatgtaatcagttgttcagcttcaataatatagagatctaacatagtcagtcctcaggccccctaaagaaacaagcaagaaagtgagggccatcactagggttggctttggggaggggaaaactaaggactgcttttgccaaatgatatttttgataatgtaaggaaacacagggaccacaaaaccttttttttttttttaagtgtgaaagattagtgccttttggcatacttttgattttagaggatatagtatcggcattgacaaatcacgtagaaacaaagaatgctatagatgacaacagtattaaatgttactcctgattctgcagaacagcttttgaagatactggggggtatcttcaagcctcagagcagcttgtttcagatagaaattctctatgggttgaaatgccaaaaacagaaaacatgatgttgactcatgtaatttagtccattttagcagagcctttagtgttaacaccagtggcgaggagcattgcatattctctgtcagcagcagcactcccacaccaggtggttctgggctctctgtaggctggtcctagtaggtgacacccagcaacacccctgttggacaggattgattgttcgcagtcttagaccaacacttcagtcagaaatgttactgggaggaggaaaggaaaatcactttttttcctccatgtggaaatgaggagagaggaaagtggattgcaaaccaaaatgtgagtcagtgtgatgaagcagtggctctgtcatctcggcctttatccaataacaaaccagcatctcttaaaggcgcttttggcctagacacccctgaagtttggatgaagtctggtggattccctgtctgttgtatttctgtgtgcctgttcccttcattgctgtgagttgggagtgcattgagagatgatgtccatctgatatattcctgtgaaataaactgccagcaaactttctaacttgtattttaactgttaaagaagagattaaaaacttcggctttggacatgtccacattatggactgtcatcttatttttaaaagtcattctttacgtttaaaattttaaaataaaaaccttctgaggtattgatgtagtccaccgtgtaaatgttaccttctctccatgctgccattatgccaaaacaaaagctgtgataaaaaaagtgcttgagagagtgtgttgataagaaagtgatttatttacagatggaagtctttgtttcatgaagctaccaaactttaaaaagaatgtcacccttttttttgtttgttatggaaaccagagattgtaaaatggaaaaagaatcgtttttttgttgactttttgatgctggcacgaggtttttgtccacttttttcatatatctgtgtataaaaaaattgttgtttactatggaattagtattacattttgaggtaaacaaaagaatttgtattgcttgataaatattagcttgtaaatttaaagtttctttacttcaattaacttaaaggaccaataaacccataaaagatgctttctttaaaaaaaaaaa

SEQ ID NO: 825 - DNA, 547 bp, Homo Sapiens
  NM_001013258
cgagaggctctgaggctgccagagtggttgtgtctgttcctccggtaaggggtgattcgccgaggggcgcggaccagacagacctcgggtcaggcccgggaaccccgagaggagagcccagcccctggtggaggcggcttggcggagattcggagccgtcagcagctcagccagacgtccaggatcccaccccttgcaaaagaccaggccgtggaagccatgttcccaccagccagggggaaggagctgctctcgtttgaggatgtggcgatgtacttcaccagagaggagtggggccacctcaactggggtcagaaggacctctaccgagatgtgatgttggagaactacaggaacatggtcttgctggtttatttccagtttgatgctgcaataccactgtgctgaacgtctctggcacattcatcttggttgcaattgtactttaggctatatttctaagagcgaaatgaccacagccaaaggtatgaacattgttcaggctttcaataaagactgccagatatttacaaaaaaaaaaaaaaaa

SEQ ID NO: 826 - DNA, 4231 bp, Homo Sapiens
  NM_001013406
atagccacggtaacggcggggtggaaagctaaggcctttgaagacctgggaccccgtagtttcgggagagggtgaggggtgaatggtgctgaggtgcgaggagagggaaggacagtaaagagcaggtttttggctttcatcgctttttctacatgtttttagcctcaccagaagtctttcatctcggtggtccaactcaggatctcagcctcattattttcttacccttctggagtgcatatgtgcctttacagtttctgtttgcaaacgctgtctagcatactaagaggatgttagcaaacctgttccatggacactaaatggcagttgtacatctcccctcatcagtcatagtgacaaccagaaatgccctccatattttccagtgatcccagcaatgggaaatccagaaaacatagaagatgcatatgttgctgttattcgtccaaagaatactgccagtctcaattctcgggaatacagagctaagtcatatgaaattttgttgcatgaagttcccattgaaggacagaaaaaaaagagaaagaaagttttattggaaacgaaacttcaaggcaacagtgaaataacacaaggcatattggattacgtagtagaaaccaccaaaccaatttctcctgcaaaccagggtatcagaggaaaacgagttgtactaatgaaaaaatttcctctggatggagagaagatgggcagagaagcatcattatttattgttccatcagttgtcaaagataatactaaatacacatataccccaggatgcccaattttttactgcttacaagatattatgcgagtctgtagtgaatccagtactcattttgctacacttacagcaaggatgttaatagccttggataagtggttagatgaacgtcatgcacaatctcactttattccagctttattccgaccttctcctcttgagcggataaaaactaatgtcataaatcctgcatatgctactgaatcaggtcagacagaaaactcactacatatgggctatagtgcactagaaataaagagtaaaatgttagccctagagaaagcagatacctgtatttacaaccctttgtttggatcagatcttcagtatacaaatcgggtagataaagtggtaataaatccatactttggtctaggagctccagactactcaaaaatccaaatacctaaacaggaaaaatggcagagaagcatgagcagtgtcacagaagacaagtatggaaaagttgaggccactcgcatattgttagagaaaggaaagtgcaatccaaaccttttaaatggacaacttagttctcctcttcattttgctgctggaggaggacatgctgaaatagtacagattctcctaaaccacccagaaacggatagacatataacagaccaacaaggaagatctccattaaatatttgtgaagaaaacaaacaaaacaactgggaagaagctgcaaaattgttgaaggaagcaattaacaaaccatatgaaaaagttcgaatatacagaatggatgggtcatatcgttctgttgaattgaagcatggaaataataccacagtgcagcagataatggaaggaatgcgtctctctcaagaaactcagcaatatttcactatatggatttgttcagaaaacctcagccttcaactcaaaccatatcataaacccttgcaacatgttcgtgactggccagaaatacttgctgaattgactaatctggatcctcaaagggaaacacctcagctttttctaagaagagatgtgagacttcccttggaagttgaaaaacagattgaagacccactagctattcttattctctttgatgaagccagatataatttattgaagggcttttatacagctcctgatgctaagctgataacattggcaagtctgcttttgcaaatagtctatggaaattatgagagtaaaaaacacaagcaaggtttcctaaatgaagaaaatctaaaatccatcgtacctgttaccaaactgaaaagtaaggcacctcactggacaaatcgcatacttcatgaatacaagaatctcagtacaagtgaaggtgtcagtaaagaaatgcatcaccttcagcgcatgttcttacagaattgctgggaaattcctacttatggagcagcatttttcacaggacagatatttacaaaggcaagccccagcaatcataaagtcatccctgtgtatgtaggagtgaatataaaaggacttcatctcctcaacatggaaactaaggctttactcatcagtcttaagtatggttgttttatgtggcaattgggagatactgatacttgttttcagatccatagcatggaaaataaaatgagctttatagtacatacaaaacaggctggtctcgtggtaaaactgttaatgaagctaaatggacagttaatgcccactgaaagaaattcatgaaagagaagtaactgttactcaagccaccacattttgtaatgcagagttttttttccgtgaaagatttcttaaaatattacttttggccgagcatggtggctcacccctgtaattccagcactttgggaggctggggcaggcggatcacctgaagtcagagttcaagaccagcctggccaacatggtgaaaccctgtctctacaaaaatacaaaaattagctgggtgtggtggcgggcgcctataatcctagctactagggaggccaaggtgggagatcgcttaaacccaggaggtggaggttgtagtgagccaagattgcaccacggcacgctagcctgggtgacacagcaagactccatctcaaaaaaaaaaaaaaattactttcaacaaggcatatagtctcttgtaatatatatgtatactattacattgtacagaatctgtacttatgtttggtgtgtaatataccaattagttttatataatatcctcataagctattctaatttttgagagaaacacaaaaagttatagattgatagtctgtataatattagacaaaatagtaagctttataaaaagttatttttggtaaatggtaaggaatttggggtggaatgtgatgagattaaaatgtagctttggtataacttcatgtgtatttcaaaatatactgaacgtcaacatgatttgaataaagaaaatgtattttctacttgaaccacataacactgttatttaaaacagttttctgcagtctataaacatttctcaacatttttttaaaagtcttagttaaaatgtaaatctgatatacagtagtgtttctcaaagtatagttcatgaactccttgcatcataattacctagatgcctcttaaaaatgaagatttcagagacccattctaaacaagggcattcactctctggaagtagcatggccttgtgaacttaaatttggttttgttttttcttttttgctgttagaataatttcagacccaataaggaatttcgattattaaagttgagaaatttcacaaaactgcctggcacacaagcacacacatacatagacacattttaagtgataatctcttgatattagaagttgcatttgttaaatacatgctgtattttttatgagttgacttaatagtttatgtatattgactttgctttgtaggaagtaaatcaccagatatcttattgtttcatttaggaaagtagtgatatagatgaagagccaacttgatgaatgtgctattcataagctagaaactacagtttttccaaactaataaactgatgaattctaaataagttcagagatatagtcatatttaaagttgtcctacagtttgcagataatttttatattactattcttcacattaacttctgcttatttttaatggtactatatgtaggccttattaaaattaagattgtatggttaagtaaagttaacaagaaagcctgatttatctttaattctgtgctaggtacttttgattctacatgaacaatacccttttcagttcccttcattctaatgtcctcaactgttaccaaataccctgttgactcccaaacctaagattttagcctcaacttcttttctgaacttcaaatcttaatttccaagttatacttgttctaggtccatctaaatggtctacagagaacttcagttgaatcatagctggaaacagaatttatttcctctatttgcttcattctgtccttccactatattccctattt

SEQ ID NO: 827 - DNA, 1352 bp, Homo Sapiens
  NM_001013436
gggcggagcgggcgtacccccacggcccggccagtggaaggcgcgggcagcagcggctccgagtggccgcggcggtgggctgtgccggagtctcctccctttggtccgctgcaggcccgcagcccgagtgtcgccgccatggcttcgccgcagctctgccgcgcgctggtgtcggcgcaatgggtggcggaggcgctgcgggccccgcgcgctgggcagcctctgcagctgctggacgcctcctggtacctgccgaagctggggcgcgacgcgcgacgcgagttcgaggagcgccacatcccgggcgccgctttcttcgacatcgaccagtgcagcgaccgcacctcgccctacgaccacatgctgcccggggccgagcatttcgcggagtacgcaggccgcctgggcgtgggcgcggccacccacgtcgtgatctacgacgccagcgaccagggcctctactccgccccgcgcgtctggtggatgttccgcgccttcggccaccacgccgtgtcactgcttgatggcggcctccgccactggctgcgccagaacctcccgctcagctccggcaagagccaacctgctcccgccgagttccgcgctcagctcgaccccgccttcatcaagacctacgaggacatcaaggagaacctggaatcccggcgcttccaggtggtggactcccgagccactggcaggttccgcggcaccgagcccgagccccgagacggcattgaacctggccacatcccaggtaccgtgaacatccccttcacagacttcctgagccaggaggggctggagaagagccctgaggagatccgccatctgttccaggagaagaaagtggacctgtctaagccactggtggccacgtgtggctctggcgtcacagcctgccacgtggcactaggggcctacctctgcggcaagccagacgtgcccatctacgatggctcctgggtggagtggtacatgcgcgcccggcccgaggatgtcatctcagagggccgggggaagacccactgaagctgggcaggacacaggcgagctcaggtgatgccggccaccagcaatgcctggcctggtagctccgcttctgctttcaccaagagagtgtttcttcactcaactcaggtggcatttggggtgacatctcaaaggccaggaattccgttgacttgttggctgccagtaggggcgggaggaaaggcggaggcgagccctggaggagggaggccacaactccgagctgcccacctggtgctgagctggggccccgcctcctttctgttttatttttgaggaaataaaataaccaagtgctaaatcttgtaaaaaaaaaaaaa

SEQ ID NO: 828 - DNA, 1891 bp, Homo Sapiens
  NM_001013437
aggcaggggcggtgcgggggcgtgggcagcacaagccgtgcgctcccgggctgcgaggtctggctaggctacgggccacgcgccgccgccgctgccgccgccactgtcctcttcggaggcgcgggcccgacggaaaccatgtttgtggctcgcagcatcgcggcggaccacaaggatctcatccacgatgtctctttcgacttccacgggcggcggatggcaacctgctccagcgatcagagcgttaaggtctgggataaaagtgaaagtggtgattggcattgtactgctagctggaagacacatagtggatctgtatggcgtgtgacatgggcccatcctgaatttgggcaggttttggcttcctgttcttttgaccgaacagctgctgtatgggaagaaatagtaggagaatcaaatgataaactgcgaggacagagccactgggttaaaaggacaactctggtggatagcagaacatctgttactgatgtgaagtttgctcccaagcacatgggtcttatgttagcaacctgttccgcagatggtatagtaagaatctatgaggcaccagatgttatgaatctcagccagtggtctttgcagcatgagatctcatgtaagctaagctgtagttgtatttcttggaacccttcaagctctcgtgctcattcccccatgatcgccgtaggaagtgatgacagtagccccaacgcaatggccaaggttcagatttttgaatataatgaaaacaccaggaaatatgcaaaagctgaaactcttatgacagtcactgatcctgttcatgatattgcattcgctccaaatttgggaagatctttccatattctagcaatagcgaccaaagatgtgagaatttttacattaaagcctgtgaggaaagaactgacttcctctggtgggccaacaaagtttgaaatccatatagtggctcagttcgataatcataattctcaggtctggcgagtgagttggaatataacaggaacggtgctagcatcttcaggagatgatgggtgtgtaagattgtggaaagctaattatatggacaattggaagtgtactggtattttgaaaggtaatgggagcccagtcaatgggagttctcagcagggaacctcaaatccttccctaggttcaactattccaagtcttcagaattcattaaatggatcttctgctggcaggtatttctttacccctctggattccccacgggctggatcgagatggtccagttatgcccagctccttcctcctcctcctcctcctctggtagagcactcttgcgatgctgacactgccaacctccagtatcctcaccctcgcagacgatatctctctcggcctcttaatcccttacctgagaatgaagggatttaaaacactgatttaacattgaaaggccttattcaagtgcttgtaaatgctttcatttctggctgctttttgtttttcattttctttcagaagatttttctaacttagggtctgtcttgcatgtattacaaccagaatacagtgtttggaacctaaatctgtttgtgcgtctgcatcaaaggaacatttgcttcactgggtgataacctttgatgaaatgagatatgtccaagtaacgttaactgtgaagttacacacagtagctgacttcaaagtgcctgttctgtaaattttattttaaactgttaccatagtcttaagttgtttatgctttatcagactggctaatgtgaaagcataatattatgaagtttattctgccttatgagaccttaaaaaatggatttcattttacaggctaatgttgtaactgactagtatgtaaaataaatcattcctgtgtataaagcagcaaaacctaaaaaaaaaa

SEQ ID NO: 829 - DNA, 2380 bp, Homo Sapiens
  NM_001013635
atttacgtgccgtgcgtcgccttggaaacagaggagcatccgcgacacccccgggagacccaccccagctgctgctgccacactcgcgggcgctgcccggtaatggcctgggggagtcccgagtccgacgcgccgctggcctcagcctggacgcggacccctccgcgagcgcgtctgtgacccacggaaccggcaggcgctctctgcttgtggcgcccagagggcggcgctgacacgggcgcgatccgggaggcgaggcagggcagggcactttcgtcccggggcgatcccaagagacgccggctctgggaccctcgccgggtcctcgtcccgcagcctcttctcggcctcccgcgatcctgcctgcgccctctgcccaggactcgtctctcacgtcggctccccgccagtctcgggagcctccgcttccctcggctcccgctagcccctcccgggacctctccccctccaccccctcccccaccccggaggccgggctggacgcgacccagagcctccgccacccgcttctgccactcaatggaggacggtctgctggagatcatgaccaaggacggcggcgacatgccggcgcccctggaggtgtccaccgtgccggcagtgggggacgtgatctccggggagtacaacggcggcatgaaggaactgatggagcacctgaaagcccagctgcaagccctgtttgaggacgtgagggccatgaggggggccctggacgagcaggcctcgcacatccaggtgctctcggacgacgtgtgcgccaaccagcgagccatcgtctccatgtgccagattatgaccactgcgccccgccagggcggcttgggcgtggtcggcggcaaggggagcttccagagcgacccccaagagccggagactccttcgcctgggatcggggacagcggcttgctgggtcgcgatcccgaggacgaggaggaagaggaagaagagaaggagatgcccagccccgccacaccctccagtcactgtgagcgccccgaaagcccctgtgctggtctccttgggggggacgggccacttgtggagcccctcgacatgcccgacattaccctgctgcaactggagggcgaggcctccctgtgaggggactccgtggggcactaccttcccgggctgtctttgggtttccgagtgcatgacgcgagggggactgaacggcgcggtgcggcatgcttcacttggacagctgctcttgtgggtcaggcagagagagactccctcgaggaaggatttgtagggtgaaggactttgggagcatcgagaattctttctgcccaactaagcgaattatagcgaactgcggaaaggtgaggctccgggagaggaagcgcccatctctggactcccatccatccctatcctgtcctttcccccttcccagacaacaggagaacccgtgaattgtgtaaataaaattctgctttttctattctgaaaaaggacttacctaggaccatggcaaataatctctaacaatttacctggaaattaaggaattgggggtattttgttctggcaacaggaaatttacccttctgctgaaatccaagatattcagtgctctgcagaagcctctccccctcacagatctctgcggctgctgattggtaaaggaagcttgaggagggaactgcagccctaggaatctgggtgaatggggttccaagggcccctgggctgggaggagctggctatgaatgtgcatgaagacataatagctcaacctctaggattttgcatgcagagcggatcctgccttgtcactgacttcatctgggattgcttttccactccctggggcttagagaacaaagagcccggttcacaggcagagactcgggggtgctcagcagcagcccagatttaggggacatttgagggactcttggggccgcagccaaaaactgtctctcctggctacacctgcttaacttcagttcctttttctgtcaatatgtccttgcccactgcctctcggtgttgccttcataatgtcttgtgtgtgttatgtgtgtctacttgtgtagtagtgtgtgagccctcaggggcagggcttgtggctctggtgttaggttcaggggcttcagacccttctacgagctccaagctatcaatggcgcttttctctccctcttcccccaaccagggcatggagcatgtggctgtcctgaggttcttttactgatgtgccgcccttccacctcctcaagtggtgactttgtgtgccctccccctcctttgtgtattccttctcaatgctttccttggtgttaaccttaataaaaaggcgtcatctcccctcaaaaaaaaaaaaaaaaaaaaaaaaaaaaaaaaaaaa

SEQ ID NO: 830 - DNA, 3389 bp, Homo Sapiens
  NM_001013644
cttgtgcagaggactctccaggtgaaggctcaagggtggatccagctcgagacaccctcgctccccctcacagtcggaccttaggatttaggctttaacatctccacatcatgagattcgaaacctttaggtcttgtcttccgttctgtcctccaaatcggcctcttccgagcctgttgaccagggccagccgggcagagggctgggctcgctcaacgaggctcctctcgcacctcctggagcttcaggcttctttccgttgcagagaagctttatgggccaattcgttcggcatccccgggggcaggtgcgcggtgcgcggggaagaagaggatttgactgcggttctccacccccggcgcccaacctccaccccggtgcgcgcgctcttccaggctcctgctggtcccacttgccaggagttaggtctcaggtcagcctgagctcctgagacgcccaggcccggaaagacacgtaggggaaaccatctgctcacttctgtcctgtccggaagggatccctttctgacgggaaagaaaggcggtgagtcctgtcctgttgagtaggcggaagagagatcaaagggaagacaagaaaaatcctgtgagttttcaggatctaaagttaccatgaggtcgacctaacctcctctggaggtcctcccggtcctcccgtggctgtcgaaggtgaatctagcttccgtctccagttcgccaaggcggacaaagccgacgacaatgggcctgtccactatcttctttcatatgcacaaaatgtcagctcttcttgtttctaacttgcaacatcccacctgatgaccagctcagcaaattagagaccctccatgggattccatctctgtcttagttcgggcttccataactatataccataaactgggtggctaattcacgacagaaatttatttctcacagttctggaggttggaagtccgagatcaaggtgccaacatggtagggttatgatgagggacttttttctggttgtagactgccaccttctcattgtatcctcagggggcagagagagctccctggggtcccttttatagtggcattagtcccactcagactaacgggactaaatccagacccagttattgcaatgtgtgcaaaagaacaaggacttgtactatctgacttcaaggcttactataagctattacagacaaggcatcaggagggacaaatagataaacagactgagttaagagacctgaaactgatccacagccatacagtcaataaatgagctttcaatgaaagcagttcaatagaagaaaataaatcatttcaattaatggactttcatatggaggtgggggagaccaacaatgttattctccctcacactacatacaaaagtaatttgaggtgcattatacaccaaaacttaaaagttaaagatataaagcatttcaaggatactctgtaggtaaagattagcctaccaacaagtaggacactgaaaaaatatatataaaagacatgataaattagacttcatcaacattagccataccttctcatcaaaagataccactaagaaagtgaaaaggcaagcaagccacagacagagagaaaatagtcacaaaacgtatctgacctccacatcctgtaattagaattattgtggtctggtacactgcacccagtttctgcaggagtactttctgggtgtctctaatgagtaagagagggccccatgggatattcctacagttcccagatgaacagtgggaaagactctacgttgacaaaccccggggacctgaaacctcaggtcctcaaggagggtagaggatacctggaccctgacccagacccctagatgggctgtgccaagagacccagcaagggaagggattccctcctgcctcaggttctctgttcttctgtggttagaagacctgaacccaactccctccccaagcagtggagatagggcttttccaagggctggggatcttgctgtcctaaggacagctgagcaaggaggtcgaggaggatcttgggtggtggaggagaggaaaccgggtaagatgtgtgaagcagtcggctataccaggcacagagaggacccactgggacacaagagcctgcatgtgaagccaggccttgggccaccttgttcctcaaaggggtgcttacttccatgggatcttcaaagggactgtggaaagagaagccttcagcccacacctctgaatgcttttccaccacagcatgccctgtggcctgtatcctgctggtgtggaacagtcagacccctgcagggctgcagagcctctgtactgggcggcatcccagcctgagtgccagagctcagtgggcaggcccccgagcaagtagagaggagggcaccttttggacagaacctgtgggacaagagcgacgtctcatccgttcaggttcctcacaaaatgagagtcaggaagatcagggtgcagacctgatttcccacgaagggctgaaagcagacaaccggagggagagcagcacctgggccaatgaggtagaagacagaagaccacagtgtacttctgccctcaacctcaccccctcccacctacatcctccacaccccctgaccaccttcttcagaaacgtaataggaatcaagatcccccctggcctggttgctatgggaggcacagtggcctgatggagcctgaggcaggtgtgggaagatgtggattgtctaactggaggttgggagtccagggtgcagaaggagaagcttggagtgcaggatttggtggtatgtgtgtggcagtaggcactatgttctaattgccagtttttttttcttcttcctttttttctctagctaaacaagcactggccttgagataagcaatgctgaagcacttgcagctcacctattaccataaactgactgagccctccctacacaagccgtaactactgctttgattggacaagagactgatttcagtagttttctcttgataagagaccactggccgtgggcgggttctggacagtttacagaagctatgcacttgattgcctttgtgtccctgcttcaccttttgaagcatagggcctaattataatgtatttaaatgttgtctccaccccaaagtgaacatgggttgcatgtaacaggcatgtttactcagcatgcatgcagcaggatcccttcacaaatattcagagctccccctattccctgttgaatatgtatatgtggccagccagatcaacgtaaatcactattcgccctcccctccctggaaacctacttttcgggtttcagcaggaagctatgcctcccagtctgtcagaatggccacttgcaggctgtaaccctttataaaaaaataaaatctcctttctaaattt

SEQ ID NO: 831 - DNA, 694 bp, Homo Sapiens
  NM_001013646
gacatcaccaagggcctggcaccaggtgcccagtcttccagttgcgagggcaagcaaacccgtcatgagcaactcccttccccatctctgctcaccatgtggacgctgaaatcgtccctggtcctgcttctgtgcctcacctgcagctatgcctttatgttctcttctctgagacagaaaactagcgaaccccaggggaaggtgccgtgtggagagcactttcggattcggcagaacctaccagagcacacccaaggctggcttgggagcaaatggctctggcttttgtttgctgttgtgccgtttgtgatactgcagtgtcaaagagacagtgagaagaataaggagcagagtcctcctggccttcgaggcttcccatttcgcactccactaaagaaaaatcaaaatgcttctctttacaaagactgtgtattcaataccttaaacgaacttgaagtggagcttttgaaatttgtgtccgaagtgcagaatcttaaaggtgccatggcaacaggcagtggcagtaacctcaagcttcgaaggtcagagatgcctgcagatccataccatgtcacaatctgtaaaatatggggagaagaaagctctagctgaatggatttgtgtgtcaggagagaaaaaagttgagtgttgacaaactgtatgcaaactaataaaactattctgaagaaaagaa

SEQ ID NO: 832 - DNA, 2089 bp, Homo Sapiens
  NM_001013652
aaaaaaactcttctcgctccgctttcgccccgcatcttccaccttccttccagtccttgcggcgaccgagcccgcagtgtcagtccccagcggggacctgagtatgccggtgaagacgagagcggaaggcgaggacgacggcttcggggaagcgggtgacccgaggagactgctggagcgaccttggcgtttccgggggtgccttcccgggaaggggaatcgggatgttggcttcgaagggaccgaagggaccacctcgacccgccccgagtgggtttggagttgtaggtgctgtctcggatgcagggcgagcacccgcgagcgggtaaccagtcccgtgagagctgcaggtccccagccccgttttacagatagggaaactgaggcagctgctgggacactcgcccatatgggttttgctccacccacttccttcagccactttacagaccaggagttgagggactgcccgagcttagagtgtttaggggtggttgagggtgacccccatgttctgtgctctactctatccctatccaggccttctcccagcgccactctcacgctcctgcttgctagctcctgcttgctagctcctgctcctcccagcttcatcctcctcctgtttacattaattgctcctgatcttccacactcttgattttccggattctaactccatcaaaatgtaacttgatgtgttcaggccccggggacacctaggcacttgaggggggcgggtccgtgtttggcctgctgggcttagcaggagggtctggcccggggcggggagcgcgatgctctgctgggtcagcatctccagccacctggctttgctggtgtggcctcgcagccttgccaaatgtgagcagcttacagagcaaccagttgcacgtgcttaagctgccgaggtgacacagggcgctgtagggtccagccccacagggtcggtaggtctctccctgtgtgcggcgacgagagagtgtagaaataaagacacaagacaaagagacgagaaaaggcagctgggcccgggggaccactaccaccaatgcgcggagaccggtagtggccccgaatgtctggctgcactgttatttattggatacaaggcagaaggggcagggtaaagaatgtcagtcacctccaatgataggtaaggtcacgtgggtcacgtgtccactggacagggggcccttccctgcctggcagcggaggcagagagggagaggagacaaagagaaagacagcttacgccattatttctgcatatcagggactattagtattttcactaattgactactgctatctggaaggcagagccaggtgtacaggatggaacatgaaggcggactaggagcgtgaccactgaagcacagcatcacagggagacaggcctccagataactgcgggcgagcctgactgatgtcaggccctccacaagaggtggaggagcagagccttctctaaactcccccggggaaagagagacccccaccctccctttcccggtctgctatgtagcaggtgttgttccttgacaccttttgctaccgctggaccatgatccgcctggtaacgggcgtcttcccagatgctggcgtcaccgctagaccaaggagccctctggtggccctgtgtgggcataacagaaggctcgcactcttgtcttctggtcacacctcactatgtcccctcagctcctatctctgtatggcctggtttttcctaggctatgattatagagcgaggattatcataatattggaataaaaagtaattgctacaaactaatgattaatgatagtcatatataatcatatctaagatctatatctggtataactattcttgttttatattttattatactggaagagctcgtgtcctctgtctcttgcctcggtgcctgggtggcttgccgcccacacacacaaaaaagataaatgtttgaggtgatgaagatcttaatttccttgatttgatcattacatgtttcatacaggtatcaaagtatcacatgtacccccaaagtatgtacaactatgatatatcataaataaatgaataaataaataataaaag

SEQ ID NO: 833 - DNA, 1212 bp, Homo Sapiens
  NM_001013653
ggcgccgcaggaacgggctccgcggacgacgggctccagggacgcacaggcagcgggcctcccaccgcgggtgccgggggcgggggggctgcccccatgcggggcccttcctggtcgcggcctcggccgctgctgctgctgttgctgctgctgtcgccttggcctgtctgggcccaggtgtcggccacggcctcgccctcggggtccctgggcgccccggactgccccgaggtgtgcacgtgcgtgccgggaggcctggccagctgctcggcactctcgctgcccgccgtgcccccgggcctgagcctgcgcctgcgcgcgctgctgctggaccacaaccgcgtccgtgcgctgccgccaggtgccttcgcgggagcgggcgcgctacagcgcctggacctgcgcgagaacgggctgcactcggtgcatgtgcgagccttctggggcctgggcgcgctgcagctgctggacctgagcgccaaccagctggaagcactggcaccagggactttcgcgccgctgcgcgcgctgcgcaacctctcattggccggcaaccggctggcgcgcctggagcccgcggcgctaggcgcgctcccgctgctgcgctcactcagcctgcaggacaacgagctggcggcactcgcgccggggctgctgggccgcctgcccgctctagacgcgctgcacctgcgcggcaacccttggggctgcgggtgcgcgctgcgcccgctctgcgcctggctgcgccggcacccgctgcccgcgtcagaggccgagacggtgctctgcgtgtggccgggacgcctgacgctcagccccctgactgccttttccgacgccgcctttagccattgcgcgcagccgctcgccctgcgggacctggccgtggtttacacgctcgggccggcctccttcctcgtcagcctggcttcctgcctggcgctgggctctgggctcaccgcctgccgtgcgcgccgccgccgcctccgcaccgccgccctccgcccgccgagaccgccagacccgaaccccgatcccgacccccacggctgtgcctcgcccgcggacccggggagccccgccgctgccgcccaagcctgagcggccgcggccgcctggagcgctcgaagcttcccccatgcctttgccctccctttacactgtctgccggcgtcaacaagcgacacagaccgaaaaaaaaaaaaaaaaaaa

SEQ ID NO: 834 - DNA, 1818 bp, Homo Sapiens
  NM_001013661
actcattgcaccttcctgccaccccaggcagtgtctgggccctcagctccccctccctccacctaccccctcacacccaccactacgaccccacgggatacccagcccagacggaggaaacaccgagcctagagacatgagagttggaggagcattccaccttctactcgtgtgcctgagcccagcactgctgtctgctgtgcggatcaacggggatggacaggaggtcctgtacctggcagaaggtgataatgtgaggctgggctgcccctacgtcctggaccctgaggactatggtcccaatgggctggacatcgagtggatgcaggtcaactcagaccccgcccaccaccgagagaacgtgttccttagttaccaggacaagaggatcaaccatggcagccttccccatctgcagcagagggtccgctttgcagcctcagacccaagccagtacgatgcctccatcaacctcatgaacctgcaggtatctgatacagccacttatgagtgccgggtgaagaagaccaccatggccacccggaaggtcattgtcactgtccaagcacgacctgcagtgcccatgtgctggacagagggccacatgacatatggcaacgatgtggtgctgaagtgctatgccagtgggggctcccagcccctctcctacaagtgggccaagatcagtgggcaccattacccctatcgagctgggtcttacacctcccagcacagctaccactcagagctgtcctaccaggagtccttccacagctccataaaccaaggcctgaacaatggggacctggtgttgaaggatatctccagagcagatgatgggctgtatcagtgcacagtggccaacaacgtgggctacagtgtttgtgtggtggaggtgaaggtctcagactcccggcgtataggcgtgatcatcggcatcgtcctgggctctctgctcgcgctgggctgcctggccgtaggcatctgggggctcgtctgctgctgctgcgggggctccggggctggcggcgcccgcggtgccttcggctacggcaacggcggcggggtcggcggaggggcctgcggcgacttggctagtgagatcagagaggacgccgtggcgcccgggtgcaaggccagcgggcgcggcagccgcgtcacccacctcctggggtacccgacgcagaacgtcagccgctccctgcgccgcaagtacgcgcctcccccctgcggcggccccgaggacgtggccctggcgccctgcaccgccgccgccgcctgcgaagcgggcccctccccggtctacgtcaaggtcaagagcgcggagccggctgactgcgccgaggggccggtgcagtgcaagaacggcctcttggtgtgagcgcgcgcgccgggccgggctgcgccccagccaggaggagggcgcggggctctctgtctgcagctggggacacgtcggggctggggacgacctcgctcgccccaggctgccaggcggctgggggtgaaggcatttccctaaggaaatgcgtagggaggcagagcctcctccccaaaagtgggaaggggcgggcgagggcggaggaaggcgatcctgagccttctccgcacccccgggaccgaaggcttgggggagagggagggaggaggaggctgagtgtcctagagcggctgaggccggaggcctggtgtccccagcctaagcagagggccccgggggccgggtgggtgggggtctgtctggacgaattgttctgtgtgtgaggtctgagctctgaggcagcagtgttagcacaataaagaaacattgagacgtga

SEQ ID NO: 835 - DNA, 1932 bp, Homo Sapiens
  NM_001013670
ctcctatcggtggcgtcggtcgcaaagggagcagcccccgaggccgccgcgcagctccccgccgaggcctcggtgccccttcccattttccatccgcgctcccacgaaggttgaggcggcggggagaggcgaagccgcgagcgctcggccgggcggtcccgccgggtggtcgcagccatgacagcggctccccttccgcgcccctcccgccggagatgagggaagatgtccctgtcagggttaaggccaagctgaagttgctggcgtctaccttccacaagaaccaggagccgcagccgcggctcacgctccaccgcaacagacggtggggcgcgcggcggcggcctcgcagggcagggcgggggcgcagatgggggagtctcgggaccgacggcggcctaacgggtagaggccccgggtccccgccccttcctccctcagctggccccgccccgcccccgggactgcgcgaggcttgggtgggaggaggcggagggcgcgtctctccggctcctggcgcggggctgactcgggggccgctggcccctcttggccgccgtcgccacgcaccgaggtgggagcccgcggcggccggagccctcttgggacccatggtcgccctcggtcagcgggactgctcccgggacctcgacggggcggggcggggcgctccagcgttgtttgagcccaggcgcggaagggaaaaggcctctgagatgctcgcgtgttttgcctgggcgcggtggcgcacgcctgtaatcccaaagtgctgggattccaggcgtgagccaccgcgccgggacccaaggcccttaagttttaaggcctcattcttcagtcaggttttccctgttcccgcgtgttcggccaattttttgttgttgttgttttgtttttgtttttgtttttgagtcaattttccagacatctttaattagcaatatgtttaagtagttacaagcctttccttcttttcttgtgacagtttgggttgaatttctatcgtttgcagcctgtcactgtaaggcacaaacatgatcacgcaagatgcgatagtagatttaagccagttgtttttaagtttgtgtttaaggagaaactaacaatgaaaacggcctcgttgacggaggaaaagttggaatgcagcctctggtgctgtttgagcgatccctctccccggggcctggccgcgcgctgctgtgttctggaagggctcattgtacagtcaaggcggcagggccttcttctgtcacccatgctggagtgcagtagcatgatcacagctcacggtagcctccaccttctgggctcaatcctcctacctcagccttccaagtagctgggactacaggtatgcaaccaccatgtccagctaaattttgtactttttgtagagatggagtttcaccatgttggccagactggtctcaaactcctgacctcaagtgatccacctgcctcggcttcccaaagtgctggggtcacaggcgtgagacaccatgcccagcctgcccttcctttttaaacctttcctgtgcatagtgaagaataccatgactagtttggtgttactgcctttgtttgtgctgaagtaccagcatttttacccactattgtatttgcaccgttacagcaaatgtcaccatgttagtattcacgttaaaatagtttggacctgggcgtctgagggccccactttgggaaccgttgaaataggtacttaaacctactatatatcatatcttgtcatctacaagatttttaaaaaacatgatttcagttaattttttttgtaatttttacaatatggttttgaggggtttcagtccagagcaacaacatgtattttatttagcttatgctgaagtttactagataaatactaacctaatagaatgaggtcctaaatctttttttgcagtttctttagcc

SEQ ID NO: 836 - DNA, 3354 bp, Homo Sapiens
  NM_001013685
cctgccctccgacggcgtctccaggccccaaatggcctcgggtcggtgggcttctccaggcccagcttgggcctcccggcggcctctgcaggctcaagtggtcctgaagtcagcctctccaggcccagctccggcctcccagcaagcaagctcttttggctcagctcctgcccagctcccgccggcttttgtagaccctgaactttctccagcgatgctcctcagtcccacctgcctcccggtggcctgtacaggcccaggtctggctggagaacagcctctgcaggccccactcttgcctcctaggggcatctccaggcccagctctggcctcacggcggcctcccgggaccaagtccctgcctgcctcccagcagcctgtgtgcggcccagctcctccgtcacggtggcctgttcaggcccaactcatgcctctggcaccctttcgagaggcgtgagcccctgcctcacattggcctctctcacgctgagggagttcagcgtgggcccctgtctcacactggcctctctcacgctgagggaggtcagcatgagcccctgcctcacactggtctctctcacgctgagagcaatcctccctcacgctggcctgttgagacccagctcatgcctctgttggcctttccaggcccagcccctgcctgttggcggcctctagatgtccagcctctacctcaacagtgggccctccacgcccacctcttgcctggccgtggcctcttcgggccaggctcccgccttggggcagcccccgcaggcccagctcctgcctcacggccctccggaggccaagctcatgcgtcagggcagcctctcccagcctggcgtttgctcctttgcatgggctccaggccctggacttcctccagtcggcctctccaggcccagctcttcctcccggcagcctctgcaggaccagactgtcgtcaagtaggcctgtccagggacagctccttcctcccggcggcctctgtaggcccagactgtcatcaagtaggcctgtccaaggacagctcctgcctcccggtggcctctgttggcccaagtcgtcctcaagtctgcctccccaggcccagctctggcctctcggcggcctctccaggtgcaaaagttcctcgagtccgtctctccaggctcagctcctcctgtctcccagtggcctctttcagcccagcccagctcatgcctcccggtggccttcccaggccctgcttttgactttccgcggcctctgcaggccccgaacttgaccaccagtcggcctctccaggcctggcctcctgcctgttgacagccactagaggcccagcctctacctcaacagtgtgccctccaggcccacctcttgcctcgccgtggcctcctcgggccaggctcccacctcgggacggcctccgcaggcccagctcctgcctcacggaggccctctggaggccaagctcatgcgtcgtggcggcctctcccggcctggcgtttgctcctttgcatgggctccaggtcctgcacttcctccagtcggcctctccaggcccagctcttcctcccggcagcctctgcaggaccagactgtcgtcaagtaggcctgtccagggacagctcctgcttcccggcggcctctgtaggcccagactgtcatcaagtaggcctgtccagggacagctcctgcctctcggtggcctctgcaggcccaaatcatcctccccaggcccagctccggcctctcggcggcctctccaggtgcaaaagtttgaatcagtatctccaggcccaggtcctcctgtctcccagtggcctcttttggcccagcccagttcatgcctcctggcggccttcccaggccccacttttgactttccgcggcctctgcagattccgaacttgacctccagtcggcctctcctggcccggcctcctgccttccgaaggcctgcacaggcccagtctctgcctcacagcggactctccacgcccagctagctctcgcctcactgcagcctcccgagtccaaagctcctgcctcttggccgcttcggcaggcccagctcccacctgccagtggcctcttctggcccatggggttcattcctcacaacggcctttccaggcccattttttcccttccgactgcctctcaggacccagaacctctgggcccacttgaggagatgcagccaggaggaacagctgggcttgcagaggctgccatgcgggaggcagaggctgggcctcctgaagtcggcctctccagacccacttgcagactcccggcatcctctctgggctcagctcttcctcccggctgcgtctccaggcccgactccggcctcccaacaacctctttggactcagctcccgcccagctcccggtggccctggttggcccacaacttcctgaagccaagctccccagccccagctcaggcctcacggtggcctctccaggctcagctcctgccctctgacagcgtctccaggccccgaacggcctccagtcggtggattcctctatgcccagcttgggcctcccggcagcctctgctggcccaaatcgtcctgaagtcgccctctccaggcccagctccggcctcccggcagcctctccaggcgcaacgcgtcgtcaacgagggcccctccggggtcagctcctgcctctcatcagcctctagaggccagtctggcggcctctgcaggcccagactgcccttgagtcaggctctccagggccagctccagcctcctggcagactctgcaggcccaagtcgtcctcaagtcggcctggaagtgggcctggaagagctgcattttggcctccccgggcccagctccgtcctctcggcggcctctccaggtgcaaaacttcctcgagtcagcctctccaggtccagctcctcctgcctcccagtggcctctttcagcccagcccagctcgtggctgtaggcagccttcccaggccctgcttttgacttttggcggcctcttcaggcccagaacttgatctccagtcagcttttgcaggcccggcatcctgcctcccgaaggcctgcacgggcccggcctcggaatcacagcagactctccacgcccagctagctctcgcctcactgtggcctccccagtccaaagctcctgcctttcggccgcttcggcaggcccagctcccgcctgccagtggcctctttaggcccagctcattcctcacattggcctttccaggccccgtttttcccttccggcagcctcttggcctctaattttttttatcttttgtgtataaatcccaaaatatggaattttggaacatttccaccattatataaatattttggtaggt

SEQ ID NO: 837 - DNA, 4694 bp, Homo Sapiens
  NM_001013690
agtgagctatggggacactactgcactgtagcctgggcaacagagcaagaccttgtctcaaaaatgtatatatattttgggctttttttcctaaaacgggaactacaacagcatatttgcgagctgatgagagtgacccagcagagagggaaatggatcagctctgttgaagatgcactggacaccagaacacgcccagcccctcaaccagtggccagagcagcacctggacgtctcctccaccaccccgtcgccggcccacaagttggagttgccccctgggggtcgccaacgctgccactacgcttgggcacacgacgacatctcagccctcactgcctccaacctcctaaagcgctatgcagagaagtactctggggtcttggattctccctacgagcgtccggccctgggcgggtacagcgacgcctccttcctcaacggcgccaaaggggatcccgagccctggccagggccggagccaccctaccccttggcctcactccacgaaggcctcccaggaaccaaatcgggcggtggcggcggttccggggccctggggggctccccagttttagccgggaacctccctgaacccctctacgccggcaatgcgtgcgggggcccatcggcggcgcccgagtacgcggccggctacggcggggggtacctggcgccgggttactgcgcgcagacgggcgccgcgctgcccccgccgcccccggccgcgctcctgcagcccccaccgcctccggggtacgggccctcagcgccgctgtacaactatcccgcagggggctacgcagcgcagcccggctatggcgcgctcccgccgcccccaggcccacccccggccccctacctgaccccgggcctgcccgcgcccacgcccctgcccgcgccggcaccgcccaccgcctatggcttccccacggccgcgccgggtgccgaatccgggctgtcgctgaagcgcaaggccgccgacgaggggcccgagggccgctaccgcaagtacgcgtacgagcccgccaaggcccccgtggctgacggagcctcctaccccgccgcggacaacggcgaatgtcggggcaacgggttccgggccaagccgccaggagccgcggaggaggcgtcgggcaagtacggtggcggcgtccccctcaaggtcctgggctcccccgtctacggcccgcaactggagccctttgaaaagttcccggagcgggccccggctcctcgtggggggttcgccgtgccgtcgggggagactcccaaaggcgtggaccctggggccctggagctggtgacgagcaagatggtggactgcgggcccccggtgcagtgggcggatgtggcgggccagggcgcgctcaaggcggcgctggaggaggagctggtgtggcccctgctcaggccgcccgcctacccgggcagcctgcgcccgccgcggaccgtcctgctctttgggccgcggggcgcgggcaaagcgctgctgggccgctgcctcgccacgcagctgggcgccacgctgttgcgcctgcgcggcgcgaccctggctgcgcccggcgccgccgagggcgcgcgcctcctccaggccgccttcgcggccgcgcgctgccgcccaccctccgtactcctcatcagcgagctagaggcgctgctccccgcccgggacgacggcgcggcggcagggggcgcgctgcaggtgccgctcctggcctgcctggacgggggctgcggcgcgggggctgacggcgtgctggttgtgggcaccacctcgcggcccgcggctctggacgaggcgacccgccggcgcttctctctccgcttctacgtggcgctgcccgacagcccggcccgcgggcagatcctgcagcgggcgctggcccagcagggctgcgcgctcagtgagcgggaactggcggcgctggtgcagggcacgcagggcttctctgggggcgagctggggcagctgtgccagcaggcggcggccggggcgggcctcccggggctgcagcgccccctctcctacaaggacctggaggcggcgctggccaaggtgggccctagggcctctgccaaggaactggactcgttcgtggagtgggacaaaatgtacggctccggacactgacggcgcgcgggggaggccgcgggagccgcagtccctccgtccccgccgcctccgcgtgggagggatgtcactgactaaacccggctggcaggggctggagtggtgaatgtgggatcggggacaggaggggtctgccggtggatattttttttttcgtgggaaggaaaatgcttctgccaggcagatgccatatgcgccgtgtactcaggtttttcctatttattgtggactggaagctcgccatctccgcccggcagaccgggcagatccggcatgggctggcacccggggccttaagaactcctgctctcttgccacaacgcttttgtctcctcgctatctgaatggcaccctccttctccctcactctctccatcccattctctgcattctcttggttttctctcccttttgctttgtcgctgacacccctgcccaccccatgctggccctgtttctctcctgcccctccctccccagctctccatccctcaccctctgtgcttctgtctccatccctggctctccagcgtccctggccttttggtccctgagctttaatgcctttccctgccttctgttcttatttggactgcagtggccctttgcaggagctctggaggcccaggggctgaggaggagggttacccctctacccatctgaaacctagggtctagggggatcaaggaaaaaaagtccccaaagaaggggaattttttgtttgtttttgaggggagatcccagaaatgtagcttgtttcatattttagtcttcttatttttgtaaaatgtgtagaatttgctgtttttctttttcttttgacaactcaggaagaaactgacctcagaaagaatgttagactttggctgctctcctgtgtgcccctcacacctgccccctcccccccactccatccaggggaccaaattctcccagacactcaaaaaatgagacttacggggaaggggagaggaagacccagaggcctcagtgaaaccccagctattcctggtcagaagcagaatgtattcctaagggcttcctccccagggccgaggcctaggcatgaatgtggggagtgggctgtggggtttgagagaagggaggccttattcctctcctgctgctccccaccccctgccccacccaacccctccgctgagtgttttctgtgaagggctatccagagttaggatgcccttgcccaattccttcctgagacccagaaggtagggtgggagggcccaaatgggaaggtgacctaagcagaaagtctccagaaaggtcatgtcccctggccctgccttggcagaggtccccagtgacttatgctaggaggattccatctgggtagacagtctggccacaaaatcagctactggacctcagccatctctgctggaggctctgaggaggagtgagcatccctcacttgtgggggctctgtgaggaaatgtgccttccccattcccccggagtcctaggtctggagctccagggctgggagagggtgagggagatgggcaggggtgttttctctgaccttgggggcttagtctcagtcctgcctgaactttccactaggcttggaacccttccaagaaccatatttctctccttcccaccaattttcccttgatgaggctttagcagtttgctcccaccacccccagcccatttcacaactctgatcttagtccaaagcaggggacacgcccccccaccaccactttttctctctcccatctcagcctcctgtgcagttccttgcctgcccgtgcatttcctagagtctactgcctcccccctggctgggagggtgtctgggggggatctttcaggggccctggcacccagggcctgtgctggcctaggagtgctgaccagaaggctgctctgttcccccccacccccgttgctttctggccccctctttggagccagccacccacagggctttggtgcctcagaagcagtgggctgccgggtcacagccgcaggctgcaaaagaccctcggagggagcatggagtgaggggttctctctcaggtgtgtatgtattggggggtgggggtgggtggagggtgtcagggaagttggggtgggatcccagccttcccttcaagaggcagggagctctgggaggtggagtccccaccgctttctctactaggctcctcctgttccccaggcttggggagctttgcacaaggagactgcccccagcctagtggcacctacctcatgggctctggggcaggtaggggaagggccagtccagctctggtaatgctggggggaggcataccaaagaatccaggggcagggagtggggagggtgacttccgagctggcctctccccttcctctacccagactggggctgggatcctctcctcccgctgtaaccatttctacctcattttgctgcgtgttgtacatggacgtatttatctcctgtctgacgatgctctgcagttgtggtctgtctacctcagaagagactgtattttaaaagaaagtattacacagtattaaagcgatgacatgtggtttgca

SEQ ID NO: 838 - DNA, 1071 bp, Homo Sapiens
  NM_001013699
ggctcttcctcgggcagcggaagcagcgcggaggtcggagaagtggcctaaaacttcggcgttgggtgaaagaaaatggcccgaaccaagcagactgctcgtaaatccaccggtgggaaagccccccgcaaacagctggccacgaaagctgccaggaaaagcaccccctctacctgcggggtgaagcctcatcgctacaggcctgggaccgtggcgcttcgagagattcgtcgttatcagaagtcgaccgagctgctcatccggaagctgcccttccagaggttggtgagggagatcgcgcaggatttcaacactgacctgaggtttcagagcgcagccgtcggtgcgctgcaggaggctagcgaagcgtacctggtgggtctgttggaagatactaacctgtgtgccatccacgctaagagagtcaccatcatgcccaaagacatccagttggctcgccggatacggggagagagagcttaagtgaaggcagtttttatggcattttgtagtaaattctgtaaaatactttggtttaattggtgactttttttgtaagaaattgtttatatgttgcatttgtacttaagtcattccatctttcactcaggatgaatgcgaaaagtgactgtttacagacctcagtgatgtcagcactgttgctcaggagtgacaagttgttaatatgcaaaacggatgcgtgatatttcttgcttctcatgatgcatgtttctgtatgttaatgacttgttgggtagctattaaggtactagaattgataaatgtgtacaacagggtccttttgcaataaaactggttatgacttgatccaagtgtttaacaattggggctgttaagtctgaccatacatcactgtgatagaatgtaggctttttcaagggtgaagatacaaaccttaaccacagtgtaacttatagtttcctttaaaaaaaaaaaattaaacctggcagctatagaatacaatatgtgcatttataatagctattttatatattgtagtgtcaacattttcaaattaaatgttttacattcacaaaaaaaaaaaaaaaa

SEQ ID NO: 839 - DNA, 2445 bp, Homo Sapiens
  NM_001013706
gacagctggtgtctgaagccgctcgcgcccagggtgaccctgtttgcagcacgatgtctgaagaagaggcggctcagatccccagatccagtgtgtgggagcaggaccagcagaacgtggtgcagcgtgtggtggctctgcccctggtcagggccacgtgcaccgcggtctgcgatgtttacagtgcagccaaggacaggcacccgctgctgggctccgcctgccgcctggctgagaactgcgtgtgcggcctgaccacccgtgccctggaccacgcccagccgctgctcgagcacctgcagccccagctggccactatgaacagcctcgcctgcaggggcctggacaagctggaagagaagcttccctttctccagcaaccttcggagacggtggtgacctcagccaaggacgtggtggccagcagtgtcacgggtgtggtggacctggcccggaggggccggcgctggagcgtggagctgaagcgctccgtgagccatgctgtggatgttgtactggaaaaatcagaggagctggtggatcacttcctgcccatgacggaggaagagctcgcggcactggcggctgaggctgaaggccctgaagtgggttcggtggaggatcagaggagacagcagggctactttgtgcgcctcggctccctgtcagcacggatccgccacctggcctacgagcactctgtggggaaactgaggcagagcaaacaccgtgcccaggacaccctggcccagctgcaggagacgctggagctgatagaccacatgcagtgtggggtgacccccaccgccccggcctgccctgggaaggtgcacgagctgtggggggaatggggccagcgccctccggagagccgccgccggagccaggcagagctggagacgctggtgctgtcccgcagcctgacccaggagctgcagggcacggtagaggctctggagtccagcgtgcggggcctgcccgccggcgcccaggagaaggtggctgaggtgcggcgcagtgtggatgccctgcagaccgccttcgctgatgcccgctgcttcagggacgtgccagcggccgcgctggccgagggccggggtcgcgtggcccacgcgcacgcctgcgtggacgagctgctggagctggtggtgcaggccgtgccgctgccctggctggtgggacccttcgcgcccatccttgtggagcgacccgagcccctgcccgacctggcggacctggtggacgaggtcatcgggggccctgacccccgctgggcgcacctggactggccggcccagcagagagcctgggaggcagagcacagggacgggagtgggaatggggatggggacaggatgggtgttgccggggacatctgcgagcaggaacccgagacccccagctgcccggtcaagcacaccctgatgcccgagctggacttctgacccatgggccagtggaggcggggaggaaaggccacctgcacaccccgatccctgctgccccctggtggccacacgtaagctcgaggccttggccttgacccttctttggaatcaggcccaactccggatctctgaccacctttttggtattggactctcccattttttccttgaacacatggacaaagaggcccgggggagcagggcctcgaaccctattcaggccaacttgagccacaagctgggttcttcacctatgtcctgctccctggctccatgaagcgaatccaaatctttccaagaggctgggcacagtggctcacgcctgtaatcccagcactttgggagtctgaggcaggtggatcatctgaagtcaggagttcgggatcatcctggccaacatgatgaaaccctgtctctacttagaaagaaagaaaaaaaaaaaaaaagccaggtgtggtggtgtgcacctgtagtcccagctagttgtgaggctgacgcagaagaattgcttaaacccgagaggcgcggagcttgcagtgagcagagatcgcgccactgcacaccagcctgggtgacagagcgagactccatctaacaaaaaataatagtaacagcctcccgaagaaatacacattttgcccaatgccttctgtttggggctttgaaaagtgagccctgactgggtgtggtggttgacacctgttatcacagcactttgggaggccaaggtgggaggactgcttgagcccaggagttggaggctgcagtgagccatgatcttgcccctgcgctctcgcctgggtgacagagcaagactctatctcaaaaatgtttttaaaaaatacttcctagggaaacacacattttgccctatttggaactttgaaaagtgagccctcctctgcccatgggccgtgctgctcagcctgccatactcgcttgctttgctgtttgggatttgcctccagaataaaggtcctttttgttgttgaaaaaa

SEQ ID NO: 840 - DNA, 2351 bp, Homo Sapiens
  NM_001013725
aatacccccgggttcaggtcatcacacagccaaggcaggagctccacactgacactaagggtgcatcctgggctcattcatcagggcatgcctccaaaatatttctccacgtctcctccctttgcccacctgcattgtctctgtgcctcagccccggctgggggcctgcaaggatcccctatatcctctgcccctgcacggctgggtcccaggccatctgtccgcccaccacacctctctcaccttgtccaccacgctccagcaccacagtcctctttctgcttctttcccagcctctgggcttttgcacacgctgttccctctgcctgaacaccctccactgggctgagaacaactctctgagacctctctcagctgttgcttcctttgaaacagccgctgctgctgtcactctcccagctccaagacctgctgagcctcctgtcttttttagttcccatgtccccagcacttctccttggcctcctttggcccaattgacaatgtccattctcaatgccttctcacccagcgctgagccccactgggtgaaggcaatgcctgtcatgttcaccacaatatcccctcccccatcaccacgactggtccacagtgatgctcaaaaaagatctgttggtaggcaatgtgaaggtgcattcatgtcatcctgcaggcggaattctccacgagttttgagcagcctcggttttcccaccacctccaaatcatgcaagacacagggtaagagcaaagacaaggtggctgtggccgatgtccaccctctcggggcgtcccttctcttctctcctccttgagcagggagaccatcggggtgcaacctggttggggcggggaggaggtgcagggcctggccagagcgggcctggccacgggcaagggacagcgacccccgggccaggacaggtgagagcggcgcaggcccgggcccggcgtggcggaggtgcgcgtgagcggccagcagagggcgccagagagccaggagcggcccgcagaggagcccgcgccggccccggtgcccacctccgcgccgcgcggaccctccgagcccgcgctcagacgccccagctccgccgagaggccgcttgcgccgggtccttcttccccaaatgcaggcagagcccccggagccatggccagcccttccggcagctccaaagccactggcaagccccgaggcagggatggccggcccaggagggaggaggacgacgtccctcccgaagagaagaggctgcggctcttgctggaggggggaagcgcacagccccaggactgcgaggacggggaggacgcgccgcggccgggcagggaggagaccggcacccagacaggtggcgacggcagaggagtaagtgacgcgggcgcgggggtccgggggtgccgggagcgcgggggtgctggggacgcggggtaggggcggcgggaggctccgtggcctgccccgggttaaagctgggagggcggccttcattctgaacacatttaggcagcacgggcagccctcctcgccgtgggctgcatcagagcccccctgcccagtcttggggttgctcccggatgctgtctgggaggcttgctcatggtgacatcctcatctccccgtgcacgttactgcattcagagcttgggtcacctggacactgaactctgagtgaattttctctgagatcccgggagaaggaggacagttctctggaaggttttccagggccgatcacggaaaggatgagaagggagaggttctggtcggggacacaattacggtggcagtgtaacatcaggaaactttattgcgtgaagtccctctcactccctctacctccttcttttacgtggactctgccaaagaccaggataccagaatgcactgcagtgaccaaacgtagtgggaccttgggaacgcgagtctggagccaggcggctggggtttgcatcctggttctgcccctccttagctggctgacatggcacaagccacttaccctctctgagccttactgtcttcagtggcaaatggatctgtcaacaggccccattgcctggggttgttactgctgagattaagggatgctcgtccatagaaagacttagcgttgtgcctggcacatagtgtatggtggataaatgggacttaggactaaaactcatgccttggtgtgtttttgcagtgatgttttgttctggggtgcatcacaagagacaaggttcttggccgggcatggtggctcaagccaataatcccagcactttgagaggccgaagggggaggatcgcttgagcccaggagtttgagaccagcctgggcaacatggtgaagcctcatatctacc

SEQ ID NO: 841 - DNA, 1792 bp, Homo Sapiens
  NM_001013738
cttgggagtcccctaagacacatcttcagtcacttctctctgcctgtgtctcaggaaaccagctcctcctactgtcttctgtgctagggatcacttccttgttgagtggggcctgagttttaagaggatcttctgctcctcttcatctggtccgtttccttccaaggcccccgagaggaaggcatgcggtgggccctactggtgcttctagctttcctgtctcctgccagtcagaaatcttccaacttggaagggagaacgaagtcagtcaccaggcagactgggtcatctgctgaaatcacttgcgatcttactgtaacaaataccttctacatccactggtacctacaccaggaggggaaggccccacagcgtcttctgtactatgacgtctccactgcaagggatgtgttggaatcaggactcagtccaggaaagtattatactcatacacccaggaggtggagctggatattgagactgcaaaatctaattgaaaatgattctggggtctattactgtgccacctgggacaggcacagtgattcagacctgtcctacaccacactgaaaatctgccttgtggctgcctctggtacacaagatagagccgccccctctcatttcctgccaccaaatttcctgtattctgaacaagagaaagacagcttaactcctgatctccctcctaatatcacactgtcctggcagcagctgcatcctgttccccacccctcccccacaactttcctgaagatcaagctgccatctccaggcctcagctaagcagcctggctgagagcaaggttctctcagctctcctaggacatgggggaggcccactcactctgcttcctatgacacacaggtacaactagggtccagctgtgaagcgagatattttggacagcaaatgggaagggtatttatactgaatcatgtatccactcatggtccagagatcacagctgagagtggtgcttattccttatgtctataacaacataagcaatactataatgaccactaaaacactaggcccaggtatgcagttgaacatggtctccctctgccctcccttttattctctctctcttttcttacttctttgcttgtttttatttttctctccctccctaactccctccctccatccatcctttcctcccttcctcccttgtttccttccatccattctccttccttgttttccttccttccttccttgcttttctctctctttctttcctttttgggtacataatcagaatactttttccacaaaatcatttgatataatttttctctatatgttcatgccaacattcatacagctagtttaattgttcagttctctttttcacattttggaattttgttgtattactttgttttgcttcatatctgttttgtatatataaaacatttacatgaaactgaagccaaaattataaaagatgatgcatttgaagattttagcttccattgtagatttctcgttcctcttttctccctgacactataggtaacaatatttttggcagttcacttgagctttttcactgtttgtcatagcggagtatgtattgtttctattttaatgccatatttatattttcgttctgatatttggtttttatacattttaatcaatcttatattttcccgtgtctggactgtgtgtcttacttctaaaggtgcacgtacttcataagtatgcataaagaagtccatatcatttaaaaaaaaaaaaaaaaaaaaaaaaaaaaaaaaaaaaaaaaaaaaaaaaaaa

SEQ ID NO: 842 - DNA, 2717 bp, Homo Sapiens
  NM_001013836
agtgtcgcgataaatgggcgccggcggagcggagggagatccgagcggcggcggcaagctggctgcgagcggctgagcagcactccaagctcgccggcctttggtctccaggacttgtcccagcagcccctcgaactgagaattacaccatcggacccctggctctgaggccttcagacttggactgtgtcacactgccaggcttccagggctccaacttgcagacggcctgttgtgggacagtctctgtaatcgcgaaagcaaccatggaagacctgggggaaaacaccatggttttatccaccctgagatctttgaacaacttcatctctcagcgtgtggagggaggctctggactggatatttctacctcggccccaggttctctgcagatgcagtaccagcagagcatgcagctggaggaaagagcagagcagatccgttcgaagtcccacctcatccaggtggagcgggagaaaatgcagatggagctgagtcacaagagggctcgagtggagctggagagagcagccagcaccagtgccaggaactacgagcgtgaggtcgaccgcaaccaggagctcctgacgcgcatccggcagcttcaggagcgggaggccggggcggaggagaagatgcaggagcagctggagcgcaacaggcagtgtcagcagaacttggatgctgccagcaagaggctgcgtgagaaagaggacagtctggcccaggctggcgagaccatcaacgcactgaaggggaggatctcggaactgcagtggagcgtgatggaccaggagatgcgggtgaagcgcctggagtcggagaagcaggagctgcaggagcagctggacctgcaacacaaaaaatgccaggaagccaatcagaaaatccaggaactccaggccagccaagaagcaagagcagaccacgagcagcagattaaggatctggagcagaagctgtccctgcaagagcaggatgcagcgattgtgaagaacatgaagtctgagctggtacggctccctaggctggaacgggagctgaagcagctgcgggaggagagcgcgcacctgcgggagatgagagagaccaacgggctgctccaggaagagctggaagggctgcagaggaagctggggcgccaggagaagatgcaggagacgctggttggcttggagctggagaacgagaggctgctggccaagctgcaaagctgggagagactggaccagaccatgggcctgagcatcaggactccagaagacctttccagattcgtggttgagctgcagcagagggagcttgccttgaaggacaagaacagcgccgtcaccagcagcgcccgggggctggagaaggccaggcagcagctgcaggaggagctccggcaggtcagcggccagctgttggaggagaggaagaagcgcgagacccacgaggcgctggcccggaggctccagaaacgggtcctgctgctcaccaaggagcgggacggtatgcgggccatcctggggtcctacgacagcgagctgaccccggccgagtactcaccccagctgacgcggcgcatgcgggaggctgaggatatggtgcagaaggtgcacagccacagcgccgagatggaggctcagctgtcgcaggccctggaggagctgggaggccagaaacaaagagcagacatgctggagatggagctgaagatgctgaagtctcagtccagctctgccgaacagagcttcctgttctccagggaggaggcggacacgctcaggttgaaggtcgaggagctggaaggcgagcggagtcggctggaggaggaaaagaggatgctggaggcacagctggagcggcgagctctgcagggtgactatgaccagagcaggaccaaagtgctgcacatgagcctgaaccccaccagtgtggccaggcagcgcctgcgcgaggaccacagccagctgcaggcggagtgcgagcgactgcgcgggctcctgcgcgccatggagagaggaggcaccgtcccagccgaccttgaggctgccgccgcgagtctgccatcgtccaaggaggtggcagagctgaagaagcaggtggagagtgccgagctgaagaaccagcggctcaaggaggttttccagaccaagatccaggagttccgcaaggcctgctacacgctcaccggctaccagatcgacatcaccacggagaaccagtaccggctgacctcgctgtacgccgagcacccaggcgactgcctcatcttcaaggccaccagcccctcgggttccaagatgcagctactggagacagagttctcacacaccgtgggcgagctcatcgaggtgcacctgcggcgccaggacagcatccctgccttcctcagctcgctcaccctcgagctcttcagccgccagaccgtggcgtagcctgcaggctcgggggcatagccggagccactctgcttggcctgacctgcaggtcccctgccccgccagccacaggctgggtgcacgtcctgcctctccagccccacagggcagcagcatgactgacagacacgctgggacctacgtcgggcttcctgctggggcggccagcaccctctccacgtgcagaccccatgcgtcccggagcctggtgtgtgggcgtcggccaccagcctgggttcctcaccttgtgaaataaaatcttctcccctagacacaaaaaaaaaaaaaaaa

SEQ ID NO: 843 - DNA, 4512 bp, Homo Sapiens
  NM_001013838
tccgccgccggaggagcaggtggctgccgtgcgggtctgggccccaggcttcctgtgtgcgcgctcgtcctctgctgtttcccgccggagctcgttgggcctccccggcccgcccggcccatggcccagacccccgacggcatctcctgtgagctccgaggcgagatcaccaggttcctgtggcccaaagaggtggagctgctgctgaaaacctggctacccggggagggtgctgtgcaaaaccatgtcctggcactgctacgatggagagcctacctgctgcacaccacctgcctcccgctgagggtggactgcacgttcagctacctggaggtccaggccatggcgctgcaggagacaccccctcaggtcacctttgagctggagtccctgcgtgagctggtcctggagtttcctggtgtggccgccctggaacagctggcccagcacgtggctgcagccatcaagaaggtcttccctcgctcgacccttgggaagctattccggaggcccacaccagcctccatgctggctcggctggagagaagcagcccctcggagtccactgacccctgcagcccctgtggtggcttcttggagacatacgaggctctgtgtgactacaatggcttccctttccgagaggagattcagtgggacgtggacaccatttaccatcgccagggctgccgccatttcagcctgggagacttcagccacctcggcagtcgggacctggccttgagtgtggctgccctgtcctacaacctgtggttccggtgcctctcctgtgtggacatgaagctgagccttgaggtctcagaacagattctgcacatgatgagtcagtcatcacacctggaggagctggtgctggagacctgcagcctgaggggagactttgtccgacgactggcccaggcgctggcgggacactcaagctctgggctgcgggagctcagcctcgcggggaacctgctggatgaccgaggcatgactgcactcagcagacacctcgagcgttgtccaggagccctgaggagactcagcctggcccagacagggttgacaccgcgaggaatgagggctctgggccgggcactggccaccaatgccgccttcgactccaccctgacccacctggacctttctgggaatcctggggcgctgggggcctccgaggacagtgggggcctctatagcttcctgagccgtcctaacgtactgtcgttcctgaatctcgcaggcaccgacactgccctggacactgtgagggggtgctccgtggggggatggatgaccggcagggcggactggagggcgggacggggagggctcggtccccccgcgggtgtagccaacagcctccccccgcagctcttcgcagcggtatcccgaggctgctgcaccagccttacccacctcgacgcttcgaggaacgtcttctcccgcacgaagtcccgcgccgcgccggccgcgctgcagctcttcctcagccgcgcgcggacgctgcggcacctgggcctggcgggctgcaagctgccgcccgacgcgctcagagcccttttggatggcctcgcgctcaacacgcacctccgcgacctgcacctggacctcagcgcttgcgagctgcgctcggccggcgcccaggtgatacaagacttagtgtgcgacgcaggcgctgtgagctccctggatctggcggataacggcttcggctcagacatggtgactctggtgctggccatcgggagaagccggtccctgagacatgtggcgcttggaaggaacttcaacgtccggtgcaaggagaccctggacgacgtcctgcaccggattgtccagctcatgcaggacgacgattgtcctcttcagtctctgtcggtggctgagtctcggctgaagctgggtgccagcgtcctactccgggccctagccaccaatcctaacctgaccgcgctggatatcagcggcaacgccatgggggacgcgggcgccaagttgctggccaaggcgctgcgggtcaactcgaggctccggtctgtggtctgggaccggaaccacacatctgctttgggtctgctggacgtggcgcaggcgctggagcagaaccacagcctgaaggccatgcctctgccactgaacgacgtggcccaggcgcagcgcagccgcccggaactgacagcacgtgcagtccatcagatccaagcctgtctcttgaggaacaaccgcgcagaccctgcctcttctgaccacacgacccgccttcagccacttggtctggtctcagacccctcagagcaggaagtgaatgaattgtgtcagtcggtgcaggagcatgtggagctgctgggctgtggggctgggccccagggtgaagccgctgtgcgccaggccgaggatgccatccaaaatgccaacttctctctcagcattctccccattctatatgaagctggaagctccccaagccatcactggcagcttgggcagaagctggagggccttctgagacaggtgggcgaggtctgccgccaggacatccaggacttcactcaggccacactggacacagcaaggagcctctgcccacagatgctgcagggatccagctggagggagcagctagagggggtcctggcaggctcgaggggcctcccggagctgctcccagagcagctgctgcaagatgccttcactaggctcagggacatgcggctatcaatcacggggaccttggcagagagcattgtggctcaggctttggcaggcctgagtgcagcccgggatcagctggtggagagtctggctcagcaggcaacagtgacaatgccccctgccctaccagcaccggatggaggtgagcccagcctccttgagcctggggaattggaaggtcttttcttccccgaggagaaggaagaggagaaggagaaggatgacagtcctccacagaaatggcctgagctcagccacggtcttcacctggtccccttcattcacagtgctgctgaggaagcggagccggagcccgagctggcggctccgggagaagatgcagagccgcaggcggggccgtccgcgcgcggctctccgagccctgccgcccctgggcccccggccggcccgctgccccgcatggacctgccactggcggggcagcccctgcgccatccgacccgggcccggccgcggccgcgccgccagcaccaccaccgcccgccgccggggggcccccaggtacccccagccttgccgcaggaagggaatgggctcagtgcccgcgtggacgagggcgtggaggaattcttctccaaaaggctgatccagcaggatcgcctctgggcccccgaggaggacccggccactgaggggggcgccactcctgtcccccgtacactgcgaaagaagctgggcaccctctttgccttcaagaagcctcgttcaacgcggggtccacggactgatctagagaccagccctggggcagctccccgaacccgaaaaactacatttggcgacctactgcggccgccaacccgtcccagccgtggtgaggagcttggtggggctgagggggacaccagcagccctgaccctgccggcaggagccgacctcgctacacaagagatagcaaggcctactcgatgatactgctgcctgccgaggaggaggcaacgctgggtgccagacccgacaagcggcggcccctggagcggggagaaacagaactggctccatcctttgaacagcgggtacaagtaatgctgcagaggataggcgtcagccgaggcagcgggggtgccgaaggcaagaggaagcaaagcaaagatggcgagatcaagaaagctggctcagatggtgacattatggacagttccacggaggcccctcccatctcgatcaagtcccgcacccactctgtgtctgctgacccttcctgcagacctggcccagggagccaggggcctgagtctgccacctggaagacactggggcagcagttgaatgcggagctcaggagccgtggttggggccaacaggatggtccaggccctccctcccctggtcaaagcccaagtccctgcagaaccagcccctccccagacagcctgggcctcccagaggacccttgcttgggccccagaaatgaagatggccagctgaggccgaggcctctctcggcagggcggcgagcagtgtctgtgcatgaggaccagctccaggcccctgctgaacggcccctgaggctgcagcgctcccccgtcctcaaacgcaggccaaaactcgaggcacctccatccccaagcctaggatctggccttggaaccgagcctctgcccccacagcccacagagccctccagccctgagcggagcccaccctccccagccacagaccaaagaggcggcggccccaatccctgatcctctcctctcctgccgcatgagattattttattaaaaaactcaaaggaaaaaaaaaaaaaaaaaaaaaaaaaaaaaaaaaaa

SEQ ID NO: 844 - DNA, 2739 bp, Homo Sapiens
  NM_001013840
ggttgccaggcaacggaggcacggcccggcccgcgttaaggaggagggcgcagaccgaaggacactgaaagagctgtaacaaccccactttcgattggttgaagagctctcagccttctcatgagccaatgagaagaggcacgcggatggcgtcagacgctatgcgactcctcccacccacgctctggcaatgcgattggagaccgcggaggcctacgtcggacccggaggccctgaatgccccatgcgcaccccacagctcgcgctcctgcaagtgttctttctggtgttccccgatggcgtccggcctcagccctcttcctccccatcaggggcagtgcccacgtctttggagctgcagcgagggacggatggcggaaccctccagtccccttcagaggcgactgcaactcgcccggccgtgcctggactccctacagtggtccctactctcgtgactccctcggcccctgggaataggactgtggacctcttcccagtcttaccgatctgtgtctgtgacttgactcctggagcctgcgatataaattgctgctgcgacagggactgctatcttctccatccgaggacagttttctccttctgccttccaggcagcgtaaggtcttcaagctgggtttgtgtagacaactctgttatcttcaggagtaattccccgtttccttcaagagttttcatggattctaatggaatcaggcagttttgtgtccatgtgaacaactcaaacttaaactatttccagaagcttcaaaaggtcaatgcaaccaacttccaggccctggctgcagagtttggaggcgaatcattcacttcaacattccaaactcaatcaccaccatctttttacagggctggggaccccattcttacttacttccccaagtggtctgtaataagcttgctgagacaacctgcaggagttggagctgggggactctgtgctgaaagcaatcctgcaggtttcctagagagtaaaagtacaacttgcactcgttttttcaagaacctggctagtagctgtaccttggattcagccctcaatgctgcctcttactataacttcacagtcttaaaggttccaagaagcatgactgatccacagaatatggagttccaggttcctgtaatacttacctcacaggctaatgctcctctgttggctggaaacacttgtcagaatgtagtttctcaggtcacctatgagatagagaccaatgggacttttggaatccagaaagtttctgtcagtttgggacaaaccaacctgactgttgagccaggcgcttccttacagcaacacttcatccttcgcttcagggcttttcaacagagcacagctgcttctctcaccagtcctagaagtgggaatcctggctatatagttgggaagccactcttggctctgactgatgatataagttactcaatgaccctcttacagagccagggtaatggaagttgctctgttaaaagacatgaagtgcagtttggagtgaatgcaatatctggatgcaagctcaggttgaagaaggcagactgcagccacttgcagcaggagatttatcagactcttcatggaaggcccagaccagagtatgttgccatctttggtaatgctgacccagcccagaaaggagggtggaccaggatcctcaacaggcactgcagcatttcagctataaactgtacttcctgctgtctcataccagtttccctggagatccaggtattgtgggcatatgtaggtctcctgtccaacccgcaagctcatgtatcaggagttcgattcctataccagtgccagtctatacaggattctcagcaagttacagaagtatctttgacaactcttgtgaactttgtggacattacccagaagccacagcctccaaggggccaacccaaaatggactggaaatggccattcgacttctttcccttcaaagtggcattcagcagaggagtattctctcaaaaatgctcagtctctcccatccttatcctgtgcctcttactacttggagttctcaacctagagactatgtgaagaaaagaaaataatcagatttcagttttccctatgagaaactctgaggcagccacttatcttggctaaatagaacctcacctgctcatgaccagagagcatttaggataatagaggacctaactgaaggaatccttgtatatgaaaggagttattttagaaaagcaataaaaatattttattcatcatagctctctgctttgggctctgcaggccaccagatacacatgaggcccctacttctcaagctgggaaggccaagagccttccttcagcctttctggttatgttacacctagctgaatgtttacaaggtctggatccatcagccctcaggcacagttgggccaagcagaaagagagaaacacttctgctgtcaccttgaatgaactcaggaatagcttccctctggactgtagaggagctaactgtttggaacagaaaactgctggctgttgattttgtctggttcctttgccaacatctgggcacaccctttgcccagacacgagtggggaaagcagttctttctcctcagtttccaaagtaaatggggaatcccagctttcttttctactagcaaatgaccctaccatttatttctgcctttttcttccgttcattgtgaggaaaaataaaactggttgagaaaaaaaaaaaaaaaaaaaaa

SEQ ID NO: 845 - DNA, 2062 bp, Homo Sapiens
  NM_001013842
gtctgggggccgcgcccagctgggtcgggacgcgctccctgagctgcccgagctccgcggggactcgggccgggatcctcgggcggctgcattggccggggccggggccgggagcgggccatgatgggccggcggcgcgccttcgccgtggacggccgggatggggctggcgagggcctggcacggggctgcatagtgcctggagtcaccagcacctacagacggatccccgacgctgcccacgggtgctcatcctgggagagaggtgacaagttcagaggtgtcggcagggaggcactctttctcaaactggcctcccgggactcaggagtggagatggcagttggggacagccccctggccgccttaccgggcctttctcaggactccctggactttgaatcctcagggagttctgagccccccgcccaggtaggccgactcctggccagccagaagctgggggaggtgttggagcggtcccgccggctcccaacagctcccaccagcttgtcaggacaacaccgctccctgcggctggcaagcaagcctgagcgtgaagtgccccttggagcagggcaacaggagtccatggaggcagacacagacctagaggcaggcctggaagaagaggcggtggggggcctggggcctggagcctgggcctgcctccccgggcagggtcttcgctatctggaacacctgtgcctggtgctggagcagatggcaaggctccagcagctctacctgcagctgcggatccagaggcccccaggggatcccggcgaggaggagtcgacccgagcccctttaccgtccccgttacacaccccaggcaatcgggggcaggggccatgggagctgctaagccagacagagcacacaggagcaaaggctgcttcacccccaaaggtggaggtgcccagtgccaaccctcccaggctgccagaaaccccagtggagccaacgtaccacttgccatcctcccagggacacaagcgggatatctcccactgggacaaggtcaaggtcctgctcaaccggatctgccggagaagccaccaccaccctgagccccctgcccctcctgatggctctgaccccaggatcgagtccagggacctccctgaaaggcctcagtgccgcccccaccggaagacctttatgccatcattagtggttaagaagcaacgagcaaaaaacctttctgtaggctgagacctctcggtgcacctggtgaccctgggtggaggggacttgctgtgaagtcttcctcgccctctgccctcttgctgcttctccacattgccaggaaaagctgctgacgcctgccctcctctcttgagtcgagggctgaatctttctcctctaagcagtctggtcaggaaccttggtttcttgagaggcccccaagatgccgcagctccagggctcttcctcctcaccagaaatccctgggcttccacaatgtgaactcactcattgtcaggtgtccgtggagtgtttttggcatggtgacctgtctgggcccagcatgttgcagatgtgtatttatgcgcaatggtatgcatatctctgtgtgactgtcagtgttgcaagctggctggatccaaccatctcttctgaaataatgcatccaaagggttgatattctgggggaggtcactgcagaaggatggaactgacctttattccccagtgggcagttactgagctttcctcctcagagccatgctggcagccctgggacagagaacggtgtggctttggctgcctctgcatggaatcttgccccggactcctgaagactgcacaaggaatgaggaagatcagggacaacctgggaactgaataactttcaaagccagtgctcagcttctctgctccgtactagcgtttacaggtcttaattcaaaccagatgcctgtactagtttttagaccccaagtcaacctttctgagccacagcttcccgctgggaataatgatgcctgccctatctacctcacagacttgttatgaggataaagtgagattaaactgcctcaaagtgctttgtaaa

SEQ ID NO: 846 - DNA, 1280 bp, Homo Sapiens
  NM_001014279
aatacctgcgttctgtagcgctagttctcttcaagatttgcttagtgtcatttcatttcggtttcttttctcgccatgtttttctgtcggaattacggttcgttttggttctatgtactctctaaaatgttatcgtttttcatttgtctactaattttcgtgcatttgttactactgagtttcttaatatctgactggcctccgcccacgggctctgcagagcataaatactcaggctgatggtagtgcagagactctccctccttgatcagcgcaaacgttggtctgaggcttgagggatggagcaacattttcttggctgtgtgaagcgggcttgggattccgcagaggtggcgccagagccccagcctccacctattgtgagttcagaagatcgtgggccgtggcctcttcctttgtatccagtactaggagagtactcactggacagctgtgatttgggactgctttccagcccttgctggcggctgcccggagtctactggcaaaacggactctctcctggagtccagagcaccttggaaccaagtacagcgaagcccactgagttcagttggccggggacacagaagcagcaagaggcacccgtagaagaggtggggcaggcagaggaacccgacagactcaggctccagcagcttccctggagcagtcctctccatccctgggacagacagcaggacaccgaggtctgtgacagcgggtgccttttggaacgccgccatcctcctgccctccagccgtggcgccacctcccgggtttctcagactgcctggagtggattcttcgcgttggttttgccgcgttctctgtactctgggcgtgctgttcacggatctgtggagctaagcagccttagatagcagcagaaggctttttggattctcctccttgaaaagattctcagttaccaaacgtctccacctagaaaataaaaatacattaagatgtgctttcattgctggttgtcagtttttaaattctctttttcccttatgtttctttcttgtttcgcgtcgcttattactttcagtttccttgtattttaaatatttgtatttatttcattaaatatttcattcgtatctgttttcactttgagaaatctattttacgattgtagaattcttagagtttttggcaaatttaaaatttgtttttttccattgtattttaaaatcttattcctactatttttctaattattgctttttaaatgtattgtttgtttacatttaattttaaaaaaaaaaaaaaa

SEQ ID NO: 847 - DNA, 2794 bp, Homo Sapiens
  NM_001014431
cggcaggaccgagcgcggcaggcggctggcccagcgcagccagcgcggcccgaaggacgggagcaggcggccgagcaccgagcgctgggcaccgggcaccgagcggcggcggcacgcgaggcccggccccgagcagcgcccccgcccgccgcggcctccagcccggccccgcccagcgccggcccgcggggatgcggagcggcgggcgccggaggccgcggcccggctaggcccgcgctcgcgcccggacgcggcggcccgaggctgtggccaggccagctgggctcggggagcgccagcctgagaggagcgcgtgagcgtcgcgggagcctcgggcaccatgagcgacgtggctattgtgaaggagggttggctgcacaaacgaggggagtacatcaagacctggcggccacgctacttcctcctcaagaatgatggcaccttcattggctacaaggagcggccgcaggatgtggaccaacgtgaggctcccctcaacaacttctctgtggcgcagtgccagctgatgaagacggagcggccccggcccaacaccttcatcatccgctgcctgcagtggaccactgtcatcgaacgcaccttccatgtggagactcctgaggagcgggaggagtggacaaccgccatccagactgtggctgacggcctcaagaagcaggaggaggaggagatggacttccggtcgggctcacccagtgacaactcaggggctgaagagatggaggtgtccctggccaagcccaagcaccgcgtgaccatgaacgagtttgagtacctgaagctgctgggcaagggcactttcggcaaggtgatcctggtgaaggagaaggccacaggccgctactacgccatgaagatcctcaagaaggaagtcatcgtggccaaggacgaggtggcccacacactcaccgagaaccgcgtcctgcagaactccaggcaccccttcctcacagccctgaagtactctttccagacccacgaccgcctctgctttgtcatggagtacgccaacgggggcgagctgttcttccacctgtcccgggagcgtgtgttctccgaggaccgggcccgcttctatggcgctgagattgtgtcagccctggactacctgcactcggagaagaacgtggtgtaccgggacctcaagctggagaacctcatgctggacaaggacgggcacattaagatcacagacttcgggctgtgcaaggaggggatcaaggacggtgccaccatgaagaccttttgcggcacacctgagtacctggcccccgaggtgctggaggacaatgactacggccgtgcagtggactggtgggggctgggcgtggtcatgtacgagatgatgtgcggtcgcctgcccttctacaaccaggaccatgagaagctttttgagctcatcctcatggaggagatccgcttcccgcgcacgcttggtcccgaggccaagtccttgctttcagggctgctcaagaaggaccccaagcagaggcttggcgggggctccgaggacgccaaggagatcatgcagcatcgcttctttgccggtatcgtgtggcagcacgtgtacgagaagaagctcagcccacccttcaagccccaggtcacgtcggagactgacaccaggtattttgatgaggagttcacggcccagatgatcaccatcacaccacctgaccaagatgacagcatggagtgtgtggacagcgagcgcaggccccacttcccccagttctcctactcggccagcggcacggcctgaggcggcggtggactgcgctggacgatagcttggagggatggagaggcggcctcgtgccatgatctgtatttaatggtttttatttctcgggtgcatttgagagaagccacgctgtcctctcgagcccagatggaaagacgtttttgtgctgtgggcagcaccctcccccgcagcggggtagggaagaaaactatcctgcgggttttaatttatttcatccagtttgttctccgggtgtggcctcagccctcagaacaatccgattcacgtagggaaatgttaaggacttctgcagctatgcgcaatgtggcattggggggccgggcaggtcctgcccatgtgtcccctcactctgtcagccagccgccctgggctgtctgtcaccagctatctgtcatctctctggggccctgggcctcagttcaacctggtggcaccagatgcaacctcactatggtatgctggccagcaccctctcctgggggtggcaggcacacagcagccccccagcactaaggccgtgtctctgaggacgtcatcggaggctgggcccctgggatgggaccagggatgggggatgggccagggtttacccagtgggacagaggagcaaggtttaaatttgttattgtgtattatgttgttcaaatgcattttgggggtttttaatctttgtgacaggaaagccctcccccttccccttctgtgtcacagttcttggtgactgtcccaccgggagcctccccctcagatgatctctccacggtagcacttgaccttttcgacgcttaacctttccgctgtcgccccaggccctccctgactccctgtgggggtggccatccctgggcccctccacgcctcctggccagacgctgccgctgccgctgcaccacggcgtttttttacaacattcaactttagtatttttactattataatataatatggaaccttccctccaaattcttcaataaaagttgcttttcaaaaaaaaaaaaaaaaaaaaaa

SEQ ID NO: 848 - DNA, 2878 bp, Homo Sapiens
  NM_001014432
cggcaggaccgagcgcggcaggcggctggcccagcgcagccagcgcggcccgaaggacgggagcaggcggccgagcaccgagcgctgggcaccgggcaccgagcggcggcggcacgcgaggcccggccccgagcagcgcccccgcccgccgcggcctccagcccggccccgcccagcgccggcccgcggggatgcggagcggcgggcgccggaggccgcggcccggctaggcccgcgctcgcgcccggacgcggcggcccggggcttagggaaggccgagccagcctgggtcaaagaagtcaaaggggctgcctggaggaggcagcctgtcagctggtgcatcagaggctgtggccaggccagctgggctcggggagcgccagcctgagaggagcgcgtgagcgtcgcgggagcctcgggcaccatgagcgacgtggctattgtgaaggagggttggctgcacaaacgaggggagtacatcaagacctggcggccacgctacttcctcctcaagaatgatggcaccttcattggctacaaggagcggccgcaggatgtggaccaacgtgaggctcccctcaacaacttctctgtggcgcagtgccagctgatgaagacggagcggccccggcccaacaccttcatcatccgctgcctgcagtggaccactgtcatcgaacgcaccttccatgtggagactcctgaggagcgggaggagtggacaaccgccatccagactgtggctgacggcctcaagaagcaggaggaggaggagatggacttccggtcgggctcacccagtgacaactcaggggctgaagagatggaggtgtccctggccaagcccaagcaccgcgtgaccatgaacgagtttgagtacctgaagctgctgggcaagggcactttcggcaaggtgatcctggtgaaggagaaggccacaggccgctactacgccatgaagatcctcaagaaggaagtcatcgtggccaaggacgaggtggcccacacactcaccgagaaccgcgtcctgcagaactccaggcaccccttcctcacagccctgaagtactctttccagacccacgaccgcctctgctttgtcatggagtacgccaacgggggcgagctgttcttccacctgtcccgggagcgtgtgttctccgaggaccgggcccgcttctatggcgctgagattgtgtcagccctggactacctgcactcggagaagaacgtggtgtaccgggacctcaagctggagaacctcatgctggacaaggacgggcacattaagatcacagacttcgggctgtgcaaggaggggatcaaggacggtgccaccatgaagaccttttgcggcacacctgagtacctggcccccgaggtgctggaggacaatgactacggccgtgcagtggactggtgggggctgggcgtggtcatgtacgagatgatgtgcggtcgcctgcccttctacaaccaggaccatgagaagctttttgagctcatcctcatggaggagatccgcttcccgcgcacgcttggtcccgaggccaagtccttgctttcagggctgctcaagaaggaccccaagcagaggcttggcgggggctccgaggacgccaaggagatcatgcagcatcgcttctttgccggtatcgtgtggcagcacgtgtacgagaagaagctcagcccacccttcaagccccaggtcacgtcggagactgacaccaggtattttgatgaggagttcacggcccagatgatcaccatcacaccacctgaccaagatgacagcatggagtgtgtggacagcgagcgcaggccccacttcccccagttctcctactcggccagcggcacggcctgaggcggcggtggactgcgctggacgatagcttggagggatggagaggcggcctcgtgccatgatctgtatttaatggtttttatttctcgggtgcatttgagagaagccacgctgtcctctcgagcccagatggaaagacgtttttgtgctgtgggcagcaccctcccccgcagcggggtagggaagaaaactatcctgcgggttttaatttatttcatccagtttgttctccgggtgtggcctcagccctcagaacaatccgattcacgtagggaaatgttaaggacttctgcagctatgcgcaatgtggcattggggggccgggcaggtcctgcccatgtgtcccctcactctgtcagccagccgccctgggctgtctgtcaccagctatctgtcatctctctggggccctgggcctcagttcaacctggtggcaccagatgcaacctcactatggtatgctggccagcaccctctcctgggggtggcaggcacacagcagccccccagcactaaggccgtgtctctgaggacgtcatcggaggctgggcccctgggatgggaccagggatgggggatgggccagggtttacccagtgggacagaggagcaaggtttaaatttgttattgtgtattatgttgttcaaatgcattttgggggtttttaatctttgtgacaggaaagccctcccccttccccttctgtgtcacagttcttggtgactgtcccaccgggagcctccccctcagatgatctctccacggtagcacttgaccttttcgacgcttaacctttccgctgtcgccccaggccctccctgactccctgtgggggtggccatccctgggcccctccacgcctcctggccagacgctgccgctgccgctgcaccacggcgtttttttacaacattcaactttagtatttttactattataatataatatggaaccttccctccaaattcttcaataaaagttgcttttcaaaaaaaaaaaaaaaaaaaaaa

SEQ ID NO: 849 - DNA, 2210 bp, Homo Sapiens
  NM_001014436
gtttccggttgtcggaggcgaggcttgtcggctgtcaaaggggcggcccggcccggcccggaagctacagcagcggcgcggagactgcggggcgggccatggcggcgaacctgagccggaacgggccagcgctgcaagaggcctacgtgcgggtggtcaccgagaagtccccgaccgactgggctctctttacctatgaaggcaacagcaatgacatccgcgtggctggcacaggggagggtggcctggaggagatggtggaggagctcaacagcgggaaggtgatgtacgccttctgcagagtgaaggaccccaactctggactgcccaaatttgtcctcatcaactggacaggcgagggcgtgaacgatgtgcggaagggagcctgtgccagccacgtcagcaccatggccagcttcctgaagggggcccatgtgaccatcaacgcacgggccgaggaggatgtggagcctgagtgcatcatggagaaggtggccaaggcttcaggtgccaactacagctttcacaaggagagtggccgcttccaggacgtgggaccccaggccccagtgggctctgtgtaccagaagaccaatgccgtgtctgagattaaaagggttggtaaagacagcttctgggccaaagcagagaaggaggaggagaaccgtcggctggaggaaaagcggcgggccgaggaggcacagcggcagctggagcaggagcgccgggagcgtgagctgcgtgaggctgcacgccgggagcagcgctatcaggagcagggtggcgaggccagcccccagaggacgtgggagcagcagcaagaagtggtttcaaggaaccgaaatgagcaggagtctgccgtgcacccgagggagattttcaagcagaaggagagggccatgtccaccacctccatctccagtcctcagcctggcaagctgaggagccccttcctgcagaagcagctcacccaaccagagacccactttggcagagagccagctgctgccatctcaaggcccagggcagatctccctgctgaggagccggcgcccagcactcctccatgtctggtgcaggcagaagaggaggctgtgtatgaggaacctccagagcaggagaccttctacgagcagcccccactggtgcagcagcaaggtgctggctctgagcacattgaccaccacattcagggccaggggctcagtgggcaagggctctgtgcccgtgccctgtacgactaccaggcagccgacgacacagagatctcctttgaccccgagaacctcatcacgggcatcgaggtgatcgacgaaggctggtggcgtggctatgggccggatggccattttggcatgttccctgccaactacgtggagctcattgagtgaggctgagggcacatcttgcccttcccctctcagacatggcttccttattgctggaagaggaggcctgggagttgacattcagcactcttccaggaataggacccccagtgaggatgaggcctcagggctccctccggcttggcagactcagcctgtcaccccaaatgcagcaatggcctggtgattcccacacatccttcctgcatcccccgaccctcccagacagcttggctcttgcccctgacaggatactgagccaagccctgcctgtggccaagccctgagtggccactgccaagctgcggggaagggtcctgagcaggggcatctgggaggctctggctgccttctgcatttatttgccttttttctttttctcttgcttctaaggggtggtggccaccactgtttagaatgacccttgggaacagtgaacgtagagaattgtttttagcagagtttgtgaccaaagtcagagtggatcatggtggtttggcagcagggaatttgtcttgttggagcctgctctgtgctccccactccatttctctgtccctctgcctgggctatgggaagtggggatgcagatggccaagctcccaccctgggtattcaaaaacggcagacacaacatgttcctccacgcggctcactcgatgcctgcaggccccagtgtgtgcctcaactgattctgacttcaggaaaagtaacacagagtggccttggcctgttgtcttcccctattttctgtcccagctcatccgtgtctctgaagaacaaatatgcttttggaccacgaaaaaaaaaaaaaaaaaaaaa

SEQ ID NO: 850 - DNA, 2179 bp, Homo Sapiens
  NM_001014439
ttaaactgtaaactgagtgcacacatcttaaccctaaatacatacacacatacacacaaccagccacaaaatagtgttatttccttaaatgccaaacactgtctagttctagaagtgaaaaggaccttcttgtcttttcagaagtgtgtgttttgagtatgtaatgagattacctttctgtggctttggagaattaatttcagcgctttattgtcagatcttctctgtaagaaatgtgatagggatttcccattcaatctggaactaagaattcagattgacacttgagctttgtacctcagatagcgtttttcctcatctcctgttatatatcaagcagctgagattggtttttaaaaaagtgaagattgaattgtcttcacacatttattgtgaacttgcagaaaatggaaaggattatgctttaaagacagttggcttggctggatagaaaagatccctctgtcctgtttccctgtcctccttcccacatcgatttaaaaaattagatgcaaatgcaaaatccttaaattatagatttatgataaatttaaattctggtagaatcaaggttttataacatttaaagtgtctgacactaagtgtatataatcttttaagaaacgtcttcttaacagcgcatggtattctgtgactgttcgtgtaccatgaatattcttattgggttctagagttagttactgactcttgaagatgggcatctaatggtcctcctgtggaagtggagagcagctctccactgtttgataacatttaaagccaagggtgaaccactcaagaaacatttggtggttataatatttttttgttgttgttaagtaccatcaataaaactgaaaaatctcttaagtacctgactcctgcagtgatacaactgcagtgataaaacttttagctttttacatcaggggtattaggtattttctcacagaaatagccttttgaggtgaaattcacataacatacaattaaccattgtaaaatgaacaattcagtggcgtgtaagagtatgtttacaatgttgagcaaccatcacctctgtctagttgcaaaatgttttcatcactccaaaagaaactcctttattcatcatagcccaaagttggaagtattttcttgattgggctcttgattacatggatgcatctgagtcattgaattgaagcctaagatgtgcttaatttcactgtgtgtaagtttcacctcagttaacaagagagaacagaacaaaccaaaaatcttaattcttttgaaaaaaagactttctggctgctttattaaagaagccaggggaacaaggttaaaaggaaatcagttagcagtgaccaaggcaagagatgatggtggcttggctgaagatggtgacagtggaggtggtaaggtgatcagattctggatatattttgaaggttgagctaatttggtcagctgatgggcataatggatgtgagggaaagaaagttggaaaggatgatgtgaagatttttaatgggatggaataggtgtttaatgaacagccatttaacaacatcagggtaatttcatcttgtgtatcatcctagagtataaccctgttgtaaagaatgatacacaagacaaacttaccctgatgttgttaaatatatgttagatgaccagttgctttgatttctttgctcaataaacattggattacagctggtttgctgtgtggcatgcctacatggagggaacacactgagccaatgatttcatcatctgggtccctttggtttatatcagtttccaacatgacttgtttgtggggcttgtgggaggggcacatacatcggccccaggattctaacatctcctggtctctgaggttataattttcacttaacattgtcgagttggcattttggttttagtccaatggttcagttctttgaaactgactccagagatggctctgttcattaatagattgttttgttgaccctgtgaggattagtctgtggatcttggaaattcggcaggtgactacaattctagaaggcctcttgtgagatataaggtgttttccttaagtgacatggccctgcgttgcaaagctgagaagtaatatgaaggagcgttttgtaagtttgaatctctataatcaaaaaccagactaatgacacattcgcttttagaactt

SEQ ID NO: 851 - DNA, 777 bp, Homo Sapiens
  NM_001014446
acaaagggccggaaggaagccggggagacaggtggggtactcgggaagctggagcgggccggcggtgcagtcacgggggagcgaggcctgctgggcttggcaacgagggactcggcctcggaggcgacccagaccacacagacactgggtcaaggagtaagcagaggataaacaactggaaggagagcaagcacaaagtcatcatggcttcagcgtctgctcgtggaaaccaagataaagatgcccattttccaccaccaagcaagcagagcctgttgttttgtccaaaatcaaaactgcacatccacagagcagagatctcaaagattatgcgagaatgtcaggaagaaagtttctggaagagagctctgcctttttctcttgtaagcatgcttgtcacccagggactagtctaccaaggttatttggcagctaattctagatttggatcattgcccaaagttgcacttgctggtctcttgggatttggccttggaaaggtatcatacataggagtatgccagagtaaattccatttttttgaagatcagctccgtggggctggttttggtccacagcataacaggcactgcctccttacctgtgaggaatgcaaaataaagcatggattaagtgagaagggagactctcagccttcagcttcctaaattctgtgtctgtgactttcgaagttttttaaacctctgaatttgtacacatttaaaatttcaagtgtactttaaaataaaatacttctaatggaaaaaaaaaaaaaaa

SEQ ID NO: 852 - DNA, 1728 bp, Homo Sapiens
  NM_001014449
cgcgccgcttccggtctgcagccttgtagtggggctggagcagagcctgccgcgaacccccggagcccacgatccctcgtgccatccctcgaatccaccagcacgagcgtcccacccgcgcctgggaccatggccactgactcatgggccctggcggtggacgagcaggaagctgcggctgagtcgaggacagagctgcccagtccttactcaacaagctgatcagaagcaaccttgttgataacacaaaccaagtggaagtcctgcagcgggatccaaactcccctctgtactcggtgaagtcttttgaagagcttcggctgaaaccacagcttctccaaggagtctatgccatgggtttcaatcgtccatccaagatacaagagaacgcattgccactgatgcttgctgagcccccacagaacttaattgcccaatctcagtctggtactggtaaaacagctgccttcgtgctggccatgcttagccaagtagaacctgcaaacaaatacccccagtgtctatgtctctccccaacgtatgagctcgccctccaaacaggaaaagtgattgaacaaatgggcaaattttaccctgaactgaagctagcttatgctgttcgaggcaataaattggaaagaggccagaagatcagtgagcagattgtcattggcacccctgggactgtgctggactggtgctccaagctcaagttcattgatcccaagaaaatcaaggtgtttgttctggatgaggctgatgtcatgatagccactcagggccaccaagatcagagcatccgcatccagaggatgctgcccaggaactgccagatgctgcttttctccgccacctttgaagactctgtgtggaagtttgcccagaaagtggtcccagacccaaacgttatcaaactgaagcgtgaggaagagaccctggacaccatcaagcagtactatgtcctgtgcagcagcagagacgagaagttccaggccttgtgtaacctctacggggccatcaccattgctcaagccatgatcttctgccatactcgcaaaacagctagttggctggcagcagagctctcaaaagaaggccaccaggtggctctgctgagtggggagatgatggtggaacagagggctgcagtgattgagcgcttccgagagggcaaagagaaggttttggtgaccaccaacgtgtgtgcccgcggcattgatgttgaacaagtgtctgtcgtcatcaactttgatcttcccgtggacaaggacgggaatcctgacaatgagacctacctgcaccggatcgggcgcacgggccgctttggcaagaggggcctggcagtgaacatggtggacagcaagcacagcatgaacatcctgaacagaatccaggagcattttaataagaagatagaaagattggacacagatgatttggacgagattgagaaaatagccaactgagaagctccaccagccactgatgccagccctggcactgcccctgcacaggagacaagtgcgttcagggcacaggccccgacatcaccccaaggacaacggcacaagtagagagaaactacctacctcacttcaaattatgtttggacttgacaaaaatgtatgcaaatgatgggggatggtagaaaaaaattatttacacaaccttggaagattaggcatgaatacacagagatttaccttttggaaaaaaaaaaaaaaaaaa

SEQ ID NO: 853 - DNA, 1738 bp, Homo Sapiens
  NM_001014451
cgcgccgcttccggtctgcagccttgtagtggggctggagcagagcctgccgcgaacccccggagcccacgatccctcgtgccatccctcgaatccaccagcacgagcgtcccacccgcgcctgggaccatggccactgactcatgggccctggcggtggacgagcaggaagctgcggctgagtcgttgagcaacttgcatcttaaggaagagaaaatcaaaccagataccaatggtgctgttgtcaagaccaatgccaatgcagagaagacagatgaagaagagaaagaggacagagctgcccagtccttactcaacaagctgatcagaagcaaccttgttgataacacaaaccaagtggaagtcctgcagcgggatccaaactcccctctgtactcggtgaagtcttttgaagagcttcggctcccacagaacttaattgcccaatctcagtctggtactggtaaaacagctgccttcgtgctggccatgcttagccaagtagaacctgcaaacaaatacccccagtgtctatgtctctccccaacgtatgagctcgccctccaaacaggaaaagtgattgaacaaatgggcaaattttaccctgaactgaagctagcttatgctgttcgaggcaataaattggaaagaggccagaagatcagtgagcagattgtcattggcacccctgggactgtgctggactggtgctccaagctcaagttcattgatcccaagaaaatcaaggtgtttgttctggatgaggctgatgtcatgatagccactcagggccaccaagatcagagcatccgcatccagaggatgctgcccaggaactgccagatgctgcttttctccgccacctttgaagactctgtgtggaagtttgcccagaaagtggtcccagacccaaacgttatcaaactgaagcgtgaggaagagaccctggacaccatcaagcagtactatgtcctgtgcagcagcagagacgagaagttccaggccttgtgtaacctctacggggccatcaccattgctcaagccatgatcttctgccatactcgcaaaacagctagttggctggcagcagagctctcaaaagaaggccaccaggtggctctgctgagtggggagatgatggtggaacagagggctgcagtgattgagcgcttccgagagggcaaagagaaggttttggtgaccaccaacgtgtgtgcccgcggcattgatgttgaacaagtgtctgtcgtcatcaactttgatcttcccgtggacaaggacgggaatcctgacaatgagacctacctgcaccggatcgggcgcacgggccgctttggcaagaggggcctggcagtgaacatggtggacagcaagcacagcatgaacatcctgaacagaatccaggagcattttaataagaagatagaaagattggacacagatgatttggacgagattgagaaaatagccaactgagaagctccaccagccactgatgccagccctggcactgcccctgcacaggagacaagtgcgttcagggcacaggccccgacatcaccccaaggacaacggcacaagtagagagaaactacctacctcacttcaaattatgtttggacttgacaaaaatgtatgcaaatgatgggggatggtagaaaaaaattatttacacaaccttggaagattaggcatgaatacacagagatttaccttttggaaaaaaaaaaaaaaaaaa

SEQ ID NO: 854 - DNA, 3320 bp, Homo Sapiens
  NM_001014765
gcgggccggggcggggcctcgcttcccaggcaagcgcaggtccaggcggtgcagcttgggcggcccagcggatcgtgccgcggcggccgagcgcaggcaggagatcatgtcctctgagatcttgagaaggtggctggagccctttggacctccgcgggaggcagtgataattagcctcctcctcccatcatgttctgaggatgggagagaggatggtgacggcaccggaggcctggggtgctctgcccggctgcgcattatatccccattaaagactggcctactgaaaaaggctggccctggaatcaaagaagatccgggcttcttccccctctgcccttatttttgaccttgggcagtgccttccacctctattgtgagaggccagagaaaaaaatcagagctcaccttttattaaagtacctgatgtgtcccaagctccttggaccgccccagtgacccctggagctacaggagggtgtccagaagccacaagccatggctgtggggaacatcaacgagctgcccgagaacatcctgctggagctgttcacgcacgtgcccgcccgccagctgctgctgaactgccgcctggtctgcagcctctggcgggacctcatcgacctcgtgaccctctggaaacgcaagtgcctgcgagagggcttcatcactgaggactgggaccagcccgtggccgactggaagatcttctacttcttacggagcctgcacaggaacctcctgcacaacccgtgcgctgaagaggggttcgagttctggagcctggatgtgaatggaggcgatgagtggaaggtggaggatctctctcgagaccagaggaaggaattccccaatgaccaggtcaagaaatacttcgttacttcatattacacctgcctcaagtcccaggtggtggacctcaaggccgaagggtattgggaggagctgatggataccacacggccggacatcgaggtcaaggactggttcgcagccaggccagattgcgggtccaagtaccagctgtgcgttcagctcctgtcgtccgcgcacgcgcctctggggaccttccagccagacccggcgaccatccagcagaagagcgatgccaagtggagggaggtctcccacacattctccaactacccgcccggcgtccgctacatctggtttcagcacggcggcgtggacactcattactgggccggctggtacggcccgagggtcaccaacagcagcatcaccatcgggcccccgctgccctgacaccccctgagcccccatctgctgaaccctgactggtaaacaactgctgtcagaaaagggctgggcttgggaaggggaggtggaggccaggtgtccccagacctctaacccttgcccctagcagcctcttctttgtggagcctctcagtgtgggcagccctcgcatgctggggtcgggccagctctccccgaaaggtcttgacctgaatgatggccggggaagcctgcgtgtgcccctttcagagacggagcacctgagatgtgggaggtgcagcatgttcccctgggcccctcagaaagtcgagcttggaggccagcctggatctgtctctcccttcccctcctgggaccattctacctgtgttctttgaccctcggagcagggacaggcaagacaactggcaagcttgcagctgccctgatggtgcaggtgcagggaggtgaccatgtaactctgaccaatctgggaagtggagggtgggctcatgggccgtgctctgcccctgtctgctgctcccagtctctcgctctgcctgcctgctcagaagaggtggctttggcccagaggctcaggccgggactgagatggacagacccagggtggggtggggtccaggtcgggtgtggactgtcctcactgtcagtggagccccagaagctagatgggtaccaggtggggttaggttcccagaggactgagggaatcctgtacaggatgtcccagggtagatggggagcaggattgggacctgctctgacagctggacacatgagccctggatgagtatggtagggggtttgaagaatcccctgtccacctcccaaatccaggcccggccccctctggcttggagagcattccaagcccccaccccacccctagaactgccattcccaagacctctgtctcccagccaaccacccttggaacttgcctcttgtcctgctggaaagatagcagtgttctcctgacttcgccctactgcatgcagccaaataaaaggtgtgcccagtctaacctgtgccctgtggtttctggaaggaaaggcagactttaggtggtcctgcctggacctgcagatggtacaatggcatggcttctgtctaaggtacagaggggttggcatttcaggaaccaggccatcacagaaacaggttcatgggcagacccctcagtgagctgcaggtatctcacctggcagccgtccagtactgctggcttcctctggaggcccagccacaggctggggttggggtgtgtggacatctctgggcagctcttgagtccaccttgtgccagatcagcagtgccacccaggctctgcctcctggtgttactctttgccaacagctttacggacattggatgaagccgaagcatttagaatggtgcctggcacacagttggtgcgtgatatggttaagctttgtgtccccacccacatctcatcttgaatggtaatcctgggtgtttagggagagacctggtgggaagtgattggattatgggagcggttttcccccatgctgttctcatgatagtgagtgagttctcacgagatctgatggttttacaagtgacggtttccccggctccctcctgccgccatgtgaagaaggtcgttgcttccccttcaccttccaccaccatgattgtaagttccttttttcttttcttttcttttttttttttttttttttgagatggagtctcgctctgtcgcccaggctggagtgcagtggcgcaatctcagctcactgcaagctctgcctcccaggttcgcgccattcacctgcctcagcctctggagtagctgagactacaggcgcccaccaccatgcccggctaattttgtttgtatttttagtagagatggagtttcaccatgttggccagggtggtctcaatctcctgacctcgtgatccacccacctcgacctcccaaagtgctgagattacaggcgtgagccaccgcgcccagcgattgtttcttgaggcttccccagccatatggaactataagtcaattaaacctctttccttttataaatca

SEQ ID NO: 855 - DNA, 1771 bp, Homo Sapiens
  NM_001014794
agcgccacgggcggggcggggccggcggcgggctgcgggcgcggccggacgggagttccccggagaaggatcctgcagcccgagtcccgtcctcaggcttccccaatccaggggactcggcgccgggacgctgctatggacgacattttcactcagtgccgggagggcaacgcagtcgccgttcgcctgtggctggacaacacggagaacgacctcaaccagggggacgatcatggcttctcccccttgcactgggcctgccgagagggccgctctgctgtggttgagatgttgatcatgcggggggcacggatcaatgtaatgaaccgtggggatgacacccccctgcatctggcagccagtcatggacaccgtgatattgtacagaagctattgcagtacaaggcagacatcaatgcagtgaatgaacacgggaatgtgcccctgcactatgcctgtttttggggccaagatcaagtggcagaggacctggtggcaaatggggcccttgtcagcatctgtaacaagtatggagagatgcctgtggacaaagccaaggcacccctgagagagcttctccgagagcgggcagagaagatgggccagaatctcaaccgtattccatacaaggacacattctggaaggggaccacccgcactcggccccgaaatggaaccctgaacaaacactctggcattgacttcaaacagcttaacttcctgacgaagctcaacgagaatcactctggagagctatggaagggccgctggcagggcaatgacattgtcgtgaaggtgctgaaggttcgagactggagtacaaggaagagcagggacttcaatgaagagtgtccccggctcaggattttctcgcatccaaatgtgctcccagtgctaggtgcctgccagtctccacctgctcctcatcctactctcatcacacactggatgccgtatggatccctctacaatgtactacatgaaggcaccaatttcgtcgtggaccagagccaggctgtgaagtttgctttggacatggcaaggggcatggccttcctacacacactagagcccctcatcccacgacatgcactcaatagccgtagtgtaatgattgatgaggacatgactgcccgaattagcatggctgatgtcaagttctctttccaatgtcctggtcgcatgtatgcacctgcctgggtagcccccgaagctctgcagaagaagcctgaagacacaaacagacgctcagcagacatgtggagttttgcagtgcttctgtgggaactggtgacacgggaggtaccctttgctgacctctccaatatggagattggaatgaaggtggcattggaaggccttcggcctaccatcccaccaggtatttcccctcatgtgtgtaagctcatgaagatctgcatgaatgaagaccctgcaaagcgacccaaatttgacatgattgtgcctatccttgagaagatgcaggacaagtaggactggaaggtccttgcctgaactccagaggtgtcgggacatggttgggggaatgcacctccccaaagcagcaggcctctggttgcctcccccgcctccagtcatggtactaccccagccatggggtccatccccttcccccatccctaccactgtggccccaagaggggcgggctcagagctttgtcacttgccacatggtgtctcccaacatgggagggatcagccccgcctgtcacaataaagtttattatgaaaaaaaaaaaaaaaaaaaaaa

SEQ ID NO: 856 - DNA, 2765 bp, Homo Sapiens
  NM_001014832
agccccggatgttcgttggggattcaacatggcggcgggagtgtccgcggtggtggcggtgcaagagagctgagggaggcgcgagggcgcggagttccaggtcgagcagttaggccgcgagcgactgcggcgccgagccggccgcaccgagtccccggcaccatgtttgggaagaggaagaagcgggtggagatctccgcgccgtccaacttcgagcaccgcgtgcacacgggcttcgaccagcacgagcagaagttcacggggctgccccgccagtggcagagcctgatcgaggagtcggctcgccggcccaagcccctcgtcgaccccgcctgcatcacctccatccagcccggggcccccaagaccatcgtgcggggcagcaaaggtgccaaagatggggccctcacgctgctgctggacgagtttgagaacatgtcggtgacacgctccaactccctgcggagagacagcccgccgccgcccgcccgtgcccgccaggaaaatgggatgccagaggagccggccaccacggccagagggggcccagggaaggcaggcagccgaggccggttcgccggtcacagcgaggcgggtggcggcagtggtgacaggcgacgggcggggccagagaagaggcccaagtcttccagggagggctcagggggtccccaggagtcctcccgggacaaacgccccctctccgggcctgatgtcggcaccccccagcctgctggtctggccagtggggcgaaactggcagctggccggccctttaacacctacccgagggctgacacggaccacccatcccggggtgcccagggggagcctcatgacgtggcccctaacgggccatcagcggggggcctggccatcccccagtcctcctcctcctcctcccggcctcccacccgagcccgaggtgcccccagccctggagtgctgggaccccacgcctcagagccccagctggcccctccagcctgcacccccgccgcccctgctgttcctgggccccctggcccccgctcaccacagcgggagccacagcgagtatcccatgagcagttccgggctgccctgcagctggtggtggacccaggcgacccccgctcctacctggacaacttcatcaagattggcgagggctccacgggcatcgtgtgcatcgccaccgtgcgcagctcgggcaagctggtggccgtcaagaagatggacctgcgcaagcagcagaggcgcgagctgctcttcaacgaggtggtaatcatgagggactaccagcacgagaatgtggtggagatgtacaacagctacctggtgggggacgagctctgggtggtcatggagttcctggaaggaggcgccctcaccgacatcgtcacccacaccaggatgaacgaggagcagatcgcggccgtgtgccttgcagtgctgcaggccctgtcggtgctccacgcccagggcgtcatccaccgggacatcaagagcgactcgatcctgctgacccatgatggcagggtgaagctgtcagactttgggttctgcgcccaggtgagcaaggaagtgccccgaaggaagtcgctggtcggcacgccctactggatggccccagagctcatctcccgccttccctacgggccagaggtagacatctggtcgctggggataatggtgattgagatggtggacggagagcccccctacttcaacgagccacccctcaaagccatgaagatgattcgggacaacctgccaccccgactgaagaacctgcacaaggtgtcgccatccctgaagggcttcctggaccgcctgctggtgcgagaccctgcccagcgggccacggcagccgagctgctgaagcacccattcctggccaaggcagggccgcctgccagcatcgtgcccctcatgcgccagaaccgcaccagatgaggcccagcgcccttcccctcaaccaaagagccccccgggtcacccccgccccactgaggccagtagggggccaggcctcccactcctcccagcccgggagatgctccgcgtggcaccaccctccttgctgggggtagatgagaccctactactgaactccagttttgatctcgtgacttttagaaaaacacagggactcgtgggagcaagcgaggctcccaggacccccaccctctgggacaggccctcccccatgttcttctgtctccaggaagggcagcggccctcccatcactggaagtctgcagtgggggtcgctgggggtggagagaacactaagaggtgaacatgtatgagtgtgtgcacgcgtgtgagtgtgcatgtgtgtgtgtgcaaaggtccagccaccccgtcctccagcctgcaaggggtgtctggcgccttgcctgacacccagccccctctccccctgagccattgtgggggtcgatcatgaatgtccgaagagtggccttttcccgtagccctgcgccccctttctgtggctggatggggagacaggtcagggccccccaccctctccagcccctgcagcaaatgactactgcacctggacagcctcctcttttctagaagtctatttatattgtcattttataacactctagcccctgcccttattgggggacagatggtccctgtcctgcggggtggccctggcagaaccactgcctgaagaaccaggttcctgcccggtcagcgcagccccagcccgcccacccctgcctcgagttagttttacaattaaaacattgtcttgttttgtg

SEQ ID NO: 857 - DNA, 1041 bp, Homo Sapiens
  NM_001014838
acggaaacgggcgtgccatttccgcgcacgtctgcagatgcggtagtcgattggtcaagtctcccatggctcctccttcatcaggaggtgggcaaaccgcgccatgatagggtcgggattggctggctctggaggcgcaggtggtccttcttctactgtcacatggtgcgcgctgttttctaatcacgtggctgccacccaggtaagaagaggccgctcttcctggggttgtttctccgtgtgacgtgtggcctttgagatcaactctcctgtaccagcgtaggccgcatgagtggggggcgggctcccgcggtcctgctcggcggagtggtgagtgaccggccccgccccgccccttccggtcctcgaagcctcgaccgctacccgcaccctaaatcccagaggttggccccctgaggtgcctctctgctcctgtcttttgtttggatgccggcgctgctgcctgtggcctcccgccttttgttgctaccccgagtcttgctgaccatggcctctggaagccctccgacccagccctcgccggcctcggattccggctctggctacgttccgggctcggtctctgcagcctttgttacttgccccaacgagaaggtcgccaaggagatcgccagggccgtggtggagaagcgcctagcagcctgcgtcaacctcatccctcagattacatccatctatgagtggaaagggaagatcgaggaagacagtgaggtgctgatgatgattaaaacccaaagttccttggtcccagctttgacagattttgttcgttctgtgcacccttacgaagtggccgaggtaattgcattgcctgtggaacaggggaactttccgtacctgcagtgggtgcgccaggtcacagagtcagtttctgactctatcacagtcctgccatgatgagccctgttcctgctcatcatgaagatccccgcgatacttcaacgccttctgacttccaggtgatgactgggcccccaataaatcccgtctttgggtctctctgccaaaaaaaaaaaaaaa

SEQ ID NO: 858 - DNA, 951 bp, Homo Sapiens
  NM_001014840
acggaaacgggcgtgccatttccgcgcacgtctgcagatgcggtagtcgattggtcaagtctcccatggctcctccttcatcaggaggtgggcaaaccgcgccatgatagggtcgggattggctggctctggaggcgcaggtggtccttcttctactgtcacatggtgcgcgctgttttctaatcacgtggctgccacccaggtaagaagaggccgctcttcctggggttgtttctccgtgtgacgtgtggcctttgagatcaactctcctgtaccagcgtaggccgcatgagtggggggcgggctcccgcggtcctgctcggcggagtggcctctctgctcctgtcttttgtttggatgccggcgctgctgcctgtggcctcccgccttttgttgctaccccgagtcttgctgaccatggcctctggaagccctccgacccagccctcgccggcctcggattccggctctggctacgttccgggctcggtctctgcagcctttgttacttgccccaacgagaaggtcgccaaggagatcgccagggccgtggtggagaagcgcctagcagcctgcgtcaacctcatccctcagattacatccatctatgagtggaaagggaagatcgaggaagacagtgaggtgctgatgatgattaaaacccaaagttccttggtcccagctttgacagattttgttcgttctgtgcacccttacgaagtggccgaggtaattgcattgcctgtggaacaggggaactttccgtacctgcagtgggtgcgccaggtcacagagtcagtttctgactctatcacagtcctgccatgatgagccctgttcctgctcatcatgaagatccccgcgatacttcaacgccttctgacttccaggtgatgactgggcccccaataaatcccgtctttgggtctctctgccaaaaaaaaaaaaaaa

SEQ ID NO: 859 - DNA, 1575 bp, Homo Sapiens
  NM_001014979
cccggatgtgaggaaacttctttatcttctgcttctattggttacgcttggtcccgccactcgggtcctctggcttcttcccaaacacctcctctttctctcggtgattggccaagaggcagttcccatagtaactgacaccgcgctcccacttcccagcctggaggacagcaccggccctcgtattagcaacctggaagagagggcgcccaggtgggcactcgcaacttctcacgtatctgcgcgttctcttcgctcccactggcgtgagcctgcgctttccgccttccttccctcacaagcccccttggcaaccgtcgccgttgagacggagggagacgcccccacggattcgccccgccgcgcctctccgcgcgtagattggccggagcgaggcgaacgggcccggccttggtagccgccgaccgagcgctggctgtcctggaacctaggcggcgggagcccggggcgcctcgcggcacggaagagcggcgagatgctcaaccgcaagaccagccactttttgggaatgagggtgcagtcggagcttgaacatctctccgagctgcggcgggaagcggggaaggatcgcagctcagtgcatgggtcggccgcgcggacgcgtgcgagtgtgcggactcagtggacgacggcggcggcggcgaaagcggatgaagaccccggagccaacttgtttccgccgccgctgccccgaccccggatctgcatgtggaagtacctggacgtccattccatgcaccagctggagaagaccaccaatgctgagatgagggaggtgctggctgagctgctggagctagggtgtcctgagcagagcctgagggacgccatcaccctggacctcttctgccacgcgctcattttctgccgccagcagggcttctcactggagcagacgtcagcggcttgtgccctgctccaggatcttcacaaggcttgtattgcaacccccttgggcaacgtggaggagtgctaccgctacttcaccagtgtccttttttgccatggagtcaggcggcctcctttcagcatcgacctcttcaaagaggaacagctgctggccttggaagactacgtggtcaacacttacttccgccacttcaagctctataaatacgtcttcacaccccaggtgcggctggatctgtctttgacttacatggggctacagccacccaaactgtggccagagagtgagacggagaaagaagaaagcaaggagatggaggagcaggcagttaccccgcagaaagaggaactagagacagtggccccaccagagccagagccaagccacatccacgtcctccgagcctacatcaagacccaagtgaacaaagagctggagcagctccaggggctggtggaggagcggctcaaggccagcgaggaaaggctcagcagcaagttgactgcactagagcggcccttccagctacctccgggtaaaggcaagagcaagaccaagtgacccccaacattttccccaataaaggtctgggccagaatggcaccatccctgcaaaaaaaaaaaaaaaaaaaaaaaaaaaaaaa

SEQ ID NO: 860 - DNA, 1680 bp, Homo Sapiens
  NM_001014987
caggcgggcgggagggcgggcacggagaggcgggcgccgaggaggggcaggtagggctgggacgcaggggtaactggatcccccgacttcagcccaggccctggtctgaccaccctgggagcagggactttccacagtcagctggacgcacactcagcccagtaaaagaggggacccatcccgggagccccggggagggcacagctgcctcctcccgggctcccctgccacctggtgcctacctgccccctgctccctgccgggtccggtcctcaccccatcttcatctggccttgactctgcccttgaggggcctaggggtgcagccagcctgctccgagctcccctgcagatggaggaggccatcctggtcccctgcgtgctggggctcctgctgctgcccatcctggccatgttgatggcactgtgtgtgcactgccacagactgccaggctcctacgacagcacatcctcagatagtttgtatccaaggggcatccagttcaaacggcctcacacggttgccccctggccacctgcctacccacctgtcacctcctacccacccctgagccagccagacctgctccccatcccaagatccccgcagccccttgggggctcccaccggacgccatcttcccggcgggattctgatggtgccaacagtgtggcgagctacgagaacgaggaaccagcctgtgaggatgcggatgaggatgaggacgactatcacaacccaggctacctggtggtgcttcctgacagcaccccggccactagcactgctgccccatcagctcctgcactcagcacccctggcatccgagacagtgccttctccatggagtccattgatgattacgtgaacgttccggagagcggggagagcgcagaagcgtctctggatggcagccgggagtatgtgaatgtgtcccaggaactgcatcctggagcggctaagactgagcctgccgccctgagttcccaggaggcagaggaagtggaggaagagggggctccagattacgagaatctgcaggagctgaactgagggcctgtggaggccgagtctgtcctggaaccaggcttgcctgggacggctgagctgggcagctggaagtggctctggggtcctcacatggcgtcctgcccttgctccagcctgacaacagcctgagaaatccccccgtaacttattatcactttggggttcggcctgtgtcccccgaacgctctgcaccttctgacgcagcctgagaatgacctgccctggccccagccctactctgtgtaatagaataaaggcctgcgtgtgtctgtgttgagcgtgcgtctgtgtgtgcctgtgtgcgagtctgagtcagagatttggagatgtctctgtgtgtttgtgtgtatctgtgggtctccatcctccatgggggctcagccaggtgctgtgacaccccccttctgaatgaagccttctgacctgggctggcactgctgggggtgaggacacattgccccatgagacagtcccagaacacggcagctgctggctgtgacaatggtttcaccatccttagaccaagggatgggacctgatgacctgggaggactctcttagttcttaccttttgtggttctcaataaaacagaacttaaaaaattaaaaaaaaaaaaaaaaaaaaaaaa

SEQ ID NO: 861 - DNA, 3072 bp, Homo Sapiens
  NM_001014990
gcttgaactcggcggcttccgtagcgggagggcgaaagatggcggcggcagtactgggacagttgggtgcgttatggatacataacctgaggagccgggggaagctggccttggggaaatctaccactgtcgaagacaaataaaatatagcaaagacaagatgtggtatttggcaaaattgatacgaggaatgtctattgaccaggctttggctcagttggaattcaatgacaaaaaaggggccaaaataattaaagaggttctcttagaagcacaagatatggcagtgagagaccataacgtggaattcaggtccaatttatatatagctgagtccacctcaggacgaggccagtgcctgaaacgcatccgctaccatggcagaggtcgctttgggatcatggagaaggtttattgccattattttgtgaagttggtggaagggcccccacctccacctgagccaccaaagacggcagttgcccatgccaaagagtatattcagcagcttcgcagccggaccatcgttcacactctatgatgaggagattcagactccacagtgtatatattttgccatttattttctaaaaataaacaaaaattgaaggcaaatgctttttatgatttctcattgaattattgaaacagtgtataactgctagttgtaaatgaatatttataaggctttgcccatttcttttgagcctctgggcatatttgtatgcatttgcgacttggaaggggaaatcagctttaaacatagtaacagactatatttcaaaaggcttttggagtaactttgaaagggaatgttaactttccaactagtgtcctgcaggtggctgttttgatactggacttgaatacagtgttatgaggtaagaaaattgcttttatttcacttaattttctcttgggaccatgggaagttagagtggctgcatgttgtttcattacagtattttagggtgttcagtggtaccgtttttcctttcactgttggcacaggccagtgagtcaaaaattatattttcctttactgttttagcagtaactcgaaactacaggagtttattagatatacgaatctaaaactccaaaaacctttaactttgaaaattttcttttggttaagcaaagcctgtttttatttcttcttccaacagtgctttatattgtttggatatcttgtttaggattgatttatttttcagggtaaattcaattactgagagaggaattgaaccaatctcagcattgcattctaaaatggggcagtaggtggcactcaaccttttattagcagaaaattgttagtttcaaattagagtgttcaacactgcttccctctcattcatacacgtcttcattaagaagaagtactctttgtctacagccctagtccaacttttgcatgcaaaagaagaatcgaggatgcttgcttgttaatgcagacttctgggccccaccccaatgattcaattcactaggtcttatggggggctggtttcagaaatctatgttttaaacaaacacttccaggtaattctgttgtaggggactacgctttgagaatacggctttaggagaatgaaaaaatgtagttttattgccatgttttaagatggcattaataatagttactgtttactgggaacttgttatttgcaagctctgtgctagtattttacataattcttcacaacatcctgaaaatgtagcttttgttttaccactttacaaaggaataaaccgaagcacacagaattcaaataactatcacaagtcacacagcatgtaaatattggggctatgattgaaaggtttctaaagtagctggttctgcataccttttgagtatacagctgggtttttgtgtctctccagttaacctaatgcatgggtaaaaagacatcaggggtcagtggaataaaccaaggtgtaggacagattcattctgggtcctaagctgttgtagcatggagtcagggaaataacactggaatattaaaaggtaaccttcattctagtctgtgcattctcattagccagaaagaagactggataggtctcttcccttgctggcctccatttcattcatttatgaaacaagagactcaatgttctctgtagaaaaccttttttagaatcacttgaagaatttgtttaaaaatgcaaattcctgggctctactctcagactaagtgaatcagaagctttggtgtgggagaccatggaacctgcagttttaataaatgccccagtgatttgcatgttggagaattatcacaccaggtcactgtgctctcatgtggtggggatgctccacgattgctcttggagttgtgacttccttgggtgtgactaaagccaggtggtgccatggacatcataaatataaattatgtaagtgaaggcactgcttcagtcaggctgtaaaagctattttgaaagtggtaaggaaaaagtaggattgtaatgaagaaaatttccttcccaggttaagccttcatttggaactgcttccagtacgttacaaaaagtaataatagctaacctgtgtcactgactgtatctggtactattttaagcactatatatacattatctcaatgaatctttcccattgtgacatccggctagttttcgtggctaagagtgtactttctaacatccatgaacattgtggtccccacctgaagtttcactttgcatgttcagtgatatggtttggctctgtgttcccacccaatcttatctcaaattgtaatccccatgtgtccagggagggacctgtaatccccacctagtgacggagggaggtgattgatgatgggtgtggtgtaccccatgctgttctcgtgatagtgagtgggttctcatgagatctgatggttttataagtgtttgaaagttccctcttcactcgctgtcttgcctgctgccatgtaaaatgtgcctacttcaccctctgccatgattgtaagtttcctgaggcctccccagccatgcagaactttgacacaattaaatgtcttttctttataaattaaaaaaaaaaaaaaaaaa

SEQ ID NO: 862 - DNA, 1440 bp, Homo Sapiens
  NM_001015002
ggaggtgagcaggaaggagacggccgcccagcagcccgtgggcaggcgcggcggagcgagcggggccggcggcgggcgccgagggacgccgaggcctcgggcgggggctggcccggggttccaggtctccagtgggggctgcagactaagcaaaatgaggcggttcctgaggccagggcatgaccctgtgcgggagaggctcaagcgggacctgttccagtttaacaagacggtggagcatggcttcccgcaccagcccagcgccctcggctacagcccgtccctgcgcatcctggccatcggcacccgttctggagccatcaagctctacggagccccaggcgtggagttcatggggctgcaccaggagaacaacgctgtgacgcagatccacctcctgcccggccagtgccagctggtcaccctgctggatgacaacagcctgcacctttggagcctgaaggtcaagggcggggcatcggagctgcaggaggatgagagcttcacactgcgtggacccccaggggctgcccccagtgccacacagatcaccgtggtcctgccacattcctcctgcgagctgctctacctgggcaccgagagtggcaacgtgtttgtggtgcagctgccagcttttcgtgcgctggaggaccggaccatcagctcggacgcggtgctgcagcggttgccagaggaggcccgccaccggcgtgtgttcgagatggtggaggcactgcaggagcaccctcgagaccccaaccagatcctgatcggctacagccgaggcctcgttgtcatctgggacctacagggcagccgcgtgctctaccacttcctcagcagccagcaactggagaacatctggtggcagcgggacggccgcctgctcgtcagctgtcactctgacggcagctactgccagtggcccgtgtccagcgaagcccagcaaccagagcccctccgcagcctcgtgccttacggtccctttccttgcaaagcgattaccagaatcctctggctgaccactaggcaggggttgcccttcaccatcttccagggtggcatgccacgggccagctacggggaccgccactgcatctcagtgatccacgatggccagcagacggccttcgacttcacctcccgtgtcatcggcttcactgtcctcacagaggcagaccctgcagccagtaggagagcttcgggagtgggtgcccagggttaggtgtgggaggcatggggcaggaccatcagtaaagacagggccaggtgcagtggctcctgcctgtaaccccagtgctgtgggaggccaaggtggtaggatcgcttgaacccaggagttcaagtccagcctggacaacgtagggagacccttgtctctacaaaaaataaaaaaattagccaggaaaaaaaaaaaaaaaaaaaaaaaaaaaaaaaaaa

SEQ ID NO: 863 - DNA, 4919 bp, Homo Sapiens
  NM_001015045
ggtcaaagtggactgcagtgtaaatgtagagaagcagccgataaaatagcattgcctgaagaagtttggaggctgagagcagcagtagactggccaactgcagagcaagttgtttctccagccgtgcggtgcagcctcatgcccccaacccagcttagccactgtaagaagacgttcactgtacagacgaccaaacttgccgtggaagagacagttgtgagattcccttgcaaatttacatacgagaatggcttgtgaaatcatgcctctgcaaagttcacaggaagatgaaagacctctgtcacctttctatttgagtgctcatgtaccccaagtcagcaatgtgtctgcaaccggagaactcttagaaagaaccatccgatcagctgtagaacaacatctttttgatgttaataactctggaggtcaaagttcagaggactcagaatctggaacactatcagcatcttctgccacatctgccagacagcgccgccgccagtccaaggagcaggatgaagttcgacatgggagagacaagggacttatcaacaaagaaaatactccttctgggttcaaccaccttgatgattgtattttgaatactcaggaagtcgaaaaggtacacaaaaatacttttggttgtgctggagaaaggagcaagcctaaacgtcagaaatccagtactaaactttctgagcttcatgacaatcaggacggtcttgtgaatatggaaagtctcaattccacacgatctcatgagagaactggacctgatgattttgaatggatgtctgatgaaaggaaaggaaatgaaaaagatggtggacacactcagcattttgagagccccacaatgaagatccaggagcatcccagcctatctgacaccaaacagcagagaaatcaagatgccggtgaccaggaggagagctttgtctccgaagtgccccagtcggacctgactgcattgtgtgatgaaaagaactgggaagagcctatccctgctttctcctcctggcagcgggagaacagtgactctgatgaagcccacctctcgccgcaggctgggcgcctgatccgtcagctgctggacgaagacagcgaccccatgctctctcctcggttctacgcttatgggcagagcaggcaatacctggatgacacagaagtgcctccttccccaccaaactcccattctttcatgaggcggcgaagctcctctctggggtcctatgatgatgagcaagaggacctgacacctgcccagctcacacgaaggattcagagccttaaaaagaagatccggaagtttgaagatagattcgaagaagagaagaagtacagaccttcccacagtgacaaagcagccaatccggaggttctgaaatggacaaatgaccttgccaaattccggagacaacttaaagaatcaaaactaaagatatctgaagaggacctaactcccaggatgcggcagcgaagcaacacactccccaagagttttggttcccaacttgagaaagaagatgagaagaagcaagagctggtggataaagcaataaagcccagtgttgaagccacattggaatctattcagaggaagctccaggagaagcgagcggaaagcagccgccctgaggacattaaggatatgaccaaagaccagattgctaatgagaaagtggctctgcagaaagctctgttatattatgaaagcattcatggacggccggtaacaaagaacgaacggcaggtgatgaagccactatacgacaggtaccggctggtcaaacagatcctctcccgagctaacaccatacccatcattggttccccctccagcaagcggagaagccctttgctgcagccaattatcgagggcgaaactgcttccttcttcaaggagataaaggaagaagaggaggggtcagaagacgatagcaatgtgaagccagacttcatggtcactctgaaaaccgatttcagtgcacgatgctttctggaccaattcgaagatgacgctgatggatttatttccccaatggatgataaaataccatcaaaatgcagccaggacacagggctttcaaatctccatgctgcctcaatacctgaactcctggaacacctccaggaaatgagagaagaaaagaaaaggattcgaaagaaacttcgggattttgaagacaactttttcagacagaatggaagaaatgtccagaaggaagaccgcactcctatggctgaagaatacagtgaatataagcacataaaggcgaaactgaggctcctggaggtgctcatcagcaagagagacactgattccaagtccatgtgaggggcatggccaagcacagggggctggcagctgcggtgagagtttactgtccccagagaaagtgcagctctggaaggcagccttggggctggccctgcaaagcatgcagcccttctgcctctagaccatttggcatcggctcctgtttccattgcctgccttagaaactggctggaagaagacaatgtgacctgacttaggcattttgtaattggaaagtcaagactgcagtatgtgcacatgcgcacgcgcatgcacgcacacacacacacagtagtggagctttcctaacactagcagagattaatcactacattagacaacactcatctacagagaatatacactgttcttccctggataactgagaaacaagagaccattctctgtctaactgtgataaaaacaagctcaggactttattctatagagcaaacttgctgtggagggccatgctctccttggacccagttaactgcaaacgtgcattggagccctatttgctgccgctgccattctagtgacctttccacagagctgcgccttcctcacgtgtgtgaaaggttttccccttcagccctcaggtagatggaagctgcatctgcccacgatggcagtgcagtcatcatcttcaggatgtttcttcaggacttcctcagctgacaaggaattttggtccctgcctaggaccgggtcatctgcagaggacagagagatggtaagcagctgtatgaatgctgattttaaaaccaggtcatgggagaagagcctggagattctttcctgaacactgactgcacttaccagtctgattttatcgtcaaacaccaagccaggctagcatgctcatggcaatctgtttggggctgttttgttgtggcactagccaaacataaaggggcttaagtcagcctgcatacagaggatcggggagagaaggggcctgtgttctcagcctcctgagtacttaccagagtttaatttttttaaaaaaaatctgcactaaaatccccaaactgacaggtaaatgtagccctcagagctcagcccaaggcagaatctaaatcacactattttcgagatcatgtataaaaagaaaaaaaagaagtcatgctgtgtggccaattataatttttttcaaagactttgtcacaaaactgtctatattagacattttggagggaccaggaaatgtaagacaccaaatcctccatctcttcagtgtgcctgatgtcacctcatgatttgctgttacttttttaactcctgcgccaaggacagtgggttctgtgtccacctttgtgctttgcgaggccgagcccaggcatctgctcgcctgccacggctgaccagagaaggtgcttcaggagctctgccttagacgacgtgttacagtatgaacacacagcagaggcaccctcgtatgttttgaaagttgccttctgaaagggcacagttttaaggaaaagaaaaagaatgtaaaactatactgacccgttttcagttttaaagggtcgtgagaaactggctggtccaatgggatttacagcaacattttccattgctgaagtgaggtagcagctctcttctgtcagctgaatgttaaggatggggaaaaagaatgcctttaagtttgctcttaatcgtatggaagcttgagctatgtgttggaagtgccctggttttaatccatacacaaagacggtacataatcctacaggtttaaatgtacataaaaatatagtttggaattctttgctctactgtttacattgcagattgctataatttcaaggagtgagattataaataaaatgatgcactttaggatgtttcctatttttgaaatctgaacatgaatcattcacatgaccaaaaattgtgtttttttaaaaatacatgtctagtctgtcctttaatagctctcttaaataagctatgatattaatcagatcattaccagttagcttttaaagcacatttgtttaagactatgtttttggaaaaatacgctacagaatttttttttaagctacaaataaatgagatgctactaattgttttggaatctgttgtttctgccaaaggtaaattaactaaagatttattcaggaatccccatttgaatttgtatgattcaataaaagaaaacaccaagtaagttatataaaataaattgtgtatgagatgttgtgttttcctttgtaatttccactaactaactaactaacttatattcttcatggaatggagcccagaagaaatgagaggaagcccttttcacactagatcttatttgaagaaatgtttgttagtcagtcagtcagtggtttctggctctgccgagggagatgtgttccccagcaaccatttctgcagcccagaatctcaaggcactagaggcggtgtcttaattaattggcttcacaaagacaaaatgctctggactgggatttttcctttgctgtgttgggaatatgtgtttattaattagcacatgccaacaaaataaatgtcaagagttatttcataagtgtaagtaaacttaagaattaaagagtgcagacttataattttc

SEQ ID NO: 864 - DNA, 4866 bp, Homo Sapiens
  NM_001015048
cggtcactccaggctgcctcgctgcgccgctggcggtgggcgtggcgctgccggcggctaggcgcggacgccggaggaggtgtccccgggtttaggggtgttcggccaggggcggggctgccgggcccgggcgactgccggagctgcggaagtcgtggaagcgtcggcgacgcatcgcgcgatggcgcgggcgggacagtgcttgtgaaactgaacacaacaaaagtatggatatgggaaaccaacatccttctattagtaggcttcaggaaatccaaaaggaagtaaaaagtgtagaacagcaagttatcggcttcagtggtctgtcagatgacaagaattacaagaaactggagaggattctaacaaaacagctttttgaaatagactctgtagatactgaaggaaaaggagatattcagcaagctaggaagcgggcagcacaggagacagaacgtcttctcaaagagttggagcagaatgcaaaccacccacaccggattgaaatacagaacatttttgaggaagcccagtccctcgtgagagagaaaattgtgccattttataatggaggcaactgcgtaactgatgagtttgaagaaggcatccaagatatcattctgaggctgacacatgttaaaactggaggaaaaatctccttgcggaaagcaaggtatcacactttaaccaaaatctgtgcggtgcaagagataatcgaagactgcatgaaaaagcagccttccctgccgctttccgaggatgcacatccttccgttgccaaaatcaacttcgtgatgtgtgaggtgaacaaggcccgaggggtcctgattgcacttctgatgggtgtgaacaacaatgagacctgcaggcacttatcctgtgtgctctcggggctgatcgctgacctggatgctctagatgtgtgcggccggacagaaatcagaaattatcggagggaggtagtagaagatatcaacaaattattgaaatatctggatttggaagaggaagcagacacaactaaagcatttgacctgagacagaatcattccattttaaaaatagaaaaggtcctcaagagaatgagagaaataaaaaatgaacttctccaagcacaaaacccttctgaattgtacctgagctccaaaacagaattgcagggtttaattggacagttggatgaggtaagtcttgaaaaaaacccctgcatccgggaagccaggagaagagcagtgatcgaggtgcaaactctgatcacatatattgacttgaaggaggcccttgagaaaagaaagctgtttgcttgtgaggagcacccatcccataaagccgtctggaacgtccttggaaacttgtctgagatccagggagaagttctttcatttgatggaaatcgaaccgataagaactacatccggctggaagagctgctcaccaagcagctgctagccctggatgctgttgatccgcagggagaagagaagtgtaaggctgccaggaaacaagctgtgaggcttgcgcagaatattctcagctatctcgacctgaaatctgatgaatgggagtactgaaataccagagatctcacttttgatactgttttgcacttcatatgtgcttctatgtatagagagctttcagttcattgatttatacgtgcatatttcagtctcagtatttatgattgaagcaaattctattcagtatctgctgcttttgatgttgcaagacaaatatcattacagcacgttaacttttccattcggatcattatctgtatgatgtggtgtggtttgtttggtttgtccttttttttgcgtttttaatcagaaaacaaaatagaggcagcttttgtagattttaaatgggttgtgcaagcattaaaatgcaggtctttcagaatctagaactaggcataaccttacataatactaggaaaattatgagaaaggggaaatttttggttaaataagagtaaggttcaaacacaagcagtacatgttctgtttcattatgctcgatagaaggcttttttttcacttataaggcctgattggtcctacccagcttaacggggtggggtttttttgtttgttcagacagtctgttcttttgtaaacatttttagttggaaaaacagcatctgcattttccccatcctctacgttttagagaggaatcttgtttttgtgtgcaacataagaaaattatgaaaactaatagccaaaaaacctttgagattgcattaaagagaagggataaaggaccagcaataataccttgtaagttgcttttgtttgtaaaatctgagcttatagttttccttagtgagtaaattcataaggatgggaacatttaaattaagttaatgggcctttaaaaaaaaaaaaaggaaacactcatacctgtagttggaggatgaatactggagacgggttaccaatgtcaggttatactaaaactaaatcagaaagtctgaatgtagcacataatggttctcttctgttgtccaaggctgtaaaatggacagccttgtcacacctccccggtgctgttttacaacgtgagggtagacgctgtcagtaacccagagggaccaggccttcctaggttttctaggcagtcagctgttaaccactcacttagtaaatgtcataactacacctgctccaggaccaatcagtgaaacctgctcggaattaaaggcttcctctgggtgcctgctgaacaactgagctcatgtcatgggcatgtggtggtttctctgttgcctgaaagagccattaaagtcagtcgtgcgtgaagcatctctcttctaaaggatgtgtatttccataaatgctttctgaggatccggtacaaaatgatttcccaaagttctgaagtgccttgagaacatgtgggtccgagtgttataacagactcctcccccgggtcaccttttgcctggtcatcctgttagagtacatctttggaaatccagggtaatattctctttcagagatgctcattgtgtaactctgtgtagggagatagtcactttaaacagctcaaagtagctagctaaaggagtagccttaaatacctaaaagatgacagaagcatagcccttaacaaatcttcagcttgtctctcagtatttcccaatcatgaaaatcccttgctatgtctttcctactagaaatgttctagaatcgctggacggtggggtcagagggcagtcggtatttaggccgtgagcttcccatactactgcaggtccaactcctggcaaccgcgggctcaaggcaggtcattggaatccacgttttggccacagtagttgtaggattgcttttctgtatcataattttagaatgctcttaaaatcttgaggaagagtttttattttttatttatttttgagatggagtctctgttgcccaggctgcagtgcagtggtgccatctcagctcactgcaacctccacctcccaggttcaagcgattctcctgcctcagccacctgagtagctgggagtacaggcatgtggcaccatgcctggctaatttttgtatttttaatagagttgagatttcaccatgatggtcaggctggtctcgaactcctgacctcgtgatccgcccgcctcggccccccaaagtgctgggattaacgggtgtgagccacggcgcccagcccaggaagagtttttaaattagagctctgtttaattataccactgggaaatcatggttacgcttcaggcatattcttccccagagtactacttacattttaaatttcattttgtaaagttaaatgtcagcattccctttaaaagtgtccattgttctttgaaagtagacgtttcagtcattcttttcaaacaagtgtttgtgtaccttttgccaagctgtgggcatcgtgtgtgagtacagggtgctcagctcttccaccgtcattttgaattgttcacatgggtaattggtcatggaaatgatcagattgaccttgattgactgtcaggcatggctttgtttctggtttcaatctgttctcgttccttgtaccggattattctactcctgcaatgaaccctgttgacaccggatttagctcttgtcggccttcgtggggagctgtttgtgttaatatgagctactgcatgtaattcttaaactgggcttgtcacattgtattgtatttttgtgatctgtaatgaaaagaatctgtactgcaagtaaaacctactccccaaaaatgtgtggctttgggtctgcattaaacgctgtagtccatgttcatgccaaaaatggctgggaacgtttgctttatttacattcagtcagcgttgctttcagatcacactttatccacacaggaaagccagtcagcctataatgaagtagttattaaaataaatgtaatgaatatgtctacaaagtatagtttagtggtttattttgctaaaatgcacatatatttgatataatttagtttgagaagttcagctagtttttctcctttgtttgactttgtcaatttctatctggtttttaagggtctgagcttagcttgtgcatgcaaggttttgggtttttttattttttttttgagcacagcttttcaccttttaatttgttgggtatttttctcttaataagagaaatattggccatcgatttttacatataatacaagtgtgtttttccagtacattggttcctgtcccctctctgtgaactgtttgagtattggaacagtatgtcttcaataattcaatgttactttgagatacatgtgttaatatacccttagttattcttgaaataaaaccagtctcttacgcttgcagtggagaaaggcaaaaaaaaaaaaaaaaaa

SEQ ID NO: 865 - DNA, 2123 bp, Homo Sapiens
  NM_001015509
tcgctttgtgattcttgatccggaacttgtcacccaggaaccccggaagaggtagctcacgcgatagaaacgtgttcgctgcccagaagaagggaaggcgcgagtgaggaaaggaggtactgtagctacacttctggaaaattcagtatggacagtctccgacttaggatttttcaactttaggatggtgtgaaagagacacccattcagtagaaactgtacttcgagttttgcattttgatcttttcctggcctagtgataatgtggtacagtacactcttgtgatgctgggcagcggcagcgagccacagctcccagtcacccatgtgatcacgggaatcaacaacccatcctctaccgtgtactgtgttgtcagcttttttggatattgtgttttgtgttttcacattccatcatgtctacaaaatgtccatcagtgtctcctgtttctggtgagatgaagaagaggaaggcaattactcttgaaatgaaactcaagataattgcccagcatgaaggtggcaagccagtaatggccattgcacgtgagttaggactttggcaatccacgatttcaaccatcttaagggataagaagcaaatcagtgatgcagcgaaatcgtcagcatcagttaaatccactgtcatcacaaagaaaagggctggaccaattgatgatatggaaaaattacttgttatgtggatggaagaccagatacagaagcgtataccacttagcctactgatgatccaggctaaggcaagaagtctttttaatatgctaaaagaccgtgccagtgatcctacatatacacaaatgtttaaagcaagtcatggatggttccagcgcttcaaaaggcgtcataattttcacaatgtaaagatcactggtgaggcagcacgtgctggtaatgaaggtgccatagcttttaaggaacagctgcataggataattatggctaaagatctttgcaataaggagctgattgcactggaggaagaaagaggtaaaggcgttgaggcagtggaagaagttacacccacggcacctagaaagttcacagcaaagaaactggcagaggcatttgctgctatcagcagtggcctacacgttagaagaaatggacgtcaattacgagagattcgccacagttgacaggcgcagatacaggatgctcttgcttgctacagagaaatatatagtgaaaagaagaaacaagctgtacggtcaaaacttggtatcttcctgaagaacaacactatgcttgctaaaccatcaactagtgttgatgtcccaatgccttctaccacctattctcgatgttcatcagaagagagagaaattgaggaccctgttgcatccccatcatccagcaattaattctatttcagtgcttcaaacatttttcaggaccactgtgctttcagctgtgtaaattaatgatgccctccaaatccttggttatggaatatttggctcatcccagtacactcggcttggctgttggagttgcttgtggcatgtgcctgggctggagccttcgagtatgctttgggatgctccccaaaagcaagacgagcaagacacacacagatactgaaagtgaagcaagcatcttgggagacagcggggagtacaagatgattcttgtggttcgaaatgacttaaagatgggaaaagggaaagtggctgcccagtgctctcatgctgctgtttcagcctacaagcagattcaaagaagaaatcctgaaatgctcaaacaatgggaatactgtggccagcccaaggtggtggtcaaagctcctgatgaagaaaccctgattgcattattggcccatgcaaaaatgctgggactgactgtaagtttaattcaagatgctggacgtactcagattgcaccaggctctcaaactgtcctagggattgggccaggaccagcagacctaattgacaaagtcactggtcacctaaaactttactaggtggactttgatatgacaacaacccctccatcacaagtgtttgaagcctgtcagattctaacaacaaaagctgaatttcttcacccaacttaaatgttcttgagatgaaaataaaacctattcccatgttctaaaaaaa

SEQ ID NO: 866 - DNA, 2531 bp, Homo Sapiens
  NM_001015883
gggccggagggccgcggtgtgccgcggggcagttgcgggttgtcataacggtccccgccggagtgaggcgaggccgcgtcgctcagttctggccgtctagggcccctgtaaggatgagagcgcagaggacgcagggccgctggaggcgcaggtaacgaagctagggtgcggttgggaccgcggctgagctttttccgggacccgtggtgctgaatggagaggacggagacgaagccgagccgcggctcctagcggcggcgccgatgctcgagctgtagctgcgctcccggccctggagaccatgaggttccgcatctacaaacggaaggtgctaatcctgacgctcgtggtggccgcctgcggcttcgtcctctggagcagcaatgggcgacaaaggaagaacgaggccctcgccccaccgttgctggacgccgaacccgcgcggggtgccggcggccgcggtggggaccacccctctgtggctgtgggcatccgcagggtctccaacgtgtcggcggcttccctggtcccggcggtcccccagcccgaggcggacaacctgacgctgcggtaccggtccctggtgtaccagctgaactttgatcagaccctgaggaatgtagataaggctggcacctgggccccccgggagctggtgctggtggtccaggtgcataaccggcccgaatacctcagactgctgctggactcacttcgaaaagcccagggaattgacaacgtcctcgtcatctttagccatgacttctggtcgaccgagatcaatcagctgatcgccggggtgaatttctgtccggttctgcaggtgttctttcctttcagcattcagttgtaccctaacgagtttccaggtagtgaccctagagattgtcccagagacctgccgaagaatgccgctttgaaattggggtgcatcaatgctgagtatcccgactccttcggccattatagagaggccaaattctcccagaccaaacatcactggtggtggaagctgcattttgtgtgggaaagagtgaaaattcttcgagattatgctggccttatacttttcctagaagaggatcactacttagccccagacttttaccatgtcttcaaaaagatgtggaaactgaagcagcaagagtgccctgaatgtgatgttctctccctggggacctatagtgccagtcgcagtttctatggcatggctgacaaggtagatgtgaaaacttggaaatccacagagcacaatatgggtctagccttgacccggaatgcctatcagaagctgatcgagtgcacagacactttctgtacttatgatgattataactgggactggactcttcaatacttgactgtatcttgtcttccaaaattctggaaagtgctggttcctcaaattcctaggatctttcatgctggagactgtggtatgcatcacaagaaaacctgtagaccatccactcagagtgcccaaattgagtcactcttaaataataacaaacaatacatgtttccagaaactctaactatcagtgaaaagtttactgtggtagccatttccccacctagaaaaaatggagggtggggagatattagggaccatgaactctgtaaaagttatagaagactgcagtgaaaatcacagttacaaaagcgacagtcttctatttttgatatttgtccaaacaggacatacaattgaataaaagagtttaggaactggtttctgctttaatacaaaaacaaaatcttgtaaaaggtgtccaaatacatagtaatcttttccagttatgtctgattaagatttaaaactgaaggtttcattttgggagtagggttttaaagctcaatctgttatctgctaaaattgattattgttgatatgagagaagaggggaaattttatttaaattgcatttattaatctttttatctgaaactttgtacacttttccactttcaaaacctattttaagtacagcaaaatttatttaaaactgtcatagcagtaaaaagtattacgatgaaattgttagggtattaatggaacaaacccagtttcactctcttgacacacttattaggaagggattgcttcactggtttaataatttaaaagttatgtttgttaaacaccctgtcagaacagtcattttcagtattagattcctgtactattgtgttttgagtgtgttttggaaccttcatagaacacactttcttttggaatgtatttgattgataagaaagtttaaacattgttttcacctcaatgtagaaatacagtggttttgtttttttttttcttttagtgctgacaaaataaaatactcatttttgcataaaaaggttcctaatccttttgcagaataagttttgtttactctttataccaaaattcagtgaaggcattctacaagttttgagttagcattacattttaatatttactattgctacattgtataattgagtttgaaataaaacccagcttatgacaatgcaaaaaaaaaaaaaaaaaa

SEQ ID NO: 867 - DNA, 529 bp, Homo Sapiens
  NM_001017
cgctctcctttcgttgcctgatcgccgccatcatgggtcgcatgcatgctcccgggaagggcctgtcccagtcggctttaccctatcgacgcagcgtccccacttggttgaagttgacatctgacgacgtgaaggagcagatttacaaactggccaagaagggccttactccttcacagatcggtgtaatcctgagagattcacatggtgttgcacaagtacgttttgtgacaggcaataaaattttaagaattcttaagtctaagggacttgctcctgatcttcctgaagatctctaccatttaattaagaaagcagttgctgttcgaaagcatcttgagaggaacagaaaggataaggatgctaaattccgtctgattctaatagagagccggattcaccgtttggctcgatattataagaccaagcgagtcctccctcccaattggaaatatgaatcatctacagcctctgccctggtcgcataaatttgtctgtgtactcaagcaataaaatgattgtttaacta

SEQ ID NO: 868 - DNA, 4137 bp, Homo Sapiens
  NM_001017368
ttaccaaagatacatccccaggcggcaccattcacttcacatgaaagccgctgctcttggttcctgagatgatctcatctgaacatggctccagcgacctcagccacaggaactagagacagcttgctttctgtcgtggcaatgttttgaaactggcaaaatcagattttatcatgtgggcaacctgctgcaactggttctgcctggatggacagcctgaggaggtcccaccaccccagggagccaggatgcaggcctattccaaccctgggtacagctccttcccttccccaacaggcttggaaccaagctgcaagtcctgtggggctcactttgcaaacacggccaggaagcagacctgcttggactgtaagaaaaatttttgcatgacctgttcgagccaagtagggaatgggccccgcctctgccttctctgccaacggtttcgagctacagcctttcagcgagaggagctcatgaagatgaaggtgaaggacttgagggactatctcagcctccatgacatctctaccgaaatgtgccgggagaaagaagagctggtgctcttggtccttggccagcagcctgtaatctcccaggaggacaggactcgtgcctccaccttgtccccagactttcctgagcagcaggccttcctgacccagcctcactccagcatggttccacctacctcacccaacctcccctcttcatctgcacaagccacctctgttcccccagcccaggttcaggagaatcagcaggccaatggccatgtgtctcaggatcaagaggaacccgtctacctggagagcgtggccagagtacctgctgaggatgagacccagtctattgactcagaggacagctttgtcccaggccgaagggcctctctgtctgacctgactgacctggaggacattgaaggcctgacagtgcggcagctgaaagagatcttggctcgcaactttgtcaactacaagggctgctgtgagaagtgggagctgatggagagagtgacccggctatacaaggatcagaaaggactccagcacctggtcagtggtgccgaagaccaaaacgggggagcagtaccatcaggcttggaggagaacctgtgtaagatctgcatggactcacccattgactgtgttcttctggagtgtggccacatggtaacctgtaccaagtgtggcaagcgcatgaatgaatgtcccatctgccggcagtatgtaatccgagctgtgcatgtcttccggtcctgagagcttgcatcggtttcttcagtgccttacagggaaatagcctggggtgtctgggctcagggttggccagcttgcagaggagcaagctagtagaaatattgcagggttcccaaaaccaggtcaagcaagatgccatgtcacccctgagcatgcctgtcttcccaggggtgtacctcttggctggcaaagcccaaggccagtgggaacttgtataaatcacatgggtatgttcttggttcagtgatcttggagtgatgatggtaactgatgaacagagaactttccagaacttgggtcctgtcttcctccctgaacctagacagtttcacccctcctcctgtacccaacccatccccaccccatatgggagatgcttgcccatgtgtttcatcaatcagaagtcctcctccccagcacattcggatttaaatttctggtctctccggctttctgtgctttaactatctttgctaaagtctcttgctacattgcctaaatccatttgtttctttggaccaaaaatgttagtttaccagaccgatagtggtccttaggacagattttagaccagtaaacttatctttggtgagaaatgaaatacaaatgctatagaaaaatttcaaagttgttaaaagccacttcattaaatgctgggattggaagctgttggtctcctgacctgactctgggagccaacaaaacatcaggctcccaaactgctgggaaatttgtttctgtctgcaagggatagtgcgtgcataatccctgctgctgcttctcttgggacctgatttgcaccatccttagtttatgcggaaaggggaagcaatgggtggaggcagtggccttctccttaattttggcttggcttctgatccttttcccaactagaagtcttaagccacttttcgctgaaaatgaaatccctcccttatccatggtagttttaaatttggtttcattgaagaaatagatttaggcaaagagcctgtgctcttctctggccagactgctgttgaagttcctggagagcaaatgttaagacagagcacttaagagctttcaggaggtactgaatgagactggattctgttgtaagccgacagttcaagtctttatttcccaggttggtggggagtgaggagaccctactttcattccctttcctagcccactgatttttgggggcaggtcagggagaaagcattttttttttttttttgagtctcactctgttgcccaggctggagtgcagtggtacagtcttggcttactgcaacctccacctcccaggttcaagctattctcctgccttagcctccagagtagctgggattataggcgcccaccaccacaccaggctaatttttgtatttttagtagagacggggttttaccatgttcaccaggctggtcttgaactcttgaccttatgatccgcccgcctcagcttcccaaagtgctgggattacaggcgtgagccaccacacccagcaggagaaaccattttctaggctctttaggaaggaccatgcaatgagtaggtgatgtatttgagccctcacagtctttacacccctagaggagctggaggacttaagagtttgctgcagaagcgtggccaagcacaaaacacatgatcaggaaagcagagtgttttcccattaccaatggatgaactatgcaaaccctaaacgccttggcagacacctcccaccccttacccctcccatgcagctgaaaaatctgagactagaaccaatcatgactctggatggcagagggaaacctctaaagggacttattacattggtacagacatatttatgctttcttccatcaccaaccactaaacccctttggaggaatgaaataactgcataaactagtcaactgaacactgggccacttacctcaatgttatacaaagtcctggatgatttgattctgaaccacagcctttgcaggagttgggggaatcagatttgctcatgaagacatccctttccacttttgtcatgggcagtaaatactatagtttacaatgcctaccaattagcaaaggatcattcattcagctactcagttcctctgtaaaacaggtctatgtatgtgcaattcagctaagatctagcagtaacttaagggcagaagctggctctctacttacaacctgctttctctgctgaagccttacctcctcttcagtttccctcctagacacaaatcgaaaataatatactgatagctggttagtaacctcagtaagaattaaaactgaggttgtttactcattttgcctttaaatcttttatccccttttggtgaaggtttccctttaggaaaaaaggtgtcaaacaaccctgattttttttttttttgcatcatttttattacaccaaattaaagttgggagttccaagatcccattccagttaatatttaaccaaggtctaaaatttgattttttttaaatctttgaatcctcccttctgcccctcatggatccttggttttaatgatatggaaacatctaattcttagaattattccgtagcttttgctgattactctgagatttcagttaagacttgtttcaaaagacagatagctgactggttcataatacattggaatagttggatccaaactaataagaataagctgtacaggaactagtgctcaatatacattgtataaatttgtggaaatctcttggatgtgaattgttacttcaagtggcttttattaagattttctcagacttacttggaggttaaagcaaacccaaatgtgtattattttgttacagagctctgctttataattttgtaataaagtttcaatacagacaccaaaaaaaaaaaaaaaa

SEQ ID NO: 869 - DNA, 1928 bp, Homo Sapiens
  NM_001017369
cccggctccacccccaagccaggcgaggcaggttccgaggttggaacacctggcgagtcctcggtgtcggtggccggcagtcatctcgcggccgttcaggataagccagagacatgggaaaaccaatggaagtgtttcaaagttcttctctttaatcacttctgtatccagctgcctttgatttgtggaacctattattttacagagtatttcaatattccttatgattgggaaagaatgccaagatggtattttcttttggcaagatgctttggttgtgcagtcattgaagatacttggcactattttctgcatagactcttacaccacaaaagaatatacaagtatattcataaagttcatcatgagtttcaggctccatttggaatggaagctgaatatgcacatcctttggagactctaattcttggaactggatttttcattggaatcgtgcttttgtgtgatcatgtaattcttctttgggcatgggtgaccattcgtttattagaaactattgatgtccatagtggttatgatattcctctcaaccctttaaatctgatccctttctatgctggttctcggcatcatgatttccaccacatgaacttcattggaaactatgcttcaacatttacatggtgggatcgaatttttggaacagactctcagtataatgcctataatgaaaagaggaagaagtttgagaaaaagactgaataaatatctcacgtaaaccttcctgaaagataaacgttttcctgaattcagaaactagtagctaacattgcttctggagagcagaaataagcatgtcttctggctactaagtgataaaaagaacattaacaacctttaattaccttcctagtgggaactttttctactttacctacaagttctatatatgtagaaatgaataaatatatatttaagtacagttttcatgaggaagttttaaaagaccatgttcctaagcttccaagaaggttttggatactagaagtattaatctatggcttttctcccagtaaaaccataggcctgaagttcacattgggtctttaaatcttttagatatatactggtcatttcagaaaattcttcatagtggtattggccttatatttaactttttttttattttttttttgagacaaagccacactctgtctccttggctggagtgtggtggcacagtctcagctcactgcaacctctgcctcccagttcaagcaattcttctgcctcagcctcccaagtagctgggattacaggcacccgccaccacgcccagctaatttttgtatttttgtagagatggggtttcacgatgttggccaggctggtctcaaacttctgacctcaagtgatctgcccaccttggcctcccaaagtgctgggattacaggtgtaagccactgcgcccggcctttttaactttaaacatgttttagaattcacctaaagatcaaaatatcatggattgaacctcatcaattgatagcagtgagtgactgaagcttccaaatcaagaaaagccggcaccaagaacttccattctaatctagagctgaccagtttgagctgattctctctttgaagagtccttcttgattgcagtgcagtactggcatttctgaatggatgtaagtggagtattttagtctaaaggcttttcaaattacttgaatttttttaaaaattgaggagctttatttctatttacccttccatttttgtatatcaaatttccattgtcattaaaaactgtatcttgaaactttgtgaactgacttgctgtatttgcactttgagctcttgaaataaatgtgatttttgtgtgattaaaacaaaaaaaaaaaaaaaaaaaaaaaaaaaaaaaaaaaaaaaaaaaaaaaaaaaaaaaaaaaaaaaaaaaaaaa

SEQ ID NO: 870 - DNA, 3371 bp, Homo Sapiens
  NM_001017370
ggtggccactgaaagtcagcggcgcggactgccctgagggcgggaaagggtggtcactgggtcagcccgaagcacctgacatgagggcggggaccccgaaatgcacacgaagtccggaactggtcttctgtgattttcattcgccctggtctctgttccctttcgtactcaaagctcgtgcatccagggaggggaaaccggagatagggtcttcgggccccgggcagaccctctgtgccgctgcaaaccgttgcagcctgaggctgtcaggtcctcccccagacacctgcggaccctccctctcctggcttcccgtctggtcatggcgagattctgggtctgcgtagccggtgctggcttctttcttgcatttttggttttgcattcgcgtttttgtggctctccagttttgaggaactttacttttgcagtttcctggagaactgagaaaattctttaccggctggatgtgggttggcctaagcacccagaatattttaccggaacaacattttgtgttgcagttgactccctcaatggattggtttacataggtcaaagaggggataacatcccaaagatattagtgttcacagaggatggatatttcctacgagcctggaattatacagttgacacacctcatggtatatttgcagccagtactctatatgaacaatccgtctggatcacggatgtaggaagtgatttcatgatcctttggctgcatggagaaaatgggacagggcctgctaagttcaacatacctcacagtgttacacttgattcagctggtcgggtgtgggttgctgaccgaggaaataaaagaatccaagtatttgataaagacactggggagtggttaggagcatggaataattgtttcacagaagagggaccttcttcagtcaggtttactcctgatgggaagtacttgattgtggcccagctgaatcttagcaggctctcagtcgtagcagcacccccagtgggaagcattggggagtgttctgtgatcagcacaatccaactagcagatcaagttttgccacatctcctagaagtcgacagaaagactggagcagtctatgtagcagaaattggagcaaaacaagtacaaaaatatgtccctttgaatagctatgttccttcatttggttcataatgtttctttcctgggaatatttcaagtggcagttcagattctcaattcactaagtgcttaaaaatgatgttcaagcacaagaatttatttttctagtataaaagatctagtatcagaaagatttgtttttgtatcattaagaatcttatattttgttgccctcttgggacttagttttatttgtaagtgcataaggatattttaatgaaaggaaagtaactaaaaaatggggttgggaagagggactaaggtggtaacctcattatttgccctggtagactgattctccctgggtaaaaaaaatgggaataaaaatgagcttgcatgataatttattaaatttcatgtgaagaactccagacctccagattgtgcaactaacataaaatgagctgcttgagagattgtaaataagatgaactattgattaatttgagtacccacagagtgctgtgtcttgacgacttaaaaatgaaaaagcaggattgccttttgagtagcttgcagtctagtggggagacaagcaggcaaacagtcacaacacagcaaaagcgaccttggagcatagtgggacttttggagtaggagtgctgcatttgactgagggaatcatggatacttcgcaggagaagtgaatttgagctcagacttgaaaactgaggaggagcttaccaagggacaaggaggagaaaacaataatttccaagtaaagaaggtataaaaagttagaagtgtactgtaaactttgataggcttttaggccttttttaaagcccaacttggcttctgtccattacctataagatatttaatgtcagtcagcctttaaatgtaggaataaaatggctggcatctaagcactttagtaaaagaggtttttacaaataactaaggattgtagagcttccttctctttttttttctttttctttcttttgttttacatgaactcaacttattcctaacatttgtctacctcaaagaaatttcaagattatttagataacatggatatgtgccaaatcctttgagctgttaagatgataatttcctgctttcctcctacatcttctcctcccactccctcctttggtgtgaatattggcttcccaattaagacctttttttttttttttccagtttgttttagcttattataggttttggaggaactttgccattttgtaatctttcaaatcattcttcacccttcctcacatcagcttcctgcttttcccagtgttttactgtaaattgtgtagcatatgacaaatcttgagctgactttcctcttcacctgttatggctggagtattttccagacctgaagggactcacacttgttttgatacttggatcacatctccgtgaggttaggaaggtaaatctaccaacaggaagccctgtactctgtattccaaggccattggtaaatgtgttggtgccactgatcggactgtatgaccttaaacaagtcaccttagttttcagtgaaatgggaatatcattgtctcctctttcatgaatgctgtgagaatcagatgtgcaacaggtacagacttgccctttgaaatctatacctctggatacattagaggcattttattaacaaaggcccttctaaatgtgctatttatttgacaataactatcagatttgccttaattttgtgtttatagcatttatcaaaacgtatcctcatagactttatgcagattaatatggtcaattgatttggataaaagaaagtaatttcagggtttgtttttaagccaggacaagaagtgcaaatgcctctttgaagcaatttaggctaaactgattttgaaatttcaaaatgttttattttactttgttttattaagccaggacaagaagtgcaaatgcctctttgaagcaattcaggctaggtaaaccgattttgccatttcaaaacgttttattttactttgttttatatcagagtcttataaaacctgctgcaaatatttctgaatgtctttgtaaaagtgtttgttagtgtacctgtgattatagtacttcacttttttcctttggattaattggttaaatgaatgagaaatgtgttatgttttttactaaaaagtataaattaaaattttggaaagaaaaggcaatattatctggctccccaattaaagtttgattttattgtcacaaaaaaaaagaaaaaaaaaaaaaaaaa

SEQ ID NO: 871 - DNA, 2096 bp, Homo Sapiens
  NM_001017373
cccagtcttgctgtctttcaatggggcagccactgctcagttgctgccattcagaaatatgaacccagtatcaccagaacttttgatttttcaagagaaaccaagattccagatttgtaggtgatatcttccatttttcagataaaacaaaggaaccagaaccacatccactgatcggatttgcctggggaggaggggtgctctctcctttgatcttctcttctggaagagatggaccaaaagcctctccagcaataatccgaaatgattcttgaagactatctttccagcttgtcacatatgcaaggtgtatttacaggagacagcaatggaaacctggtcagttgagcaggtctgcagttggttggtggagaaaaatttaggagagctagttcatagatttcaagaggaagaagtaagtggggccgctcttcttgcacttaatgatcggatggttcagcaactggtaaagaaaattgggcaccaggctgttctgatggatttaattaaaaaatacaagcagaacactcaaggactgaagtccccagaaaaccccaaaaaggcagccctggtcatgcaaacagaagcagctcgagattacagggatgaagagtcctccagtccagccaggcatggggagcagatgccatctttctatccagctgaaaaccttgataatggactaattgaccaaagagtattgaaacagagaagaaatgtgaaacaaattctagcaagaagcaaagcattacagtggacgaagtcctatgttttaccagagtttccctatgatgtcaaatgcatgttagcagagcagaagtgcccggatcacagcatgaggataaggatcattgagtttctccaggccgacatgactaagtatctggaaggctcactgtaccccagcacccagcagtacaatgacgtggttaatgccctgctgcaggcccaccctttcctggatgaggatggctgtggcttctttttatggaaacgagccctcaaagatcgctttaaatatgttcgaagacccatagaagatgatgagcaagtgattagaaataagtgtaaatttggacaccgaagaggccagacaaggaaatctcttgctgatataagatttgatgaaattaaacttgtccagataaaagaagaagctgtttgttttgattctgagctagatgaacatattaagtggttccagcaagaatacgtgaaaacagaaaaggactggagagaaattgacaagagaatgagccaaactttggaaataagaagaaagatgattggcagccgaacacctctgaaggacattcttaaactgtttcctttcttgaagtgcccttatcagatgttcagagaattccaacttcttacaagaacagatatttataagaaaacaaggcacattttggaatcctattcagaaaatatactgacttctttttcagtggtggacaatccaatcaatattgtattgcaagaaaaaatgaaacattacacagatgaagacatgttgaaatacatgaagatgacagccacatgtttactcctcccagatgtttttggggatgatcccagcctttttgtcatcatgaatgaacaggtgcaagtgtccacacctgtgttggaagttaaaaaccctttcaacatggaggtctgcgaattttctttatatttagaaagggagaggctcacaaaggtggacgactgtgttacagccttggctgcgctagtagctgcctttcatgtatttaggattgagtgtccaagaagactgtcccaaactttcaacttcctagaaacgctgattttcgatatgcacagtccttattttccttctttgaaagaaaaggaaaacgaagtaggatttcagcacccactcacttaatagcatgccaaatattgtactggaatttacctctgggaaaactgaagcttcataagaaattgttttgatttagggttgtggtagaggtaggtatgagaaaatcatcttgtatttatagatgctaatgaatttcaatgctttctatctttacacttagatattaagttctttgtgaaattctgtaataaaattctacttcattaaa

SEQ ID NO: 872 - DNA, 4768 bp, Homo Sapiens
  NM_001017392
ggcggcttgcgcctgcgcggcgcggcgctgcggagaccgttggttcatttgcatgtccccgcctcgcgcggcggcggcggcgggtgaggagcctgaggcggcggcgggggtggctccgcgcgcggtggtctcgggggcaaaataacatggcagccagacgaattacacaggagacttttgatgctgtattacaagaaaaagccaaacgatatcacatggatgccagtggtgaggctgtaagcgaaactcttcagtttaaagctcaagatctcttaagggcagtcccaagatccagagcagagatgtatgatgacgtccacagcgatggcagatactccctcagtggatctgtagctcactctagagatgccggaagagaaggcctgagaagtgacgtatttccagggccttccttcagatcaagcaacccttccatcagtgatgacagctactttcgcaaagaatgtggccgggatctggaattttctcactctgattctcgggaccaggtcattggccaccggaaattggggcatttccgttctcaggactggaaatttgcgctccgtggttcttgggaacaagactttggccatccagtttctcaagagtcctcttggtcacaggagtatagttttggtccctctgcagttttgggggactttggatcttccaggctgattgagaaagagtgtttggagaaggagagtcgggattatgacgtggaccatcctggggaggctgactctgtgcttaggggcggcagtcaagtccaggccagaggtcgagctctaaacatcgttgaccaggaaggttccctcctaggaaagggggagactcagggcctgctcacagctaaggggggtgttgggaaacttgtcacattgagaaatgtgagcacaaaaaaaatacccaccgtgaatcgtattactcccaaaactcagggcactaaccaaatccagaaaaacactccaagtcctgatgtgaccctggggacaaacccagggacagaagatatccagttccccattcagaagatccctctggggctggatctgaagaatcttcggctccccagaagaaagatgagctttgacatcatagataagtctgatgttttttcaagatttgggatagaaataatcaaatgggcaggattccacaccataaaagatgatattaaattttcccaacttttccagactctctttgaacttgaaacagaaacctgtgctaaaatgcttgcctcattcaaatgttccttaaaaccagagcacagagatttttgcttttttactatcaaatttttaaagcactctgctttgaaaacacccagagttgataatgagtttttaaacatgcttttagacaaaggtgctgtgaagaccaaaaattgcttttttgaaatcataaagccttttgacaagtacataatgagacttcaagaccggcttctgaagagtgtcacacctttgcttatggcctgcaatgcctacgagctaagtgtcaagatgaagaccctcagtaaccccctggacttggctcttgccctagaaaccaccaactctctctgccggaagtctttggcccttttgggacagacattttccttggcctcttctttccggcaggagaaaatcttagaagctgtcggcctgcaagatatagctccctcacctgctgcgtttccaaacttcgaagactccactttgtttgggcgagagtacatagaccacctgaaggcctggctagtcagcagcggatgtcccctccaggttaagaaagccgaaccagagccgatgcgagaggaggagaaaatgattcctcctacgaaacctgaaattcaggccaaggctccaagtagtctgagtgatgctgtcccccagcgagcagatcacagggtagtgggcaccatcgaccagcttgtgaaacgtgtcatcgaaggcagcctgtctcccaaagagagaactcttctcaaagaggaccctgcttactggtttttgtctgatgaaaatagtctggagtataaatattacaagctgaagttggcagaaatgcagcggatgagcgagaacttgcgaggagccgaccagaagccgacctcagcagactgtgcagtgagggccatgctgtactcccgggctgtccgcaacctcaagaagaaactccttccgtggcagcggcgggggctcctccgtgctcaagggctccggggctggaaggcgaggagagcgaccaccgggacccagaccctcctatcctcaggcaccaggctgaaacaccacggccggcaggctccaggcctctcacaggcaaaaccatccctgccagacagaaatgatgctgccaaggactgcccgccagacccagttggaccttctcctcaggaccccagcttagaagcctcaggcccatcccccaagccagcaggagtggacatctctgaagcacctcagacctcttctccctgcccatctgctgacattgacatgaagacaatggagactgcagagaaactggctagatttgttgctcaggtgggaccagagatcgaacaattcagcatagaaaacagcaccgataaccctgacctgtggtttctacatgaccaaaatagttctgctttcaaattctatcgaaagaaagtgtttgaactatgtccatcaatttgtttcacgtcatctccgcacaaccttcacactggtggtggtgacaccacgggttctcaggagagccccgtggacctcatggaaggggaagcagagtttgaagacgagccccctccgcgggaggctgagctggagagcccagaggtgatgcctgaggaggaggacgaggacgatgaggatgggggagaggaggcccccgctcctggaggggcgggcaagtctgagggcagcacccctgccgacggccttcccggcgaggctgccgaggacgacctggctggagcacctgccttgtcacaggcctcctcaggtacctgcttccctcggaagaggatcagcagcaagtcattgaaggttggcatgattccagctcccaagagagtgtgtctcatccaggagccaaaagtccatgaaccagttcgaattgcctatgacaggcctcggggtcgtcccatgtccaaaaagaagaaacccaaggacttggacttcgcccagcagaagctgaccgataagaacctgggcttccagatgctgcagaagatgggctggaaggagggccatggcctgggctccctcggaaagggcatcagggagccggtcagcgtgggaaccccctcggaaggggaagggttgggtgctgacgggcaggagcacaaagaagacacattcgatgtgttccgacagaggatgatgcagatgtacagacacaagcgggccaacaaatagatcaaaaccactgatgtgaaagataagccttgaagcagcaattgcccttaaaacatcatccctgccctggatcggcctggagccagtgcccaagtacggtttggtgtgtacatgaaaacaaacgtctctgcagtctctggggcggaggtttcgctggcttttctttctctcaaagaaaaaaacatgcaccattttcaatgtgcttttgcctctcctctctgttcacatgcttttagcagcaagtcccctccaaatctgtcttggttccccttcagaaggtggcgctgcccccgaaaggcacctcagcctgtgagtgctgaggaaccagctcctctggctgattttccagttggactggccattgctctccagaagtgctctgttagcaaacgtgatgtggaaacgatcacagatggtgttttctcgttgttcgccagaatttatacgggggagacaaattcccggtaattaccaagtctgcactcgggtaccaaagctctgaagctctctgaacagttgccatacttgagttgatgaatgtgttattcatggtgtctcatctcatcaatgcatcttgagagacttaatgaaattttagcaacagtatagaatagctctatcgggtggggagtaatcattaaacagatgaaatcggccccagatttacatgtctctttagaatccacagtgtaagcaaactacagttacaaagggatgggggttgtaaaccctctgagactctgcacttttcgcacgtatggcatcgtcaagtgctgtcttattacagcctttgtaaggagaggcaggctcctcctggggtgggctctgcagctgctctatttccaggcatgtgatcgcccccgctctccagattccccagcactctgctgcgtgtaactccactcaattctccactcatccttccttgtgaagcaggatcgttgaagttttaagtatgggcaaaaatctggaaaacttaggatccctctgacaccccaggattaggggacacagcagtggctagggcatcagccacagaactgagcgggaaatgccacttgtattggctgtaaagaaatcctggctttgggccaggcacagtggctcaagcctgtaatcccagcactttaggaggttgaggcggatggatcacctgaggtcaggagtttgagaccagcctggccaacatggtgtaaccccgtctctactaaaaatacaaaaaaattagccaggcgtggtagcgggcacctgtaatcccagctactcaggaggctgaggcaggagaatcacttgaaccggggaggcagaggttgcagtgagctgagatcatgccactccactccagcctgggcgacagagcaagactccatctc

SEQ ID NO: 873 - DNA, 3041 bp, Homo Sapiens
  NM_001017404
atgcgcttggagggagagggccgctcagcgagggcgggacagaacctctcccgggctgggagtgcacggcgcggtgcgcccagggacctcagcatgaacaacctcacagagcttcagcctggcctcttccaccacctgcgcttcttggaggagctgcgtctctctgggaaccatctctcacacatcccaggacaagcattctctggtctctacagcctgaaaatcctgatgctgcagaacaatcagctgggaggaatccccgcagaggcgctgtgggagctgccgagcctgcagtcgctagacctgaattataacaagctgcaggagttccctgtggccatccggaccctgggcagactgcaggaactggggttccataacaacaacatcaaggccatcccagaaaaggccttcatggggaaccctctgctacagacgatacacttttatgataacccaatccagtttgtgggaagatcggcattccagtacctgcctaaactccacacactatctctgaatggtgccatggacatccaggagtttccagatctcaaaggcaccaccagcctggagatcctgaccctgacccgcgcaggcatccggctgctcccatcggggatgtgccaacagctgcccaggctccgagtcctggaactgtctcacaatcaaattgaggagctgcccagcctgcacaggtgtcagaaattggaggaaatcggcctccaacacaaccgcatctgggaaattggagctgacaccttcagccagctgagctccctgcaagccctggatcttagctggaacgccatccggtccatccaccccgaggccttctccaccctgcactccctggtcaagctggacctgacagacaaccagctgaccacactgcccctggctggacttgggggcttgatgcatctgaagctcaaagggaaccttgctctctcccaggccttctccaaggacagtttcccaaaactgaggatcctggaggtgccttatgcctaccagtgctgtccctatgggatgtgtgccagcttcttcaaggcctctgggcagtgggaggctgaagaccttcaccttgatgatgaggagtcttcaaaaaggcccctgggcctccttgccagacaagcagagaaccactatgaccaggacctggatgagctccagctggagatggaggactcaaagccacaccccagtgtccagtgtagccctactccaggccccttcaagccctgtgagtacctctttgaaagctggggcatccgcctggccgtgtgggccatcgtgttgctctccgtgctctgcaatggactggtgctgctgaccgtgttcgctggcgggcctgtccccctgcccccggtcaagtttgtggtaggtgcgattgcaggcgccaacaccttgactggcatttcctgtggccttctagcctcagtcgatgccctgacctttggtcagttctctgagtacggagcccgctgggagacggggctaggctgccgggccactggcttcctggcagtacttgggtcggaggcatcggtgctgctgctcactctggccgcagtgcagtgcagcgtctccgtctcctgtgtccgggcctatgggaagtccccctccctgggcagcgttcgagcaggggtcctaggctgcctggcactggcagggctggccgccgcgctgcccctggcctcagtgggagaatacggggcctccccactctgcctgccctacgcgccacctgagggtcagccagcagccctgggcttcaccgtggccctggtgatgatgaactccttctgtttcctggtcgtggccggtgcctacatcaaactgtactgtgacctgccgcggggcgactttgaggccgtgtgggactgcgccatggtgaggcacgtggcctggctcatcttcgcagacgggctcctctactgtcccgtggccttcctcagctttgcctccatgctgggcctcttccctgtcacgcccgaggccgtcaagtctgtcctgctggtggtgctgcccctgcctgcctgcctcaacccactgctgtacctgctcttcaacccccacttccgggatgaccttcggcggcttcggccccgcgcaggggactcagggcccctagcctatgctgcggccggggagctggagaagagctcctgtgattctacccaggccctggtagccttctctgatgtggatctcattctggaagcttctgaagctgggcggccccctgggctggagacctatggcttcccctcagtgaccctcatctcctgtcagcagccaggggcccccaggctggagggcagccattgtgtagagccagaggggaaccactttgggaacccccaaccctccatggatggagaactgctgctgagggcagagggatctacgccagcaggtggaggcttgtcagggggtggcggctttcagccctctggcttggcctttgcttcacacgtgtaaatatccctccccattcttctcttcccctctcttccctttcctctctccccctcggtgaatgatggctgcttctaaaacaaatacaaccaaaactcagcagtgtgatctatagcaggatggcccagtccctggctccactgatcacctctctcctgtgaccatcaccaacgggtgcctcttggcctggctttcccttggccttcctcagcttcaccttgatactgggcctcttccttgtcatgtctgaagctgtggaccagagacctggacttttgtctgcttaagggaaatgagggaagtaaagacagtgaaggggtggagggttgatcagggcacagtggacagggagacctcacagagaaaggcctggaaggtgatttcccgtgtgactcatggataggatacaaaatgtgttccatgtaccattaatcttgacatatgccatgcataaagacttcctattaaaataagctttggaagagattacacatgatgtctttttcttagagattcacagtgcatgttagtgtaataaagagataagtcctacagta

SEQ ID NO: 874 - DNA, 2035 bp, Homo Sapiens
  NM_001017434
cgcggccgcgacgcccgacgccaacgcaggcgcagcgctccgattcggcgcggctcatggtccggttcgggctcgcgagtctccgtctggggtagggcaggttcttagactctgtgagtaaagacagcttcatcttcccagttcatcatggcttcaacatccagataacaacgaacttgatgcaagtgataggtttgccaaggtcagacctctcatcatccggatgaactgcaatttccagaagcatgcacccttggaagagttctacagctttggcgagtctatgtgtgagtactttgggcaccgggggtccaagcagctgcacagggggaagcctgtgcgacttggctacaagatttggtgtgggacaaccagcagaggctacttggtgtggtttgagccctcacagggcacactgtttaccaagccagacaggagcttggatctaggaggcagtatggtaataaaatttgtggatgcgcttcaggagcgtggttttctgccatatcacatattttttgacaaggttttcacaagtgttaaactgatgtccattttgaggaaaaagggggtgaaagccacaggaactgttcgtgagtacaggactgagcgatgtcccctaaaagaccccaaagaactgaaaaaaatgaagaggggttcatttgattacaaagtcgatgagagtgaggagatcatcgtgtgccgctggcacgatagcagcgtggtcaacatttgctccaatgctgtgggcatagagccagtgaggctgaccagtcgtcactctggagcagctaaaacgcggactcaggtccaccagccatcactggtgaagctgtatcaggagaaggtgggtggcgttggtaggatggatcagaatattgccaagtacaaggtgaagatccgaggcatgaagtggtactcaagctttattggctatgtcattgatgctgccctcaacaatgcatggcagctgcatagaatctgctgccaagatgcccaggtggacctccttgccttccggagatacattgcctgtgtgtatctggagagcaatgctgacacaacatctcaagggaggcgaagcaggcggttggagactgagagccgcttcgatatgattgggcactggattatccatcaggacaagaggacccggtgtgccctctgccactcacagaccaacacccggtgtgagaagtgccagaagggtgtccatgccaaatgcttcagggagtaccacatccggtgacatcatgagacatgcttctttggtttataatgagatgtttacagttaaatacagatggcagttgagcacttctgttttgtgttggaaaaaagacctgaatttctaatgacttgattttctattttctccctacccacaatacagttatcttttttattgtgttgtgttatgcctacatgtgatataaattaatatttatattcatttatatttatatttttgaacttatttatttaaagttatggatcactttttattcaaataaaagttgtgctttggggtatatttgaatcctagcaagaataatcaaaggaaaacttgcaagaacagtaagaagactttaccattgcatgccatggtttataatctaagataggcaatagtgtataaatatcatgtaaatgtgatggatttcttaatcatatttatttcatattaatccaagtttatcaaacttttgagggataatctgccttgtatttagtcagagggctagaggtgcagatttcatattttcttaatgaaaatattttcctaatacacatatatcaatgtgagattcatttttgtaaaaaaaattatttttttaattttgtgggtacatagtaggagtgtatttttatgggttacatgagatattctgatacaaacatgcaatgtataaaaatcacatcagggtaaatggggtatccatcttgtcaaacacttgtcctttgtgtttcaaacaatccaattatactgttagttattttaaaatgtgcaattaaattatttttaactataaaa

SEQ ID NO: 875 - DNA, 3006 bp, Homo Sapiens
  NM_001017917
gggggacagcacttctttcagtacattttcctgttagactcggggtattagagacccaaagatacccaaggaggagtgagagcgtccctgccttcgaggagcagacagggcaccgcgaggcgtttgcctcagcatggagggcggggccgcggcagccacccccacagcactgccttactacgtggccttctcccagctgctgggcctgaccttggtggccatgaccggcgcgtggctcgggctgtaccgaggcggcattgcctgggagagcgacctgcagttcaacgcgcaccccctctgcatggtcataggcctgatcttcctgcagggaaatgccctgctggtttaccgtgtcttcaggaacgaagctaaacgcaccaccaaggtcctgcacgggctgctgcacatctttgcgctcgtcatcgccctggttggcttggtggcggtgttcgactaccacaggaagaagggctacgctgacctgtacagcctacacagctggtgcgggatccttgtctttgtcctgtactttgtgcagtggctggtgggcttcagcttcttcctgttccccggagcttcattctccctgcggagccgctaccgcccacagcacatcttctttggtgctaccatcttcctcctttccgtgggcaccgccctgctgggcctgaaggaggcactgctgttcaacctcgggggcaagtatagcgcatttgagcccgagggtgtcctggccaacgtgctgggcctgctgctggcctgcttcggtggggcggtgctctacatcttgacccgggccgactggaagcggccttcccaggcggaagagcaggccctctccatggacttcaagacgctgacggagggagatagccccggctcccagtgatgcgcccggccggccctgggggttcgcggggtgtcttcttgcctgcccctgctgaggcgtcttcaggactgcaggctccggagagtggctctggcagcaggcgggcgcgtgggtgcagctgcatctgtttgagtgctgctttctggggtcaggtctccgcctcctctgcttctcctttctccgctgctatagaccagttcattgtgtgtggctcccgtgtctctgttgcccccttcagtgcagaaggctttgggtaggacttcgggtgttcggtcctggtcgcagagcacagatctttaaagaagcgagagaggaggccccaccctcctggcagcagatgcctggggcaaggccaggggaaactgggggggcctcagggacaggcctggaaaggccacgatggctgctgaattcaaacaaggagtccctccagcctgaataacacgtggcacaaatgggcccggcctttggcagaggagcaagtgatatgatgtgtaaagtatgttggtggtgaaagcaaggttccccaggagaggggagggactggcccctgggaagctctgagatgaggctgtggcccagctgtagtcctgaccttcctcttctttaaccctttagccctaggatggctttggtgggagaggggatagaagcccatgacttcagacagactttctcttggcagatgcaggcgggcctcctcccaggctgctccagacatgggggttggggatggggggcaccttgcagccccttcctgctggggctccctccttgtagcaccccccttgcggctcagctctggtttcctctcccaggctcacccaggctctgctcaggctgggaggcagagggcacaaaccttataattttttaaatgaaaaaccgctgctgctggctgtggctagagccccctggggctgctggagctgctgcctctgttctggaggacgagccttctccttatctgctgcccatctttccaggaagtcaggatggagtcagaacaactacagtcatcccccgtggtgtctgcacatcactccagccccataaagagtgtcatgttagctgagtcaccatttggcttcggcctggaaatagtgtgattagaacactgatcgtgtgcgaggccaggagatcaagaccatcctgactaacaaacacagtgaaaccccgtctctactaaaaatacaaaaaaattagccaggcgtggtggtgggcgcctgtagtcccagctacttgggaggctgaggcaggagaatggtgtgaacccgggagatggcgcttgcagtgagctgagattgcactccagcctgggcgacaggctcaaaaaagaaaaaaaaaagaacaccgatcatgtgcttcttggatctggtgactgttctctccctgttttcctttctttttgggtgtttgaggagcatggcttagcttgagacacacacagacactgtgtacttcagtgaagggcttaatatacagtttccaaacctgacgactcttcttcttgtaatggctgcccttttcctacctgaggccgtcttagagaaaggggccagtctcctctaatgctcagatttcccatagttggcttttgctgtgtctcctgcctcaggcagtgtcatttctgggagcaggtggttgtagtccaggcccctccccagcagggtctgcccaggctccttcgagcccctttccccgcctcctctcagcctgtccggatgacagtgttcgcctcctgtttagactgtacactcttcaggggtaggggtgccgtcagttcttcaatcagctggcacacacttgtatagtgaaatgtttacatgtgggaaaactccgccttagacaaactaccaaagtacaatcgtgtctctctctagccggaatgctacagagagaaatggaaccttagatttgcaacaaaagtctgtaaactggtctgtttgccaaagtgaacactggatgactaaggagctgaagaaggcccccagaagcggatttgtggtgggttattttattttgcctgtggccaatcttctgtgaaatacaatgtgctgttggtgcaacagatgattcaataaatgtctacagcagaaaaaaaaaaaaaaaaaaaa

SEQ ID NO: 876 - DNA, 2690 bp, Homo Sapiens
  NM_001017919
taaaagctgcttcctgttggggcatgagtccggcgcgtgtcgggttttgagctgccgcggtcccgggactgagataaggcagctccagcccctggaaggccagagacttgccagtgtcccactagcgggctcttcgcaagaatccccccgggcccgccgcagccaggcggcggccggcagagggcgctgctcgggcatggcggaggagcggccgggggcctggttcggcttcggtttctgcggcttcgggcaggagctgggctccggacgcgggcgccaggtgcacagccccagtccgctgcgggcgggcgtcgacatctgccgcgtgagcgcgagctggagctacaccgctttcgtgacccgtggaggccgcttggagctgtcgggctcagccagcggcgcggcgggccgctgcaaggacgcgtgggcctcggaggggctcctcgcggtgctgcgcgccgggccggggccggaggcgttactgcaggtctgggcggccgaatcggcgctgcgtggggagccattgtgggcccagaatgtggtgcccgaggccgaaggggaagacgatccggccggtgaggcccaggctgggaggctacccctgctgccctgcgcccgtgcctacgtgagcccgcgggcgcccttctaccggcctctggctccggagctgcgggcacgccagctggagctgggcgccgagcacgcgttgctgctggacgctgctggccaggtgttctcctggggcgggggcaggcatggacagctgggccatgggaccctggaggcagagctggagccacggctgttggaggcgttgcagggcctagtcatggctgaggtggccgcggggggctggcattctgtgtgtgtgagtgagactggggatatttatatctggggctggaatgaatcagggcagctggccctgcccaccaggaacctggcagaggatggagagactgtcgcaagggaagccacagaactgaatgaagatggttctcaggtgaagagaacgggtggggctgaggatggagcccctgcccccttcatagctgtccagcccttcccggcattactggatctccccatgggctcagatgcagtcaaggccagctgtggatcccggcacacagctgtggtgacacgaacaggggagctctacacctggggctggggtaaatatggacagctgggccacgaggacaccaccagcttggatcggcctcgccgtgtggaatactttgtagataagcaactccaagtaaaggctgtcacctgtgggccgtggaacacctacgtgtatgctgtggagaaagggaagagctgacatgtgtacgtatatgtatatgcaacacctgtgagacccccattcaggtcaaggaaaaccattgcctgcaccccaagggccccatatttgcccctccccatcacagtcctgcccttcaccctcaagcacggtcctaaacttgtctgcactttagaaacacctggagagcattgaaaactctgctgcctaaggtcagcatcaatcaaaacaatgaaatcaatgaaacaatgaaaccagagcttctaggtgtgtggcctggatagtggtagattcaaagctccacccacctcatcccaggtacatttgatgtgcagctgagattggggcacattccaggtcatcgtcttctgtcagtcatttccctgctttcgtttgaattttaccattcttgtatgcagccttatacgacatagttgtgtttgcttttgagtgttagataaatggaatcctgtgtatgtgcttttgtgtcgtttttgtcactcagcattgtataatccatccttgttgggtcctggagttcatttttaatgctatatggtgttctgttgtatgaataatacctcaagtgatacagccttgttgatggtcatttttattgtttctgattttggtcattccacataattctttgtgcagtcttctgcacatgtgcacaagttcctttgcagaacattgagttgaattgctaagtcaggagatacctttaattttactagataactgttgcccccagcagggtggggtctactgtggctaaaatgtcaggtagatgcacactggttttaattggcatttccctggatactgatgaggttgagtagcttttcatttgttttggatggctgggcatggtggctcacacctgtagtcccagcactttgggaggctaagcagggagattgcttgaggcgaagagttcatatgtttattggccacttggagtttttctgttgtcaagtgcctgttcaagttttctggccttttaaaatgttctgtattttccttagtgatttttcttttggatatttcagatacaagtcttttgagagttagtattcagagtatcttctgctacaatgtagtttgtttcagtctctcttggtattaccaattttaatacttaggtgatgcttactccatgccaggtaaggctcaaagtgctttacaagtatcaacttattttgataaaataagcttatcagtagttttctttatagttaaattctatttgtgcatgtgtgtgtctgtggtttagcaaatgtttcccacccatggggtcttttttattgtggtaaaatatactgaacataaaatttatgttcaataaaaaacaaaaattgtttttaaccattttaaaaaaaaa

SEQ ID NO: 877 - DNA, 2906 bp, Homo Sapiens
  NM_001017923
aagaagcgacgtgtcccactgtcctggctccgtgggtccagtgagattgggcctgggcgctggagctgctgtggctcccgccgcggcggctgccatggaggccatgccagagcccagaactcacgccgggggaggccgagacagccggcggtactcatagatgaggcagcggcggcggcggcggcggcggcagcccgggctctccatgagcaggcggcggcggcgacgggtgcggcggcaccggcagttttcggtccccagggaggatgaagacactgtttgaagagatcaaagcatcaattaaaaataactataaccaagatcgatcattttgtaggcctgttcttccttgggggggtgtttttactatcaaagctggccgcaaagcagtatcctgtacaccactctatgttgaaataagactgaaaaatacctgcaccatagatggattcttgatgttattatatgtcattcttaatgaaaatgaaaacttccctagggaactctctcttcattttggtagagagtttgtagactgttttctttacttaatggacacctacagttttacaactgtgaagctactttggatttgggacaagatggaaaaacagcaatacaaatctgaagtccataaagcttcattaataattgatttgtttgggaatgagcatgataattttacaaaaaatcttgaaaatctcatgtctaccattcaagagagttactgttccaactggcgatgcccaactcgagtgcaggaggatcagcagcgcacaattaatataaatcctccccaagaaattccacatggaaacttgataagactggctgtgaatgagttattctgttccaagattgaactgtgtgaagagcatgggtgtggtggcttaagagaattttcccaacgaattttctgccatggggcacccccttttgttgtcttaaatatgcaacattggaaatctgaagatctggcgtatgtaccctattacttggatttgtctgatcacaagtatttgttggaaggtgccacattatttaacaaagaggaacatcattattctgcagctttccagattggtggacattggatgcactatgatgggctcagaaatgtgaatttaattttgttaaataaacccccagagtttctcctcttgtcatcattggtttatattcgagcaacagagaaataaatatagattgatgctaaaagttgttttccctcctgcccatgctctcccagatgaagggcttttattttgtgtatacttggtatccaagaaaatagttcaactatactagtttcagaagtgtattttcagtgtttaaccccaggtaaatgttttatatagaggatctgtgcaaaaatgtttgtaatttttttatatttcctgagttatttttatatgagcatattttatgttggaataaaatatatcttgtggcctttgtattttttatttatatgtacctcaaagatttttacaattctgtctttgaattcaagaaatactttgtcatctgaattctaaatttttctttttggatattcgagtaaaacctaggtaaaagtattttaagtttatataatttaacagttcaaaatatatctgactgtatttctttgccctacctcactataatccaaagtgcactatttgatctagtatggatttgaatgtacaatttatcgatggcttagtttattagttcgatttgcctagtatccctgcagcaattttttaaaatgtctgagaaatttttcagagcttaaactatttctttataatggcaaattacttttaactacttcctaaagtattataaacctgccagtggattttaagtgatagctaagcttccaagcttaattcacgttattacaaataaattatataactatcttaaatgtttatcttataattaaatgtaatttgaaatgctctaatgtattttgcagataaaacaactataaacaatattaggcaactggatgtttactagtgtcggactagcaatagaaatgcactttaaatatatatttaaggggaaatgcgtgcctggaaatacttcttttcctagtgaagttttatattgacacagagaaaagaatacttaaaattttgagtgatgtctactggcttccttgtaagtagtgattgatagcatgcggctttgacttgcaatacaaatcattacgattttatagttatcagaacattacgtttctttataaagaccctaaggtcactcttctttttgcaacttaagggaaaaaatattctcaagggaaaatactttttgaaatttatcaccattttagtgtttacatttcaataaatagttcacttcaggtttgggattgagattagttgcaatatatttagaagctcctacatgacagcacagatcactgccatctgctgaactgctaaagtgcttggtgccatgttgagaaaacttacccaagaatggataaatatgggtgaaacattactgagaatgcctcacgttagcaaatactatgaaaattcttgtttatatatcaaactgatttattttacaaaaaaaaaaaattcaccccaagatttatttagtttcccaagtgtatctgattaggatttaatttagagtaaacttttctggggacacctgattgcatgaactgaagtatacaataacacaaatattacagtaaacataaatggtgtcattaacaaaattattcctaatgcagatttattctttcaggaaatgcactttatttggaatactagtttatcatgaaacaatgacttacctacctcacagggttgttgtgaggattaagatgtttgttaaaatcttgactaccttgaacatgctaataaaaaaacatttttctacctcttttatttgca

SEQ ID NO: 878 - DNA, 950 bp, Homo Sapiens
  NM_001017927
acggagaccgaagaacggaggtccttatgtttcttttctttccttaaatcttgcccggcctgaagaggccggaagttgcatctctggacaagtaaactctgagacctgggaatggcgggcgggacccgctcctcccttggggtctagaggagacccccggagatggtccctgatgagcagcgtgatggtggaaagctggactggtctcccgaaaggcgaagccgaggcttcttcctctgaacttttggcacgttctttgacttgcttgtggccgtagtgtcaggcctgtattgcacatttatgtctgtggtgcatttctccatctgggccagctgaggggcccacggacatagggcacccacaataggcgtgtgtctgctgtgtgtttgtgttcggccgtcctgcttctctgtttccacacgtacacatgcccctgtgttactttggttcatcttctgtactctgtcagttttctgctggtcagaacatctgtgactgtgacagagctgtccaggattgcagtggataggaatttcttcacatggctcctggagaagtgaccatcacagttcgcctcatccgttcctttgaacatcgcaatttcaaacctgtagtgtatcacggagtgaatttggaccaaactgtaaaggaatttatcgtatttctaaagcaagatatccctttaaggaccaacctgccaccaccattcagaaattataaatatgatgcactaaagattattcatcaagcacataaatcaaagacaaatgaacttgtgttgagtttggaagatgacgaaagactcctgctgaaagaagacagcactctgaaagcagctggaatcgccagtgaaactgaaattgcattcttctgtgaagaagattataagaactacaaagctaatcccatttcatcctggtgaaaacatctcgagggcttcctttttgcat

SEQ ID NO: 879 - DNA, 718 bp, Homo Sapiens
  NM_001017928
aatatggcggcgcccagtggcggtgtgaactgtgaggagttcgccgagttccaggaattactcaaggtgatgaggacaattgatgacagaatagtacatgaattaaacactacggttccaacagcttcctttgcagggaaaattgatgccagccaaacctgtaaacaactttatgagtctttgatggcagctcatgccagtagagacagagtcataaaaaactgtatagcccagacttcagcagtagtaaaaaacctccgagaagagagagaaaagaatttggacgatttaacgttattaaaacaacttagaaaagagcagacaaagttgaaatggatgcagtcagaactgaatgttgaagaagtggtaaatgacaggagctggaaggtgtttaatgaacgctgccgaattcacttcaagcctccaaagaatgaataaagagagattcttttttttttttttttttttttttttttaaggactgggtcatctcataagagctaagcatgacagatatcaacagggcgggctttctaggatgatttctgagccaacagtccaagaccttttgttgatttcagccccacttagccaagacctcaagtataaataattctgataattatggagaaatcaactgctattttatactgattctgtaaaaaaaaaaaaaaaaaatttttgtaactattaaaataattttctgactcagtgtaca

SEQ ID NO: 880 - DNA, 1350 bp, Homo Sapiens
  NM_001017964
actcccctgggagcgcgagcggtggacccaggcggccatgtcccgccctcgcatgcgcctggtggtcaccgcggacgactttggttactgcccgcgacgcgatgagggtatcgtggaggcctttctggccggggctgtgaccagcgtgtccctgctggtcaacggtgcggccacggagagcgcggcggagctggcccgcaggcacagcatccccacgggcctccacgccaacctgtccgagggccgccccgtgggtccggcccgccgtggcgcctcatcgctgctcggcccggaaggcttcttccttggcaagatgggattccgggaggcggtggcggccggagacgtggatttgcctcaggtgcgggaggagctcgaggcccaactaagctgcttccgggagctgctgggcagggcccccacgcacgcggacgggcaccagcacgtgcacgtgctcccaggcgtgtgccaggtgttcgccgaggcgctgcaggcctatggggtgcgctttacgcgactgccgctggagcgcggtgtgggtggctgcacttggctggaggcccccgcgcgtgccttcgcctgcgccgtggagcgcgacgcccgggccgccgtgggccccttctcccgccacggcctgcggtggacagacgccttcgtgggcctgagcacttgcggccggcacatgtccgctcaccgcgtgtccggggccctggcgcgggtcctggaaggtaccctagcgggccacaccctgacagccgagctgatggcgcaccccggctaccccagtgtgcctcccaccggcggctgcggtgaaggccccgacgctttctcttgctcttgggagcggctgcatgagctgcgcgtcctcaccgcgcccacgctgcgggcccagcttgcccaggatggcgtgcagctttgcgccctcgacgacctggactccaagaggccaggggaggaggtcccctgtgagcccactctggaacccttcctggaaccctccctactctgaccccctacagacaaccaagcactaatccccttagtaccaagaaaggggagccaggatttagtcctggcccagcccagagctgggacctggagcacgatctgttgacttccctgggtaggacactgccacctctgggctcaggtcctcatgcctccaaatggcatctagagtttgagcagccttcttggctgcaggcaggcctagcctgtggcagcgggctagggcccgcagagcatttggtgcccctccatgttgcaatgcaaacaccttcaccactggggcagtggggagagatggctatattaataaaataacgtgtgtctttcaaaaaaaaaaaaaaa

SEQ ID NO: 881 - DNA, 1409 bp, Homo Sapiens
  NM_001017965
actcccctgggagcgcgagcggtggacccaggcggccatgtcccgccctcgcatgcgcctggtggtcaccgcggacgactttggttactgcccgcgacgcgatgagggtatcgtggaggcctttctggccggggctgtgaccagcgtgtccctgctggtcaacggtgcggccacggagagcgcggcggagctggcccgcaggcacagcatccccacgggcctccacgccaacctgtccgagggccgccccgtgggtccggcccgccgtggcgcctcatcgctgctcggcccggaaggcttcttccttggcaagatgggattccgggaggcggtggcggccggagacgtggatttgcctcaggtgcggagccgcagctacaggaggatgctcgcgaggacccccagagctccgcccggagggtgcgggaggagctcgaggcccaactaagctgcttccgggagctgctgggcagggcccccacgcacgcggacgggcaccagcacgtgcacgtgctcccaggcgtgtgccaggtgttcgccgaggcgctgcaggcctatggggtgcgctttacgcgactgccgctggagcgcggtgtgggtggctgcacttggctggaggcccccgcgcgtgccttcgcctgcgccgtggagcgcgacgcccgggccgccgtgggccccttctcccgccacggcctgcggtggacagacgccttcgtgggcctgagcacttgcggccggcacatgtccgctcaccgcgtgtccggggccctggcgcgggtcctggaaggtaccctagcgggccacaccctgacagccgagctgatggcgcaccccggctaccccagtgtgcctcccaccggcggctgcggtgaaggccccgacgctttctcttgctcttgggagcggctgcatgagctgcgcgtcctcaccgcgcccacgctgcgggcccagcttgcccaggatggcgtgcagctttgcgccctcgacgacctggactccaagaggccaggggaggaggtcccctgtgagcccactctggaacccttcctggaaccctccctactctgaccccctacagacaaccaagcactaatccccttagtaccaagaaaggggagccaggatttagtcctggcccagcccagagctgggacctggagcacgatctgttgacttccctgggtaggacactgccacctctgggctcaggtcctcatgcctccaaatggcatctagagtttgagcagccttcttggctgcaggcaggcctagcctgtggcagcgggctagggcccgcagagcatttggtgcccctccatgttgcaatgcaaacaccttcaccactggggcagtggggagagatggctatattaataaaataacgtgtgtctttcaaaaaaaaaaaaaaa

SEQ ID NO: 882 - DNA, 3360 bp, Homo Sapiens
  NM_001017977
atctcgcgagaaagggttggcggggagggtatccaggacgaggagagggaggagtcgccatcgcctccgcctccgcctcctcctgttggaggggggctgagggaggagactgttgctgatctttggatgttctggttagtctaagaaggagagtatgaggcgagctccggcccgggtgcggccgggcttcaggggcccaggcgccgctgctgccaccgccatctaacgctgcgccctggaggcccggcgcgcggatggtgccggtgcggctcgggtgttgaaacgggtgtcccctccccctcctcccctcccccacgcggtggtctcccctcccacccggctcaggcagagccatgtctcggggtggctcctacccacacctgttgtgggacgtgaggaaaaggtccctcgggctggaggacccgtcccggctgcggagtcgctacctgggaagaagagaatttatccaaagattaaaacttgaagcaacccttaatgtgcatgatggttgtgttaatacaatctgttggaatgacactggagaatatattttatctggctcagatgacaccaaattagtaattagtaatccttacagcagaaaggttttgacaacaattcgttcagggcaccgagcaaacatatttagtgcaaagttcttaccttgtacaaatgataaacagattgtatcctgctctggagatggagtaatattttataccaacgttgagcaagatgcagaaaccaacagacaatgccaatttacgtgtcattatggaactacttatgagattatgactgtacccaatgacccttacacttttctctcttgtggtgaagatggaactgttaggtggtttgatacacgcatcaaaactagctgcacaaaagaagattgtaaagatgatattttaattaactgtcgacgtgctgccacgtctgttgctatttgcccaccaataccatattaccttgctgttggttgttctgacagctcagtacgaatatatgatcggcgaatgctgggcacaagagctacagggaattatgcaggtcgagggactactggaatggttgcccgttttattccttcccatcttaataataagtcctgcagagtgacatctctgtgttacagtgaagatggtcaagagattctcgttagttactcttcagattacatatatctttttgacccgaaagatgatacagcacgagaacttaaaactccttctgcggaagagagaagagaagagttgcgacaaccaccagttaagcgtttgagacttcgtggtgattggtcagatactggacccagagcaaggccggagagtgaacgagaacgagatggagagcagagtcccaatgtgtcattgatgcagagaatgtctgatatgttatcaagatggtttgaagaagcaagtgaggttgcacaaagcaatagaggacgaggaagatctcgacccagaggtggaacaagtcaatcagatatttcaactcttcctacggtcccatcaagtcctgatttggaagtgagtgaaactgcaatggaagtagatactccagctgaacaatttcttcagccttctacatcctctacaatgtcagctcaggctcattcgacatcatctcccacagaaagccctcattctactcctttgctatcttctccagacagtgaacaaaggcagtctgttgaggcatctggacaccacacacatcatcagtctgataacaataatgaaaagctgagccccaaaccagggacaggtgaaccagttttaagtttgcactacagcacagaaggaacaactacaagcacaataaaactgaactttacagatgaatggagcagtatagcatcaagttctagaggaattgggagccattgcaaatctgagggtcaggaggaatctttcgtcccacagagctcagtgcaaccaccagaaggagacagtgaaacaaaagctcctgaagaatcatcagaggatgtgacaaaatatcaggaaggagtatctgcagaaaacccagttgagaaccatatcaatataacacaatcagataagttcacagccaagccattggattccaactcaggagaaagaaatgacctcaatcttgatcgctcttgtggggttccagaagaatctgcttcatctgaaaaagccaaggaaccagaaacttcagatcagactagcactgagagtgctaccaatgaaaataacaccaatcctgagcctcagttccaaacagaagccactgggccttcagctcatgaagaaacatccaccagggactctgctcttcaggacacagatgacagtgatgatgacccagtcctgatcccaggtgcaaggtatcgagcaggacctggtgatagacgctctgctgttgcccgtattcaggagttcttcagacggagaaaagaaaggaaagaaatggaagaattggatactttgaacattagaaggccgctagtaaaaatggtttataaaggccatcgcaactccaggacaatgataaaagaagccaatttctggggtgctaactttgtaatgagtggttctgactgtggccacattttcatctgggatcggcacactgctgagcatttgatgcttctggaagctgataatcatgtggtaaactgcctgcagccacatccgtttgacccaattttagcctcatctggcatagattatgacataaagatctggtcaccattagaagagtcaaggatttttaaccgaaaacttgctgatgaagttataactcgaaacgaactcatgctggaagaaactagaaacaccattacagttccagcctctttcatgttgaggatgttggcttcacttaatcatatccgagctgaccggttggagggtgacagatcagaaggctctggtcaagagaatgaaaatgaggatgaggaataataaactctttttggcaagcacttaaatgttctgaaatttgtataagacatttattatatttttttctttacagagctttagtgcaattttaaggttatggtttttggagtttttccctttttttgggataacctaacattggtttggaatgattgtgtgcatgaatttgggagattgtataaaacaaaactagcagaatgtttttaaaactttttgccgtgtatgaggagtgctagaaaatgcaaagtgcaatattttccctaaccttcaaatgtgggagcttggatcaatgttgaagaataattttcatcatagtgaaaatgttggttcaaataaatttctacacttgccatttgcatgtttgttgctttctaattaaagaaactggttgttttaagataccctgaaaaaaaaaaaaaaaaaa

SEQ ID NO: 883 - DNA, 1732 bp, Homo Sapiens
  NM_001017979
gtgcgcgtagggggcggggccgcgcgcagagggcggggaggtgggcaagatggcgcttgccgagtgattctcctcgaatacctcctgccggcgcggagacaccggggcgggggtcctgccgcaactacctcccttcctcctctcccccgcccccggagccttcatccttcccttccccccccacctcgaggggcgggcctggttcccgggacaccatgtcggactctgaggaggagagccaggaccggcaactgaaaatcgtcgtgctgggggacggcgcctccgggaagacctccttaactacgtgttttgctcaagaaacttttgggaaacagtacaaacaaactataggactggatttctttttgagaaggataacattgccaggaaacttgaatgttacccttcaaatttgggatataggagggcagacaataggaggcaaaatgttggataaatatatctatggagcacagggagtcctcttggtatatgatattacaaattatcaaagctttgagaatttagaagattggtatactgtggtgaagaaagtgagcgaggagtcagaaactcagccactggttgccttggtaggcaataaaattgatttggagcatatgcgaacaataaaacctgaaaaacacttacggttttgccaggaaaatggttttagtagccactttgtctcagccaagacaggagactctgtcttcctgtgctttcagaaagttgctgctgaaatccttgggatcaaattaaacaaagcagaaatagaacagtcacagagggtggtgaaggcagatattgtaaactacaaccaggaacctatgtcaaggactgttaaccctcctagaagctctatgtgtgcagttcagtgagcgcatttttcttttgtgttgatagttctggctgcccttcacctctgggtgggcccgaggacttctaggaacttgttttatcagtgaccatctctgtagttcagttaacactttactcccaacttgcttcatcattgctattgcctcacagtggcaggcagctccttggatttgaaagaattcaactttgggaccacacactttgaattcaaaatggaaaacccattccctggaattagactgcttcattgcaaaagaatgatgttgtttctttgtatgtccttgcttcttttttcattgatgtaaatttttttaacttaatatgaaaactctccaagtcttgatcatcagccaggattttgccacagcaatttcattctcttatcggaacttgtatgtgtcaaagtatacttcagagtgcaaacattaagcaagtaatatattttacctacagatacttatgaagacattctttcgctatcgtgagtaaaagtatataaagctgtttctaactgaaaatgcttgaaataagcctgtaatagaaatattttttcattttttaaaaaagggcctaaattgtttatattgtagtttgtaactcacaaagtaatatttgatattgtatttttattactgtatcgttgtcgttatgtattgtgtaatactcaggtttgaaggctttctgaattctgataaatgttcagctgatgctccacgtggaatttctcttgcaaactgcataagagtactcccgagaatgagttatgacattgtggatcagactgtacctgatgttcagatgtttttctttcacaaataaacttatttaaattacaaaaaaaaaaaaaaaa

SEQ ID NO: 884 - DNA, 4760 bp, Homo Sapiens
  NM_001017980
gcacttccggcgcgaaccgctacttccggtgcgaaccgcctcggccgttccctcgcggagcttactgagcgcggccgccgagcccagctccgccgccgagcgcctgtgccggcacggctacaccatggagcgcccggataaggcggcgctgaacgcactgcagcctcctgagttcagaaatgaaagctcattagcatctacactgaagacgctcctgttcttcacagctttaatgatcactgttcctattgggttatatttcacaactaaatcttacatatttgaaggcgcccttgggatgtccaatagggacagctatttttacgctgctattgttgcagtggtcgccgtccatgtggtgctggccctctttgtgtatgtggcctggaatgaaggctcacgacagtggcgtgaaggcaaacaggattaaagtgaacatcacctttttatagcattaaattcattttttaaaatgataaatgctggagggggccatctgatttgaataaagttgaaagaacatgttaaagtcagtcttaaggagtcacgtttgagtatgtaaattttgatctttctaatatgttggtttgtatattcagttttaactgtatgaatctgatttgcaaatgagaatttggaaaagttagttacaaagaaatatgttaatttaattagacaatactctggaaggaattttatcttctttcaacaaaacatgttttatagtattctgacttacggttgcttttgagttttactcatttggatatattaagatgcacacagtgaagcaaattaaactccactttacgctggaatgctttctttagcatgaaaataccaggtccttggatttgggattttaatttcctatggaaagttgcttaaattgtggacactggaattaatctgaatgtcactgaggaatttcacatgaagtgtaatccctagtcaataagaattatccattacattattttatgggaaaactaggctaaattacatccattcaggtaaaaggaccttagcttactgaaggatctaaagagcaaagcaaagatctcactactcaaacactcagcctgcttccttcaagtccccttgcaggccagctttgtgctttgcagaccaactttttaatgagatactttgcttcctcattcaacattgaagctaggcttcaattaaaaggttcgaggaagctccatttaaaattgttttttttactattttttaaaattgtagtgtatatgataggaatttgcatttaaatatgttcatttttgcatatgttaggagtggaaacaatctggaaaacatttttttttcatccaaaaagtattctccttgggcatatctgatggaaaaaaaccttgattttattttcgtatctttagtctgtgttctttctagttatttggtactaattatgtgcaatctaaaaacactcccacaagtatttgttttttaattataaaatcatagtatatgttctttgtagaaaactggaaaaatacatattcaaacaggaaaaaaaatcaaaattccccataatgttgccatctaaaaataacctctattttagttgatatcccgtattcatttttgaaagccattccttaatgctagtttgatacacactaaaagtttagcttacaagttcaaattctgccagcttttcctgacagctatttgcatttttttcagatgagtgattattggccattttctttttctttttctttattttatttatttatttttttgagacagagttttgctctgttgcccaggctggagtgcagtggtgcaatctcggctcactgcaacctctgcctcctgggttcaagtgattctccacctcagcctcccaagtagctgggactacggatgcctgccaccacgcctggctaatttttttttgtatttttttgtagagacggggtttcaccatgttgtccaggctaatcttgaacttgtgacctcaggtgatccacccgcctcggcctccgaaagtgctgggattacaggcgtgagctaccacgcccggccttattgaccattttctaaataagcacattctatctttattctcttaaaattcaaattttctgttactgataatcctaatactaggattcttgcttaagtatgtgaaaccattaccgatttgttgttcacatttattttttatgttgtgaaactggactaaaggaatagagggatgattagtcataaaagtcaaatagcatttgtgtttaactgttgagaaaagtgaaagatcagtatgattattatggaactgtttttaattcttgcttaaagactacaattttagtataatgacatttgagtctagggtagtatgtggtagatttctagatggtccctaattaagaagtattgttgtatttagaattgtccacctaatttctttttatataatgccaaggtatttcttgtgcttttgggatcttatgctgtttgtaaaatgttactgtccaatgttggattattgttttggtttcaggcatttgctgaataggtgatgatacatgggtatttttctgcaagtatttaaaccaggggcatatgcaaaggcagttgtaatttcctcttggaaaaagcgccaaatgtttgaaggttaaaatcaaatgctagggttgatatttaggcttataacaaaataggcttgttttcaaagcagttttttcctagagttttaactgttaactcactagtttgctgctgtttttaactatgttaaataacatatggtatttggcaaatagatttatttttcaaaatgtctcactagtttccttttacacaatgtatatacttcaagatgtatagaaaggaaagctacagttgagcccttatacatgttttaaggtagaaatatgttccctattgtttgaaaactgattgtaagaataacctcagttaggagatataacttgaagtgtcagtccaaactactgatttaaccctatttacggtaacacattaccttcctcacctcctgtttggccctggagaatgtagtcctttttctcatttgtgttgagaaatgaaaagtctgctgtagaatgtatctgatgtcattagttcttcaaatggataccattgtacatataacagtagaatttggtttggggttgttagtgaaaaaaaatttaaacctgccattaaaaatccccatgtttcatggaaatctaacagaaatacattgtaataattagaacattttgttttcttttttctttttttttttttcgagacggagttttgcccttcttgcccaggctggagtgcaagggcgcaatctcggctcgctgcaacctccgcctcccgggttcaagcagttctcctgcctcagccccctgagtacctcagatgacaggtgcgtgccaccacacccggctaatttttgtatttttagtagagacggggtttcaccatgttagccaggctagtctcgaactcctgacctcaggtgatccacccgcctccgcctcccaaagtgctgggattacaggtatcagccaccgtgcctggcctaataattggaacattttcatcatgaaaatgtcatcagctttgccaaaagaaacaaccaattgacttgtttggcgtttgttttccattttcatgtcaattttatgtatacagttagaatacccaaggagaccactaaaatcagttaaacaagtagggtatatacaaagaaagatgaaacccgaaagtacataaaaaggatttaaatccgattttagatgtacctagtgtgtatttcttatctctagacaagttcatgtttattgtttaatttatgcccaagtgaagttgtaaacttatggttcaactctgacacagaatttgtcacttgtctgaggtcagtggcaggtttctctgctgtcaagcactctgtgtcacccaccagattagtataactattaattcagactgtactcctatgtttaagataatttttacaagagctggctgaagcagcacattagtaacctgacaagatttctttttcccttttcagggggaaagggtcaccttaaaaataaattattttcagggactttgggaatctaatgataaatattacacataatctatgaatagcttaatcctttatatattccttaaaataggaattcctcgacatcactcctggccacactttccttgcctgtgttgttgctatgtgtatttgaaagtaatatctgcattccttttaagatgttctgtaagtcatatttgtcagttatacagagtagtcttccttttccccacgttcagtgtaatctcactgaacagtaataatagcaatagctaacaacatctgcacagcaccttacagtttgcaaagaacgttcacacattctcatttgagttttgcatagtgaacctgttacgagatgtctcttgacgtcgatgctaaaagtgttagaatctttacatcactagagtcattgaatatgctgtagtattgaatagtgccctgactagggggaggatttggatgtgctgcatttcaagccgtgtataatcatcaaaatggggggcttgagttctttagctacttgaatccgatttacttctgttaagtgatgcttttctaaccgttttctggatggattttgtattcactatattgtagcttgtaatttgtataaatgtaccatctgatgtcattaaaaaaagtgtttgtagtgctaaaaaaaaaaaaaaaaaaaaaaaaa

SEQ ID NO: 885 - DNA, 1139 bp, Homo Sapiens
  NM_001017986
aatatcttgcatgttacagatttcactactcccaccagcttggagacaacatgtggttcttgacaactctgctcctttgggttccagttgatgggcaagtggacaccacaaaggcagtgatcactttgcagcctccatgggtcagcgtgttccaagaggaaaccgtaaccttgcactgtgaggtgctccatctgcctgggagcagctccacacagtggtttctcaatggcacagccactcagacctcgacccccagctacagaatcacctctgccagtgtcaatgacagtggtgaatacaggtgccagagaggtctctcagggcgaagtgaccccatacagctggaaatccacagaggctggctactactgcaggtctccagcagagtcttcatggaaggagaacctctggccttgaggtgtcatgcgtggaaggataagctggtgtacaatgtgctttactatcgaaatggcaaagcctttaagtttttccactggaattctaacctcaccattctgaaaaccaacataagtcacaatggcacctaccattgctcaggcatgggaaagcatcgctacacatcagcaggaatatcacaatacactgtgaaaggcctccagttaccaactcctgtctggtttcatgtccttttctatctggcagtgggaataatgtttttagtgaacactgttctctgggtgacaatacgtaaagaactgaaaagaaagaaaaagtggaatttagaaatctctttggattctggtcatgagaagaaggtaatttccagccttcaagaagacagacatttagaagaagagctgaaatgtcaggaacaaaaagaagaacagctgcaggaaggggtgcaccggaaggagccccagggggccacgtagcagcggctcagttggtggccatcgatctggaccgtcccctgcccacttgctccccgtgagcactgcgtacaaacatccaaaagttcaacaacaccagaactgtgtgtctcatggtatataactcttaaagcaaataaatgaactgacttcaactgggatacatttggaaatgtggtcatcaaagatgacttgaaatgaggcctactctaaagaattcttgaaaaacttaaaaaaaaaaaaaaaaaa

SEQ ID NO: 886 - DNA, 517 bp, Homo Sapiens
  NM_001017990
cgcccagcatgccgaggaggaggagacgccgagggtcctccggtgctggcggccgggggcggacctgctctcgcaccgtccgagcggagctttcgttttcagtgagccaggtggagcgcagtctacgggagggccactacgctcagcgcctgagtcgcacggcgccggtctacctcgctgcggttattgagtacctgacggccaaggtcccggagctggcgggcaacgaggcccagaacagcggagagcggaacatcactcccctgctgctggacatggtggttcacaacgacaggctactgagcacccttttcaacacgaccaccatctctcaagtggcccctggcgaggactagcttctgacacccggcccctgggacctgacaggtccactcgtccacccacccggccccaaatcccccggcctgaacccccggccttaaacaccctccccccacaacccaggccccaaagtcttgggccttcattaattctgtcaataaaatgtttcaaggaa

SEQ ID NO: 887 - DNA, 7793 bp, Homo Sapiens
  NM_001017995
agtgcgcgccgagcgaagggcggcggcggtggcggcggcggctcgtgctcggccccggctgcgattgcgctcagctccaggttccctgcccgcggcggcgcgcccccagcgctccctgcaccccgcgccacccgcacccgcgctcggcccgctgcgggcggaggagcggccatgccgccgcggcgcagcatcgtggaggtgaaggtgctagacgtgcagaagcggcgggtgcccaacaagcattatgtctacatcatccgggtcacgtggtccagcggctccaccgaggccatttaccggcgctacagcaagttttttgacctccagatgcagatgttggacaaatttcccatggaaggaggacagaaggaccccaagcagcggatcatcccctttctgccaggtaagattctcttcagacgaagccacatccgggacgtggctgtcaaacgcctgataccaattgatgaatactgtaaggccctcatccagctgcccccctacatctctcagtgtgatgaggtgctgcagttctttgagacaagacctgaggacctgaatccccccaaagaggagcacattgggaaaaagaaatctgggggtgaccaaacctcagtggaccccatggtcctggagcagtatgtggtggtagccaactaccagaagcaggagagttcggagatcagcctcagcgtggggcaggtggtggacatcatcgagaagaatgagtcaggttggtggttcgtcagcactgccgaggagcaaggctgggtccctgcaacgtgcctcgaaggccaggatggggtgcaggatgagttttctctgcagcctgaagaagaggagaagtacacagtcatctacccgtacacagctcgggaccaggatgaaatgaacctggagagaggggctgtggtggaggtcatccagaaaaacctggaaggctggtggaagatcaggtaccagggcaaagaaggctgggcccccgcctcctacctaaagaagaacagtggggagcccttgcccccgaagccaggccctggctcaccctcccacccgggtgcccttgacttggatggtgtttcccggcagcagaacgcggtgggcagggagaaggagctgctcagcagccagagggacgggcggtttgaaggccgcccggtgcccgacggtgacgccaagcagagatcaccaaagatgaggcagagaccccctcctcgccgggacatgaccattcctcgaggcctcaacctgccgaagccgcccatcccgccccaagtggaggaagagtattacaccatcgccgaattccagacaaccatcccagacggcatcagcttccaggcaggcctgaaggtcgaggtgatcgagaaaaacttgagtggctggtggtacattcagattgaagataaggaagggtgggccccggccaccttcattgacaagtacaagaagacgagcaacgcgtcgagacccaactttctggctcccctgccccacgaggtgacccagctccggctgggggaagcagcagcgctggagaacaacacgggcagcgaagccacgggcccctcccggcccctgcctgacgcaccgcatggtgtcatggactcggggttgccatggtctaaagactggaagggcagtaaggatgtcctgaggaaggcatcttcagacatgtctgcgtcagcaggctacgaggagatctcagaccccgacatggaggagaagcccagcctccctccgcggaaagaatccatcatcaagtcggagggggagctgctggagcgggagcgggagcggcagaggacggagcagctccggggccccactcccaagcctccgggcgtgattttgccgatgatgccagccaaacacatccctccagcccgggacagcaggaggccagagcccaaacctgacaaaagcagactgttccagctgaaaaatgacatggggctggagtgtggccacaaggtcttggccaaggaagtgaagaagcccaacctccggcccatctccaaatccaaaactgacctgccagaggagaagccagatgccactccccagaatcccttcttgaagtccagacctcaggttaggccaaaaccagctccttcccccaaaacggagccacctcagggcgaagaccaagtcgacatctgcaacctcaggagtaagctcaggcctgccaagtcccaagacaagtccttgttggatggggagggcccccaggcagtagggggccaagacgtggccttcagccgaagcttcctcccaggagaggggcctggccgcgcccaggacaggacgggcaaacaggatggtctcagcccaaaagagatttcctgcagagcccctccgaggccagccaagaccacagatcctgtgtctaagagcgtgcctgttcctctccaagaggctccccagcagagacctgtggtcccaccccgcagaccacctcccccaaagaaaacctcttcgtcatccaggccgctcccagaggtcagaggtccacagtgtgaaggccacgaaagcagggcagctcccaccccaggccgtgctctcctcgtccctccaaaagccaaaccttttctctccaactctttggggggccaggatgacacgcgaggcaaaggcagcctggggccatgggggaccggcaagattggagaaaacagggagaaagcagctgcagcctctgtccccaatgccgacggcctgaaggactctttgtatgtggccgtggccgactttgaaggagacaaagacaccagcagcttccaggaagggacagtgtttgaagtccgggagaagaacagcagtggctggtggttctgccaggtcctgagcggagccccttcctgggaagggtggattccttccaactatctcagaaagaagccgtagccgactccctttctgcctagagggcccgctggtccttgctggctttacccacgtatttaatacgcctcttaatttatcattctccacgcagcttccaaggcagacagactctggggtactgtgacttcttgcctcccatgggtggagagtgagtttcggacacctcgggcgcccctgggcctgatccctcctatcacagcatcactggaggctcagaacccacagcctttgctttctgtccatgtcagcatccctgccttaagagaactcctcctggccaatggcattgccacccagcagtgggaccaagactctccaagacctccaggactggatcccattgcctggagaaactccagcaagggtctctcatggcttggacatggcacagtaaggggcagccaacccagtccatgatgacttttgctccaacttcttcatgtttctaaaagcccagtggctttattcactcctcctaaattgcctgctaccagaaggaacttcatcctgaagaaatgcattccattaccagttccagggaaagtgtccccttccccaaagcctcaggcccgtgggcctctgaggttccactggatgcggctcccccaggagtgggcctggagatccgctcagccgccctgcctcccaccttctatcttgggaccgtggtcagccctgaagggtggttccagccccgcgtatgctgcgctttgctgctgcaggctccggtccctccagggcttttcaatgagagttcccaccccaacttggagcatttcatttttgcctacctaaagcaagaatctcaaagtttgtttgaataagaggcccattcacaagtcgtgcccttgtgagcacccctttgctgagtgcctcgtgggtgccaaacactgtacttggcgctttgcattcatgctttgaccctcacaacctccctttatagatgaggaaattcacgctccatgtgcccaaggacacaccagccaggaggaagagggaagaggatttgagtccaggcctgcctgacttcagtgcctgtgccctcccctctgtaaaagacaaaccaggcagggaagagatagaagctggctaagtggtggccaagtggcttcattgtgaggggggtgagggggcattcgtggctgctcccacacccaccatccctccagcccacagcagcctataccaaaggctgccctggactcaacagctgcatctccatgacaggagaatgccagggtcctggtggttgacacagagccctgttccctcttctaagctgttgccccctggggaatagagcttatggagcaacgggagctgaggtggcctcgagggccagcctggagggctctgagcatagcatgcagcggtcccatagggaggcaggtaaccaagggccaggcagagctgcttcctgtgcctctccggcatttgtaatgtttttttcttttttcacgcactgccaaatctgttttctcccttgaagaaacccagggcagatgtggtcatctgtcaaactgaggtctggagaggcatgactaaatcactgcagaagcaaaatcaggacccagcatttctagctcccagcccagagtaagagagcagagcagaaccccttcccattctacccgaccgaggcagccctgccctgccctgccccgcccctccccaccctgccctgccccagagatctccagttcacagtgttcatcaggcgagatacttttggacccacaaagccagttttttggggggatgctcagtgtctacctgcagtgccaaagttttgcttgaacagccctcttctgccgcgcctcccagctccaccccctatcacgtgggtgctggctgcttctgcgtgaggagcttcctctgatcacctgtagcatctttagtgccttcgtccagtcggcctgcaaatcccatttcccagagaggcttgggcagggcccacttgccacttggccctgtgcccagagcgttgggggcagatggcagccaggggaagaagggaggtggggaagggccgccaccgcttgagggtcccctcccttgagaggaggccccatggcagttttcctgagttcttgatccactttggtttaaacaacttttgtgaagctatgtgagatttgactgcatttcaaaagacaaaacacatgtttttttctgatttgctctttgcctttcagcgacgctttcagatactttgtgagtgtctactctgtgctaggtgctgagtagactgggatgtgtgtggctccatccctggctggaagagctttgagtcctgtctgctgacttcactgaaggagtttctctcttgcttcattccttcctcccgggggtcagctgggtaggagcagacttgccctgccttcctctaggcagaaagttttcctgcaaatgaaagaatctgccattctcttttgctatgatgatgatgattattctgacatgacccgcgggtactgaagccacagtcctctctgttcactgttctctccttgagtcatatctatggcctgaggacgtctgtatccagctccttttcctacaatggtagacacttccccaggcagtgggtgggtcagggtggccagtcactctcctagctgtccttgcctggggacttagatttaccccatccaggactgtggtcgctattctgtgagcgattgatggcgcatatgcagaactcccctggagtcatggctctagaaagtgtccaggcccatcgtgacaatggtgccaagcaccgggctggtgaccagtgcctaaacacacacgctcctttaatccttacggcaagcctgtgaggcggataggaccagccctgatctatagtgagaaaattaaggttcagagggagaaggtccaaatagtggccaagctgggactgagatctcgagtttgggtttgtttggttttgttgttgttgttctttccctcgtgtccatgacttttctctgccattagcagggaagtgtgcggagggcttccagggaatcaagtgaccctccctctgaatttcggtgcctcttccccccgccccttgctcacacatttcagtaggtcacaggccaaatggcagcccaaaaggtgggcagagatttttttttcttcccctcacccctgcttattaacacaattgtgacaactactttaccttacatcccagggcaaacggacagcttgcggtacctccaaaaatttggaaaaccctgagtctaagaccacctcttgataaaagaggcctttgctcacatgttctgctcggaatctttctttgccattggtgggtgtatgtcgtcccagctgagactgcgggagagctgagctccagcttaaaccgcttttaatggcccttccctactgggggatcgctggagcccatgccaggttacggtagtcattttaaacctctgccacaaggccacgccatagaatcaatttccaagtcaatgttcttggccctaaaatgtttgcgcccactgaggatttcattaccaggtggaagatgggggaacatatgccacgttaaagagcaagtgctgagtgtgccaggacttgagaaggaccttaggctgaggagtggacagtctggtatttatttcgcctctcccaagtacccagcacagagtgggaaaaagaagaaactgctcctgccttccagtagctggcaacttgacatcaagaacaaaaacattcgtagctggacccccgtcctttcatcgtgcccaagtcttacatgttggcttaagctgcccccttggaggccgtacctttctctttggactgtgacagtggacacctaacagcctgagccatgtgtggctgtcttatcccccaagggttgtccaggcccgttctgcagggctgttgtgtagactgcagacatccatacctcaccacagaccaaagatgacctcgtgtcagactgtgggctgatgagaggtagagcagcatgcatcgaggcctgagggtgcagggcgccctctcttggcctggaggaattgctcctaactagagtaagtttccacgagggtcccaggcagagctgcagagctggaaccggaggctccacagtccttgcctgctcatggacctccttcagagcacctttctacagactggactgcccagctccgtggggtggcatctggtttctggtgctattctgccaagttatcgagctcctcctcatgtttcaacattccatcttcccgtttctatcctcgactccaaagtaagccttcttagctccaatcagggatgaggggctcaacctcttctgtcctcaaagaggccaaacgcagtgccacagtcggtagccttcacttttagatgtcctattcatgtaaaaaagaaggtgcccccaccaggcttacatcagcaataagcaattctaatgcaacgatggtgtccacattttaccccagtgtgtgcccatgtatgcctttgtgcccgtgtaattattgttagcgcccctttcacttagaggggtgatgataaactgtggccaccttgattacaacccacatttcctgctttggggagcttccaagtaacaggccatttcttacctccctccaggaacagtgggcactgcccaccacctcgtgtctgctcataggatgacgctggagatccccacacttactctaccctcttggcaaattggcattccggtggtggtttttgtttcctttaacacattaaataaatgagtatataggatgtgaggggaggggtgagaacaactagctgtagcatgtgtaggctatatactttaccatttgacttctttcctttttttttttttaaataaaaaaagtgcttgactggtttcaagcttcatcatgaaaaaaaaaaaaaaaaaa

SEQ ID NO: 888 - DNA, 1269 bp, Homo Sapiens
  NM_001017998
ggggctggcggctcctccccgcccggccgggcccagcagcccctaggagcccagcgccgccgccatgtcctccggggctagcgcgagcgccctgcagcgcttggtagagcagctcaagttggaggctggcgtggagaggatcaaggtctctcaggcagctgcagagcttcaacagtactgtatgcagaatgcctgcaaggatgccctgctggtgggtgttccagctggaagtaaccccttccgggagcctagatcctgtgctttactctgaagactctaggagagaagtttgctgaggaatgccttcaagcacaaagtgatgaatgactgccttcaagtctcaagaaaacacttttccctaacttttagagatatttcagccctttcctgtggcctggtcctatagccaaaatcacagatattcatgagtttctacttgagtgagaaaactgggtgaaggaatagaattttaaatagtaataactgcttgttttttttgtgcaagtacttttatacataagataaacaaaaaccttaccaccaaacataccaaaatgcacctctttcataagtgagttactaagatttctatacctggaatatcatgtatgtttcatttactggatgtttacattttaggaaggaaaatagttttgtttatttaaacaactgaatacttataaactgttgttcctggaagttatttattccataaaaaatttgttcttttgtcatgaatttataattcctaaatgaagaccagaaagtacaaattgctgggaggaagaataggctttattaatcaactgatgtcttgatttttctaaatgggaagattgctttatttttaacactaattatgggagcagattcttagcaaacttctttggaaaagttaatgttatgatgtgcattaggctgccccatcgtgtatataaatgaagcagatttgatttttgtattcttacgtttctctgctttgtagttgtggctgtacttaaagaaatacagaatttcatatatttaaaaatgtttaaaatgtgacccacagaacattgtaaatgattaaaaactaacatgaaaatattacaacctaaaagaattcttaacttcacaagtgttttacttcgacgatgtgcctttgatttaatttgggacacttttttagaaggatacattattcgtgtttgcaacggtctttgaagagcttggaaataaaatttctgcttaattaatcatttttctatgacagcaaaaaaaaaaaaaaaa

SEQ ID NO: 889 - DNA, 531 bp, Homo Sapiens
  NM_001018
ggcagtctcgcgataactgcgcaggcgcggaccaaagcgatctcttctgaggatccggcaagatggcagaagtagagcagaagaagaagcggaccttccgcaagttcacctaccgcggcgtggacctcgaccagctgctggacatgtcctacgagcagctgatgcagctgtacagtgcgcgccagcggcggcggctgaaccggggcctgcggcggaagcagcactccctgctgaagcgcctgcgcaaggccaagaaggaggcgccgcccatggagaagccggaagtggtgaagacgcacctgcgggacatgatcatcctacccgagatggtgggcagcatggtgggcgtctacaacggcaagaccttcaaccaggtggagatcaagcccgagatgatcggccactacctgggcgagttctccatcacctacaagcccgtaaagcatggccggcccggcatcggggccacccactcctcccgcttcatccctctcaagtaatggctcagctaataaaggcgcacatgactcc

SEQ ID NO: 890 - DNA, 3842 bp, Homo Sapiens
  NM_001018000
gagccgttcccacgtgagaggctccgcggccgaattcctcgcgtgcagcaggcgcggaccgcccggcgtccggccggactgagagccctggtccggcgcgcgccgccggccgggcgggaggcgggggcgggctcggctgcgccccgatgcggcggcgacctccgggtctgtgagcccggcgcgcgccgtcggagcccctcgcgcagccgctggtagcgtccccccgggcacccggcatgcgggcggccgactcgggctcgtgggagcgcgtccgccagctcgcggcgcagggcgagccggcgccttcctgcggggcgggggccgggcccgcgcggcccccgggacccgcagcctgcgagcagtgcgtggacgcggcggggcccggcgatcggccccgcgccggggttccccgggtccgagcggatggcgactgcagccagcccgtgctcctgcgggaagaagtgtcgcggctccaggaggaagttcaccttctccggcagatgaaggagatgttggcgaaggacctggaggagtcgcagggcggcaagtcctctgaggtcctctcggccaccgagctcagggtccagctggcccagaaggagcaggagctagccagagccaaagaagccttgcaggccatgaaagctgatcggaagcgcttaaagggcgagaagacagacctggtgagccagatgcagcagctgtatgccacactggagagccgcgaggagcagctccgagacttcatccgcaactatgagcagcaccgcaaggagagcgaggatgcggtcaaagcgctggccaaggagaaggacctgctggagcgtgagaagtgggagctgcggcgccaagccaaggaggccacagaccacgccacggcactgcgctcccagctggacctcaaggacaaccggatgaaggagctggaggccgagctggccatggccaaacagtccttagctacgctgaccaaggacgtccccaagcggcattccctcgccatgccgggcgagacggtgctcaatggcaaccaggagtgggtggtgcaggcggacctcccgctgaccgcagccatccggcagagtcaacagactctctaccactcacacccccctcaccctgcggaccggcaagcggtcagggtgagcccctgccactcccggcagccctctgtcatctccgacgcatctgccgccgaaggcgaccggtcgtccacaccgagcgacatcaactcccctcgacaccggacacactccctctgcaacggcgacagtcccggcccagttcagaagaacctgcacaaccctattgtacagtcactagaggatcttgaagaccaaaaacggaaaaagaagaaagagaagatgggattcggctccatctcccgcgtcttcgccagagggaagcagcggaagtccctcgaccccggcctctttgatggtaccgcccctgattattacatagaggaggacgcggactggtgatacgcgctcccctgcgcctgctgcccgcaggcgtgtctgtgcgtgtgggcgtgtgtgcaagcgagcgtgggtgcgcgtgtggccgtgcgtggggtgcgtgtgcacgtgtgcgctggcacacatgggtgctgggtgtggccgagcgcctctaacaagtgaaaacacgagtgtgaacctctctcccctgcgtcgccacctctgtaattgatgtacataccgcaaaccgtgtgtgaacctgtcaactctctgtcgtctttggagcgatacagttgtgttgttaatctggtttattatttttcttcagtgtttggtttttctttttctttttgtttggttcgtcggtttgtttttgtttttgtttttttccccctttctcctcccctcctcctttttatgaaacttgaaaacttgaaggactgctgtgtatttgtaaataacaaaactattgtgcactctgtgcttgtaaatgtccctcgtccaaaccgctactcctggagcccgtctggcagaggatgtggtctgtttttgatgtcccccctcccgcccccctggtgtgaacgtgtgggaccagaccctgtcctgggggtgcgcccaagtcactttaaccacaaaacgccatcgtcgtcagggtaagctctgctctctacaaagactcgcgagccgggccaaggggccttgtcttggctgggtttgtcagaggtcaaaccggctcttttaaacggcctaccagtttttaaattgcattgccgtttctttctttatgaaaaaaaagaaaaaaagaaaattgtttcatttaatttatttgcacaaatgctgaaaacttattctatctaaattattacataaatattggaatgtctatttttccatggggtgggcgggaggtgggtgtctctgttgacttgtctgttctgttaccatgctgctacccaactgtgcaaagtagtttagggtggccagaacccagggaccattggatttcaaagcttgctttttctgttggttcttctctctccttctctctctgtctctcccattctcctgcccatgcatgaaaggatcctccaccttcttcccacccagagctccctccaggcctttctctatatatttatttatctgacatacagaacacgactttagtgagcagagtgctgacagtcatggtccccttctttgggtctgtcttttgagagaggttgagttcagggcaagacagcctgccacacatccaagggtacgaccagtgggaccctggcctgagtctgttctccgaggggcctccagcagcttctgttcctccctgcagctgtgtctttcttgtcctgggtttaggatgcaggtgggccaggcaggtgttgttaggggaggcacccacttcaaaaggagggccacagtggggacacagagtccagcacctgagccctccaccctccccattctggttggttccatcagccacacttagaatctcccaggatcccttggactccgtcccccaacttgtcacagcagcctgagcctacccaccccaggagacaagagctggcaggaacatctgcctatatggggggtggcgttggccccaaagaggcttcaccagcaaaggaactgtgtgtattttaatgccaggggacggaggatgtgtgagctgttcagcaaggtctgcccaaggcctaaaactcaatttccttattcttttgcttctgctcgtccttaacaactaacagctcaacccacacctctagacaacagtagtcgtgctttctgctaacggtgacattttcagctcttaaaaagaagcaaggagattttcaaatgctagagtatctctatcagaaggcataggacattgtgtccaaagtctcaagaacaaacaacactttccttctgacctggtccaaaagtcagcaaacagcaagcaggcagaggccctcataaggacttttctgtcctcctttgaccaaactgtttaaccgagcctaggggtgacggggagcgacccaagctggcatctttctctacggagacagattttagaaaatacttttcttgcccatgaatttcttttctggttgatttttatcattttccctttacttacaagaaaataagattgcaaccactcctgctaatgatttagtagttccttttcatttcagtttttgtaaattaggagataattctaagagttactaaaggatgatttatttaagagaactacgtcaaatagcgaatgagttatgggtaacattagacgaaaataacctttcccgtgggaaaggtttctcgaaggcatggatgcaaatataaaatattaaaaaaaatctaaataaagcttattttaaaatatgatcg

SEQ ID NO: 891 - DNA, 1797 bp, Homo Sapiens
  NM_001018004
ggaaggggggcaggagaaaaaagcttttccaaaaaagtattggctgtcttgaggaatgcggtcgcccccttgggaaagtacatatctgggagaagcaggcggctccgcgctcgcactcccgctcctccgcccgaccgcgcgctcgccccgccgctcctgctgcagccccagggcccctcgccgccgccaccatggacgccatcaagaagaagatgcagatgctgaagctcgacaaggagaacgccttggatcgagctgagcaggcggaggccgacaagaaggcggcggaagacaggagcaagcagctggaagatgagctggtgtcactgcaaaagaaactcaagggcaccgaagatgaactggacaaatactctgaggctctcaaagatgcccaggagaagctggagctggcagagaaaaaggccaccgatgctgaagccgacgtagcttctctgaacagacgcatccagctggttgaggaagagttggatcgtgcccaggagcgtctggcaacagctttgcagaagctggaggaagctgagaaggcagcagatgagagtgagagaggcatgaaagtcattgagagtcgagcccaaaaagatgaagaaaaaatggaaattcaggagatccaactgaaagaggccaagcacattgctgaagatgccgaccgcaaatatgaagaggtggcccgtaagctggtcatcattgagagcgacctggaacgtgcagaggagcgggctgagctctcagaaggcaaatgtgccgagcttgaagaagaattgaaaactgtgacgaacaacttgaagtcactggaggctcaggctgagaagtactcgcagaaggaagacagatatgaggaagagatcaaggtcctttccgacaagctgaaggaggctgagactcgggctgagtttgcggagaggtcagtaactaaattggagaaaagcattgatgacttagaagagaaagtggctcatgccaaagaagaaaaccttagtatgcatcagatgctggatcagactttactggagttaaacaacatgtgaaaacctccttagctgcgaccacattctttcgttttgttttgttttgtttttaaacacctgcttaccccttaaatgcaatttatttacttttaccactgtcacagaaacatccacaagataccagctaggtcagggggtggggaaaacacatacaaaaaggcaagcccatgtcagggcgatcctggttcaaatgtgccatttcccgggttgatgctgccacactttgtagagagtttagcaacacagtgtgcttagtcagcgtaggaatcctcactaaagcagaagaagttccattcaaagtgccaatgatagagtcaacaggaaggttaatgttggaaacacaatcaggtgtggattggtgctactttgaacaaaaggtccccctgtggtcttttgttcaacattgtacaatgtagaactctgtccaacactaatttattttgtcttgagttttactacaagatgagactatggatcccgcatgcctgaattcactaaagccaagggtctgtaagccacgctgctcttccgagacttccattcctttctgattggcacacgtgcagctcatgacaatctgtaggataacaatcagtgtggatttccactcttttcagtccttcatgttaaagatttagacaccacatacaactggtaaaggacgttttcttgagagttttaactatatgtaaacattgtataatgatatggaataaaatgcacattgtaggacattttctaaaaaaaaaaa

SEQ ID NO: 892 - DNA, 2723 bp, Homo Sapiens
  NM_001018009
ggacaaactgttccagatgggagttggagaaagccttgctatggatgtgacatttgggctgagatgtggatgatgagaaggagtcaggcagccgtgccctggaggagatagcgatgcagacagcagaagccctgaggacagagccagctgacagcccatgtggtgccagaggggagaactggagaagttaaatcagtccacggatgatatcaacagacgggagactgaacttgaggtccagtaggtgtttgcagatcccttcttaagcctcaactgtgtttcctcggtttcccctggctgcaggatgctcgtcagaagttccgctctgttctggttgaagcaacggtgaaactggatgaactggtgaagaaaattggcaaagctgtggaagactccaagccctactgggaggcacggagggtggcgaggcaggctcagctggaagctcagaaagccacgcaggacttccagagggccacagaggtgctccgtgccgccaaggagaccatctccctggccgagcagcggctgctggaggatgacaagcggcagttcgactccgcctggcaggagatgctgaatcacgccactcagagggtcatggaggcggagcagaccaagaccaggagcgagctggtgcataaggagacggcagccaggtacaatgccgccatgggccgcatgcgacagctggagaagaaactcaagagagccatcaacaagtccaagccttattttgaactcaaggcaaagtactatgtgcagctcgagcaactgaaaaagactgtggatgacctgcaggccaaactgaccctggcaaaaggcgagtacaagatggccctgaagaacctggagatgatctcagatgagatccacgagcggcggcgctccagtgccatggggcctcggggatgcggtgttggtgctgagggcagcagcacatctgtggaggatctgccagggagcaaacctgagcctgatgccatttctgtggcctcggaggcctttgaagatgacagctgtagcaactttgtgtctgaagatgactcggaaacccagtccgtgtccagctttagttcaggaccaacaagcccgtctgagatgcctgaccagttccctgcggttgtgaggcctggcagcctggatctgcccagccctgtgtccctgtcagagtttgggatgatgttcccagtgttgggccctcgaagtgaatgcagcggggcctcctcccctgaatgtgaagtagaacgaggagacagggcagaaggggcagagaataaaacaagtgacaaagccaacaacaaccggggcctcagcagtagcagtggcagtggtggcagcagtaagagccaaagcagcacctcccctgagggccaggccttggagaaccggatgaagcagctctccctacagtgctcaaagggaagagatggaattattgctgacataaaaatggtgcagattggctgattcatcctgggccctggccgatgtgcatatcaacatttatacatggaactggagaacattgtgccaataatcatttaatatatgccaaatcttacacgtctactctaaactgctctaatgaagtttcagtgaccttgagggctaaagattgttcttctgggtaagagctcttgggctggtttttcagagcagagttcttgttgtgggtagactgtgactaggttcacagcctttgtggaacattccgtataacggcattgtggaagcaataactagttcctatgaaagaaccagagctgggaagatggctgggaagccaggccaaagtgggggcaacagcttgcttctctttctcttctcaccctcagtttgtatgggaaaatggagatgtcctctccactttatcccacgatatctaaatgaaaaagaaagaaaacccacacacaaagcaaaaactcaagtattaagagcacatatttttgacccagtggaggcttaaaaaaaaaaaaatccaagaacacaattcattttcaccacctctggtgttcagagggggcttttaaaaaagcgtgtatgctgggatacccattaaaaccattttctagaaggctaccatgagctgcactttttggggtgggaaaggtgaatgccagtggggatgcggggggatgagggtaggagggacttatagaaggggatttgtggctgtgggggagaaggttctacagcataagccttatcctgccagccaaggggatttattctaagagaagtgcatgtgaagaatggttgccactgttattagattgacaagatgttaatttctctgtaggttgtaactttaaaaataaatgaaattatttaagggttatgctgcactagtattccttagaggaaacagttctttaaagttaggaaagggagtaggcaggcatgtgttggcaaaggctgttaatagtagttaagtgttaagactgcttttctttaacgttttcatggtaatgcatatttagagcactgtatttttgtcttgttaagaaaatttagcatttctaaaagaaaaaagcaaccctctttcaaactgttaattctgtcacagcctgtatattttagtcatttgtaaatctcttcatacaatagtgacttcttttttgactgatacagtatcttaattacaaggttattttgtacttgtcttaatacactaagtgtaataaaaacggcttgagaaaagttaaaaaaaaaaaaaaaaa

SEQ ID NO: 893 - DNA, 1797 bp, Homo Sapiens
  NM_001018020
ggaaggggggcaggagaaaaaagcttttccaaaaaagtattggctgtcttgaggaatgcggtcgcccccttgggaaagtacatatctgggagaagcaggcggctccgcgctcgcactcccgctcctccgcccgaccgcgcgctcgccccgccgctcctgctgcagccccagggcccctcgccgccgccaccatggacgccatcaagaagaagatgcagatgctgaagctcgacaaggagaacgccttggatcgagctgagcaggcggaggccgacaagaaggcggcggaagacaggagcaagcagctcgaggaggacatcgcggccaaggagaagttgctgcgggtgtcggaggacgagcgggaccgggtgctggaggagctgcacaaggcggaggacagcctcctggccgccgaagaggccgccgccaaggctgaagccgacgtagcttctctgaacagacgcatccagctggttgaggaagagttggatcgtgcccaggagcgtctggcaacagctttgcagaagctggaggaagctgagaaggcagcagatgagagtgagagaggcatgaaagtcattgagagtcgagcccaaaaagatgaagaaaaaatggaaattcaggagatccaactgaaagaggccaagcacattgctgaagatgccgaccgcaaatatgaagaggtggcccgtaagctggtcatcattgagagcgacctggaacgtgcagaggagcgggctgagctctcagaaggccaagtccgacagctggaagaacaattaagaataatggatcagaccttgaaagcattaatggctgcagaggataagtactcgcagaaggaagacagatatgaggaagagatcaaggtcctttccgacaagctgaaggaggctgagactcgggctgagtttgcggagaggtcagtaactaaattggagaaaagcattgatgacttagaagagaaagtggctcatgccaaagaagaaaaccttagtatgcatcagatgctggatcagactttactggagttaaacaacatgtgaaaacctccttagctgcgaccacattctttcgttttgttttgttttgtttttaaacacctgcttaccccttaaatgcaatttatttacttttaccactgtcacagaaacatccacaagataccagctaggtcagggggtggggaaaacacatacaaaaaggcaagcccatgtcagggcgatcctggttcaaatgtgccatttcccgggttgatgctgccacactttgtagagagtttagcaacacagtgtgcttagtcagcgtaggaatcctcactaaagcagaagaagttccattcaaagtgccaatgatagagtcaacaggaaggttaatgttggaaacacaatcaggtgtggattggtgctactttgaacaaaaggtccccctgtggtcttttgttcaacattgtacaatgtagaactctgtccaacactaatttattttgtcttgagttttactacaagatgagactatggatcccgcatgcctgaattcactaaagccaagggtctgtaagccacgctgctcttccgagacttccattcctttctgattggcacacgtgcagctcatgacaatctgtaggataacaatcagtgtggatttccactcttttcagtccttcatgttaaagatttagacaccacatacaactggtaaaggacgttttcttgagagttttaactatatgtaaacattgtataatgatatggaataaaatgcacattgtaggacattttctaaaaaaaaaaa

SEQ ID NO: 894 - DNA, 10187 bp, Homo Sapiens
  NM_001018038
ttcctccctctcagggctgcgcgcccaggtctgcgccgcgctccgcctccagccgcgcgcagacttgcgcacgcgtcgtgagagcgaccgcctccgtctctcgctgggctcgctagggctgcgcgttgggccagcgggggcgccgcagctgaagccgccccggagccggtgaaccgaattacctcgagggaggggcgtggggaaggcggcgggaggaggagcgcacgggccggctgccgtgcccaccacggctgaggaacatggttttcgagtcggtggtcgtggacgtgttgaaccggttcttgggggactatgtggtggacttggacacgtcccagctctctctgggcatctggaaaggagctgtggccctcaagaatcttcaaattaaagaaaatgccctgagtcaactggatgtaccatttaaagttaaagttggtcacataggtaatcttaaacttataattccatggaaaaacctttatactcaacctgttgaagccgtattggaagaaatttatttacttatagtgccttcttctagaataaaatatgatcctttaaaagaagagaaacaactcatggaagcaaagcaacaggaactgaaaagaatagaagaagcaaaacaaaaagtagttgatcaagaacaacatctgccggaaaaacaggacacttttgcagaaaaattagttacacagatcataaaaaatcttcaggtgaaaatttccagtatccatattcgttatgaagatgatatcacaaatcgggacaaaccgctgtcatttggtatttcccttcaaaatctgagcatgcagacaactgatcaatactgggttccatgtttacatgatgaaactgagaaactggttcgtaagttaatccgattggataacctgtttgcctattggaatgtgaagtctcagatgttttatcttagtgattatgataactccttggacgacttgaagaatggcattgtcaatgaaaatattgttccagaaggttatgattttgtatttcgtcccatatctgctaatgccaaacttgtgatgaatcgccgatctgattttgacttttctgcccccaaaataaacttggaaattgagttacataacatagcaattgaatttaataaaccacagtatttcagtattatggagcttcttgaatcagttgatatgatggcacaaaatctgccatataggaagttcaaacctgatgtgcctcttcaccaccatgccagagaatggtgggcttatgctatacatggcgttcttgaagtaaatgtttgccccaggttatggatgtggtcatggaagcatattagaaaacataggcaaaaagtgaagcaatataaagaactgtataaaaaaaagttaacaagtaagaagccacctggtgaacttctcgtgtctttggaggagttggaaaaaaccttggatgtctttaatataactatagctagacagacggcagaagttgaggtaaagaaagctggatacaaaatttacaaagaaggagtaaaagatccagaggataataaagggtggtttagctggctatggtcttggtcagaacaaaatactaatgaacagcaaccagatgttcaacctgaaactcttgaagaaatgttgacacctgaagaaaaagctttactctatgaagcaattggctatagtgaaacagcagttgatccaactttactaaaaacatttgaagccttgaagttttttgtccacttgaaaagtatgtctattgttctaagagaaaatcatcaaaaacctgagctggtagatattgtaatagaagaatttagcaccttaattgtgcaaagaccaggagcacaagcaataaaatttgaaactaaaatagattcatttcatattactggcttaccagataattcagaaaaaccccgcctcctgtcttcattggatgatgcaatgtcacttttccaaattacatttgagataaatccattagatgaaactgtttctcagaggtgtatcatagaagctgaacctttagaaatcatatatgatgcaaggacagtgaatagtatagtggaattcttcagacctccaaaagaggtacatctagcacagctcactgcagcaactttgacaaaactggaagaatttcgcagtaagacagcaacaggtctactgtatattattgaaacacagaaagttcttgatctcaaaattaatttgaaggcttcatatattattgtcccacaagatggaatttttagtcctacatcaaatctgcttcttttggaccttggtcatctaaaggtgacgagtaaaagtcgttctgaattaccagatgtgaaacaaggtgaggccaatcttaaagagataatggatagagcttatgattcatttgatattcaacttacaagtgtacagctgctttacagtagagttggtgataattggagagaagcacgaaaactcagtgtatctacccagcatattttggtacccatgcacttcaatttggaactgtctaaggccatggttttcatggatgtaaggatgcccaaattcaagatttatggaaagttacctcttatttctttacgaatctcagataaaaaactacaagggattatggaattgattgaaagcattccaaaacctgaaccagtaactgaagtatctgcccctgtcaaatcattccagattcaaacatctacttctttgggaacatcacagatttcacagaaaataattcctctcttggaacttccatctgtttctgaagatgattcagaggaggaattttttgatgcaccatgtagtcccttggaagaacctcttcagtttccaactggagttaaaagtattcgaaccagaaagttacaaaagcaggattgttcagtaaatatgactacatttaaaataagatttgaagtaccaaaggttttgatcgagttttatcaccttgttggagattgtgaactatctgtggtagaaattcttgttttaggattgggtgcagaaattgagattagaacatacgatttgaaagcaaatgcctttttgaaagagttctgcttaaaatgcccagaatacttggatgaaaacaagaaaccagtttatttggttacaaccctggataacacaatggaagacctgttaacgctggaatatgtaaaggctgaaaagaatgtacccgacttgaaaagtacctataacaatgttttacaattgattaaggtaaatttttcctctttggatattcatttacacactgaagcacttctgaatacaataaattatcttcataatatccttccgcaatcagaggaaaaatcagccccagtgtccactacagagactgaagacaaaggagatgtcattaaaaaattagctttaaaactatccacaaatgaagatatcattactttgcagattttagcagaattatcgtgtttacagatctttattcaagatcagaaatgtaacatttctgaaattaagattgaagggcttgattctgagatgattatgaggccttcagaaactgaaataaacgcaaagctaaggaatataattgttttagattctgatataacagctatatacaaaaaggctgtttatatcactggaaaagaagttttcagcttcaaaatggtttcttacatggatgcaactgctggttctgcatacacagatatgaatgtggttgacattcaggttaatttaatagttggttgcattgaagtagtttttgtcacgaaatttctatattctatattggcttttatagataattttcaggcagctaaacaagccttggctgaggcaactgttcaggcagctggaatggctgctactggtgtaaaagaactcgcacaaaggagttccagaatggcactggatattaacatcaaagccccagttgtggtcatcccgcagtctccagtttctgaaaatgtttttgttgctgattttggactaattacaatgacaaatacctttcatatgataacagagagccagagctctcccccacctgttattgatttgataacaataaagctgagtgaaatgcgactatacagatctcgatttattaatgatgcataccaggaagtactggatctactcctgccattaaatcttgaggttgtggttgaacgaaatttatgctgggagtggtaccaggaagttccttgttttaatgtaaatgctcagctgaaaccaatggagttcattcttagtcaagaagatataacaactatttttaaaacattgcatggcaatatatggtatgaaaaagatggtagtgcctcacctgctgtaacaaaagaccaatacagtgccactagtggagttactactaatgcttcacaccattcaggaggagcaactgtggtgacagctgctgtggtagaagtacattcacgtgccttactagttaagacaacactaaacataagcttcaaaactgatgatctcaccatggtgctgtatagtccaggtcctaaacaggcttcctttacagatgttcgtgatccttctctgaaacttgctgaatttaaattggagaatattataagtactttaaaaatgtatacagatggctcaacattttcttccttctcattaaaaaactgtattttagatgataaaagacctcatgtcaagaaagcaactcctcgaatgataggactgacagttggttttgacaaaaaagacatgatggatataaagtacaggaaagtcagagatggttgtgtgactgatgcggtctttcaagaaatgtatatttgtgcaagcgtagaatttctgcagactgttgcaaatgtctttcttgaggcctacaccacaggcactgctgtagaaaccagtgtgcaaacatggactgctaaggaagaagtacctacacaggaatcagtgaagtgggaaattaatgttattattaaaaatcctgaaattgtgtttgtagctgacatgacaaaaaatgatgctcctgctttagtcattacaacacaatgtgaaatttgctataaaggtaaccttgaaaatagtacaatgactgctgccattaaagatctccaagtgagagcctgcccgtttcttccagtcaagagaaaaggcaaaatcactactgttttgcagccctgtgacttgttttatcaaactactcagaaaggtacagatccacaagtgatcgatatgtcagtaaaatccctgacactaaaggtttcaccagttattataaatactatgattaccataacttcagcactgtatacaactaaggaaaccatcccagaagaaacggcttcttctactgcacatttatgggaaaagaaggatacaaagactttaaaaatgtggtttcttgaagaatcaaatgaaactgaaaaaatagctcccacaactgaattggtacccaaaggcgagatgataaaaatgaacattgattctatttttatagttcttgaggctggaattggtcatagaacagtacctatgcttctggcaaagtcacgtttttcaggggaaggcaaaaactggagttccctaataaatctgcactgtcagcttgagctagaagtgcattattataatgaaatgtttggtgtatgggagcctttgcttgaacccttagaaattgatcagactgaggattttagaccatggaatcttggtatcaagatgaaaaagaaagcaaaaatggccattgttgagtcagatcctgaagaagaaaactacaaagtgccagaatataaaactgtcatcagtttccattcaaaagaccaattaaacattacattatccaaatgtggtcttgtaatgttaaacaatttagtcaaggcatttacagaagctgccactggatcttcagctgacttcgtaaaggatctagcaccatttatgattttaaattcccttggacttactatttctgtttcgccaagtgattcttttagtgtactcaacattcctatggcaaaatcatatgtattgaaaaatggagaaagtttaagtatggattatatccgaaccaaggacaatgatcatttcaatgcaatgaccagcctaagcagcaaactcttcttcattcttcttacacctgttaaccattctactgctgataagattcctttaacaaaagtgggacgacgtctgtacactgtaagacacagagagtctggcgttgaaagatctattgtttgtcaaattgatacagtagaaggaagtaagaaggtcacaattcgctccccagtgcagataagaaatcatttttcagtcccactgtctgtttacgaaggggataccttattgggaactgcctcacctgaaaatgaattcaacataccattaggatcttaccgatcattcatttttctgaagccagaagatgagaactatcaaatgtgtgaaggaattgactttgaagagattataaaaaatgatggtgctcttctaaagaagaaatgtagatctaaaaacccttctaaggaatcatttctcattaatattgttccagaaaaagataatttaacatctctatcagtgtattcagaagatggttgggatttaccatacataatgcatttgtggccacctatcctgctccgaaatcttcttccttacaaaattgcttattatatagagggaattgaaaattcggtttttactctaagtgaaggacattcagcccagatttgtactgcacagttgggtaaagccaggctacatttaaaattacttgactatctcaatcacgattggaaaagtgaatatcacataaagcctaatcagcaagacattagttttgtcagttttacttgtgttacagaaatggaaaagactgatttagatattgctgtccatatgacttacaatactggtcagacagttgtggcatttcatagtccttattggatggtcaataaaactggccgcatgttacagtacaaagcagacggaattcatcgaaagcatccacctaattataaaaagccagttctcttttcttttcagccaaatcacttttttaataacaataaggttcaacttatggtaactgatagtgagttgtccaatcagttttcaattgatactgttggtagtcatggagctgttaaatgtaaaggcctgaaaatggactatcaagttggtgtcactatagacctgagcagttttaacattactagaattgtgacatttacccctttttatatgattaaaaacaaaagcaaataccatatatcagtggctgaagaaggaaatgataaatggctctctcttgatttggagcagtgtatccccttttggcctgagtatgcttctagtaaacttcttattcaagtcgaaaggagtgaagatcctcccaaaaggatatattttaacaagcaggaaaattgtattctattgcgtctagataacgagcttggaggtattatagcagaagtgaatttggccgagcattctacagttattacatttttagattatcatgatggagcagctacattcctcttaataaatcacacaaagaatgaacttgttcaatacaatcaaagttctctcagtgaaatagaagattccctccctcctggtaaagccgtgttttatacatgggctgatccggtgggctctagaaggctgaagtggagatgtagaaaaagccatggtgaagtaacacagaaggatgatatgatgatgcctatagatttgggggaaaagacaatatatttagtttcattctttgaaggtttacaacgcattattttattcactgaagatccaagggtatttaaagtaacatatgaaagtgagaaagcagagttagcagagcaagaaattgcagtggcattacaagatgttggaatttctcttgtcaacaattacacgaagcaagaagtagcctatataggcattacaagttctgatgtggtttgggaaacaaagcccaagaagaaggcaagatggaagccaatgagtgtaaagcacactgagaagttagagagagaatttaaggaatatactgaatcttctccttcagaagataaggttattcagttggacactaatgttccggttcgcctaacccctactggtcataacatgaaaattctgcagccgcatgtaatagctctacgaagaaattatcttccagcattaaaagtggaatataacacatctgcacatcaatcatcatttagaattcagatttacagaatacagatccaaaatcagatacatggtgctgtatttccctttgtgttttatcctgttaaacctccaaagtcggtcaccatggattcagcaccaaagccctttacagatgtcagtattgtcatgagatctgcaggacattcccagatatcacgtattaagtatttcaaagtattgattcaagaaatggatctcaggttagatcttgggtttatctatgctttaacagaccttatgacagaagctgaggtgactgaaaatacagaggttgagctttttcataaagatatagaagctttcaaagaagaatataaaacagcctcattagtagatcaatcacaagtcagcctctatgaatattttcatatatctcctatcaagttacatttaagtgtttcactgagttccggcagagaagaagctaaagattcaaaacaaaatggaggactgattccagttcattctttaaatcttttgctgaagagtattggtgccacactgacagatgtacaagatgtagtttttaagcttgcattttttgaactcaactatcagttccatacaacatccgatctacagtctgaagtcataagacactattcaaaacaggccattaagcagatgtatgtactcattcttggacttgatgttttgggaaatccatttggcttaattagagaattttctgaaggtgtagaagcatttttttatgaaccttaccagggagccatccagggtcctgaagagtttgtggaaggaatggcactaggacttaaggcactagttggtggagctgttggtggattggctggtgctgcctccaaaatcaccggtgctatggctaagggggtagcagctatgaccatggatgaagactaccaacagaagagaagagaagccatgaataagcaaccagctggttttagagaaggcatcactcgtggaggaaaaggcttagtttctggatttgttagtggcataacaggaattgttacaaaaccaatcaaaggagctcaaaaaggaggagcagctggtttctttaaaggtgttgggaaaggtttagtaggagcggtagcaaggccaactggaggcatcatagacatggctagcagtacatttcagggaataaaaagagctacagagacttctgaagtggagagtctgcgacctcctcggttcttcaatgaagatggagttatcagaccgtacaggttgagggatgggactggaaatcaaatgttacaggcatcaaaaagtttgatatgaaaagttaatgcatgactttgcaagtgaaagccaacagtagattttagtcttaaaatttacaaactacgtacagctgtttcagtattttgaatacaaagaaaaccttttgtattggtaacttttaataggaattttaatgaatctggtttttttatagggtgttcttagttctgcactggatttgctagatttgttggaagcctttgtaccttatgtatcctcgtcattggtggtacttacttaaccaattaaaccatttctgttgtggggttattaaaccactggtagcttttataccagatatataatccttatatccaattacacatgaagaaggaaaagcaaaactcaggaacactgctattgtgaattactcttggattcttgtgctttgcctttgaaaatgcttaaatggccatgaccctcttcctgctttattctagtgtagtctttataaaacttgtgggatttgataagcagttcacatgcaaaccagtatcttttaataatacaaagtagcatctggaacaatagacagtttgaagttagaatctgcttagacaactttcttacttggtaaattcgactttttaaaacctggattatgctgtaggtaactagtaatcatatataggctataccagtgtcatgttgtttctgtggtttagaggtggaatactaaattaaatcatttgtttgaaaacaaaaaaaaaaaaa

SEQ ID NO: 895 - DNA, 4403 bp, Homo Sapiens
  NM_001018052
cccgcagtcgcgcaagcgcgagcggctgtgcgcggtgcgtggtgcgtggtgcgtgatacgagcggcggcacgtggcgcgggtgcggggcgtggagtggcgtggcgtggagtggcgtggcgtggcggggtctcgcggcgcgggcgcgcacccggagctgtggacggagagtgcctccctctggcctcagtttcctcatgttgtagtagcggagcatggcccggaccgggcccccgagaccgccccgtgcaacctcaccgccagcctgggggcctcagcgactgggacgggaccaaggggctcggggattctccctgcccccggccctggtgcgtgactgaccctcctgttcccagagcccccagcgcaggccgggatgttcgtcctggtggaaatggtggacaccgtccggatccccccttggcagtttgagaggaagctcaacgactccattgccgaggagctgaacaagaagttggccaacaaggtcgtgtacaacgtgggactctgcatttgtctgtttgatatcaccaaactggaggatgcctatgtattccctggggatggcgcatcacacaccaaagtctctctaggcttcttcgatgacattctcatccccccagagtcactgcagcagccagccaagttcgacgaagcggagcaggtgtgggtgtgggagtacgagacggaggaaggagcacacgacctctacatggacaccggcgaggagatccgcttccgggtggtggacgagagctttgttgacacgtcccccacagggcccagctcagcagatgccaccacttccagtgaggagctgccaaagaaggaggctccgtacacgcttgtgggatccatcagtgagccaggcctgggccttctctcctggtggaccagcaactagccctggggctggacagtggaccctaccagcctgcgggaaggtggtatggccggctgtgaagacaacagcagctgaggccgatgctaaggagatagtgtctcgagctggacagtgaggcaaggccaggagtgcccaccagcttgccccgctcctccaccatctaggccctgctcctccttcactgcagtgatggatccatctgtggctgtggctgttgggcctccactgaccttgactgaaaagacccttcctggaccctggacttgacaacaaacggcacagacaccaatcactcacagaacagtcactggttttggattcttgttttccttgcaagaacaaaaggttctctagaatccttcagccaccaatgaaatgatcaggcaggagaaaaactttagatgggagtcttgtcatcaaaaataaatacagttgcatggagctgcttaagatctgaaccaaactcaaaataggaagacgggggctaaaaagttattttaagaacccccccaccacaaccacagtcactccgtgggctaagcggggagcaggaagcatgtctggtcacaccatcttggaataggaagccatggctggacggatcggatccactgatggcacacgtggagctgaacttgacgccagcggcggggcggggaggcactgccctcactgttgcagttccttcattctgttgagggcactgccagcgcggaaccactcaatctgcgtctcgttgaaggtgtggttcaggaggatggtctcctgggtcccgttggggtgcttgatgatgcacttcaggggctgcaaggagaaggtgggtgtgggtggaagtggtgggtactgtgtgcccttggccccgcaggggggtcagggagacagggcactgcctggggacctaagaggtcagcaggcaaaccaaatcctaggccagtctgtgcctgatggcccaggtcagacccaggtggcacctacaggggattcctggggcccagagggtcctgcagtgggtgggctgtcccctgagtgccaggtcctggtgagtaaagggaggttggggaggtgtgagggccccgggttgactccaacccccaactctgagaagccactttgctttctctgtggggccacctggagaactgggggcctttccagctggaatgaagcctcctgggagaagctaccctggggccagtgcaggaggggaaacaaggtggctgcccctcaccccaccacctcagggggacccgggcccctaaccttgccaggggtgaagtccttcaggccctgaatggtcagcttgtccacagggtgaatcttgttgtagtcagccgggtcagcgaaggtcagaggcagcaggccctgtttcttcaggttggtctctggaaagcaggcggcattcggtcatcgggggcctgactagcctggagagcttcattttctgaacccatctggggctctgggagatgcccctaatcctgctgcctgggacaatgcccgggcagtgactatggggccctggtctgctccctttcactaggggtgcccctagcaagtgtgcgctggtgctgaggtctgcgaggccttcctgctgcacattcatgatcagaaagaaccccctggcacatgtcctagatctcagcggctcagatctacaagcctggaagcagggcctgcgggaagccgggaagctgagcgtcggatgtgcactgtgtgagcctaagaaggggcaagaggctgacgggcctgtgggctgcagtggacacagcctagaaccaggcccaactcagccacgggcagggagagtgaccttgatcactagggatgggatgaggatggcctgggtacagactccagctcaccgtggatcctggcaaagctcttggtgatgatggcccggcccccaaggtggcgaggctccagagctgcatgctcccggctcgagccctcgccgtagttctcgtctccgatcaccacccacctgatgccatgtttctgtcaggcaagcgggggtaaggttataaggcagaggagggcaccgtcctcacctgtctggccctacctgcctggcctcacccacctggcgcctgggcatcctgaggctcccggtaaaggggctggaggggcccttcctcgcctgctgcctaagggcaagtgaagcctgcgtgaatgagacccaaacgaggccccgaggggacagaggcacgtggttgtttgcagtggcaaagaagacagaagccacccattggtgcttggcagaggcaggtgtgtgtggagggaggttgggtgagacagggacggcctccgggccccacacaagatgcatctgtgaagctcaaggcgcccccttcctgggagcaccctctgccccacccagccaccagggggtgccagagtcctttcacccggctgggccaggacttgggttcagccctggttctgtttgtttctcaaagcagaaaaagtccaatcacctcagaccctctctgcctgctcactgtgaggccccgtgtagccccctctctgagcttttggcctctgacttcctgagtcggcccccttccttgtctttgtctagggccagatatcctaagatatctctcactaactcctcctggtgcagggacccggctgtaccaccggacctgggcctcatgccttctcagccacagggaggggctgcaggcctctcctcccttccacagcagtcccctttgggcttggtcggcctccttcccagtttccactcccctaatgtcctccctgcacctgccttgcaggccccttcaggagtgaccactggcattgcccctatcaactctgacccaccttgtagtagcgggcagtgtcagggacggggccaaactcctgagtgacggcattgcgcacggagttggccttgccgttttcaatgttgatggcaccaatgagcaggttgttggagatgttatccaagtgcccacggaacttgagccaggggccagcagctgagatgtggtcagtggtacacttccctttgaccttgggtggtaagtagagaggacagaggtcagggcatggccctggaggggtggatgacaagccctccagaggcaggcagcaggccccggggcccaggaggggtgacagaggggtgagaggcaggcaagtcttcagacacgtgttctgtggtcctggtgcttccaccctaaggccacatgggctcaggccaggccttcatcccctcaaaggcctctggctgctcagtctcccttatggggcagaggccgcccaaagttgggacaggtcaatgttcgctcacccttcaggcctcagctgcaagatcagccacagacctcatgctggacacaggagcccaggacatgcctgggtcctggctgatgactgattagtctcttctgtcacaggggtgcctggagaccccttaataagcagcataaataaatatctgacacagattggaggcctctggccacaccaaaaaaaaaaaaaaaaaaaaaa

SEQ ID NO: 896 - DNA, 3529 bp, Homo Sapiens
  NM_001018053
ggtcccggccacaagctgtcggctcggttcggtcgcgttacagggcaggcgccggggccaaggcagggagggatcttaggagagatcgtaggacatctgaagagctgccatgtctggggcatcttcctcagaacagaacaacaacagctatgaaaccaaaaccccaaatcttcgaatgtcagagaagaaatgttcatgggcctcctacatgaccaactccccgactctgatcgttatgattggtttgccagcccggggtaaaacctacgtgtccaagaaactaacacgctacctcaactggattggagtccccaccaaagtgtttaatcttggggtgtatcggcgtgaagcagtcaagtcctataagtcctacgacttctttcggcatgacaatgaggaggccatgaagatccgcaaacagtgtgctctggtggcgctggaagatgttaaggcgtatctcactgaggagaatggtcagattgcggtgtttgatgccaccaatacaacccgggagaggagggacatgattttgaactttgctgaacagaattccttcaaggtattctttgtggaatccgtctgtgatgatcctgatgtcattgctgccaatattctggaggttaaggtatcaagccctgactatcctgaaaggaacagagagaacgtgatggaggacttcctgaagagaattgaatgctacaaagttacctaccgacctcttgacccagacaactatgacaaggatctttctttcatcaaggtgataaacgtgggccagcgatttttagtcaacagagtccaggactacatccagagcaagatagtctactacctcatgaatatccacgtccagcctcgcaccatttacctttgccggcatggagaaagcgagttcaatctcttggggaagattgggggtgactctggcctctcggtgcggggaaagcagtttgcccaagctctaaggaaatttctggaggaacaggaaataacagacctcaaagtgtggacaagccagttgaagaggaccatacagactgctgaatctctcggggtgccctatgagcagtggaagattctgaatgagattgatgctggtgtgtgtgaagagatgacctatgcagagattgagaaacggtacccagaagagtttgcacttcgagatcaagagaagtatctgtatcgatatcctggtggggagtcataccaggacctggtgcagcggctggagcctgtcatcatggagctggaacgtcagggcaatgtcctcgtcatctcccaccaggctgtcatgcgctgcctcctggcctacttcttggataagggcgcagatgagctaccatacttgagatgccctctccataccatcttcaaacttactcctgtggcctatgggtgcaaagtggaaacaattaaacttaacgtggaggctgtgaacacgcaccgtgacaagccaactgcagcagagaccacactggctgtgcgcagacgcccctccgcagcgtccctcatgttgccttgctaatgatgtggatgttcaggcctcacctctccaaacgactgggatctactgaaaagcttgggatgtcagcttcacagaggctagaacaggaagttaagtgggaactggactttgggggccaccaaaacgaggcctggagaaacgtcaccatatttcctcccctcctgcctaatgggaatatcagttacactgaaaaatttaacttccctgtgcctcaaaacatttagcaacctgaaccagtgactttttgtcatctctgtgctgagtttggtccaagttggtcaatctcattctgtataggcatttaacatcctacctgtgactgtctgcatcctttgctggctcttttttgcccaaagtgcaaatgcacttcttcagatttacttttcaagtgagaaggtaagagctggtctctgccactgttccaggcgagcaggctagagtctaatatacttatgctagcagttaccatttgccacattggaagcaagagacaaatcaccaggtgaatggagggtcttctgagaaattcagtccctaaaacatcttctctgccttgatagaagaacagtgtcagtggcaaccttttcatttagagaagtttttcttgttccaggcccttcaggacaggatctgactgcaagactccccaaaatgggtacccatcttctaagttcccttttgtagctactgtacttttgacttgatgcatgtgcctctcatgcatcaagatggggctgatgtggttctcctgggtggttgggaatgtggactagacagaaaagtagagtgccatttatatcacgtgagtaagtcaagaaagctccttgagaatcagcccgatcagggagtgttttggcttcagaacaggtggaaggagacacgcccctctgtgggctctgtcaccatgatacagtccttgagagagctgtggctgtgacttggagggcagtagtctcctgatacctgcctcttggccactggtcactattgtggtcactgatctctcatataaaagtgagggtggcggggtcatggaccagcgcctcagtgcattagtcattcgcttttccttacagacaaatcagataactcttccccagtgattgtcaaatgtatgaatgtatctctgtaaatgtggttttgacatgtcactgttactgaaggagagtatggaatccccacaggatattatatcttgcaaggaaagtctattttttaaagaatagtatgtttttagctttacttttctttcttttccttttcactcaaatgctcacttgctgggcaaaagggtgagtagcaagaaaagtaatgatatgtagcttttctcaaatggttcttttatactgtggatgatacaggactctgttacctaagatgtgataagctgggctgcaggcggttcagcatccagcaactaggagctgcttttctacgtacaaagctgccttcaggaaggctccttaccctgtagcagatgattttcatctggctgcctaccgcatgctgtactataatgatttagttgtgatatggatttctctctgcatcgaaaactgtcttttgatgatcagacaatgtttatatttagttatttattctatccatgtaaggcatttttgagttttcttgtcactgtttgcatgtatttaatcagaatgtaatataatttatgttgtcaggtttttttttgtttgtttgtttggggttttttttgtagaaatttaggtagttagagcttttaagtctaatgtcatattaacttaagttaaatttccagaacgtagatatctgtcttctgtaaaaggaaaataacgatgttaagggacagtgaattttttttgaatactttgtttctcattgatttttattgtaagtgtaaaccaagagatgcatttctctggagaagtgtttatctcctggattaataaaatcatgctaaaatatgcgagtaatatgtattgcttttgtaataagaacataaaataaaattatttttaatta

SEQ ID NO: 897 - DNA, 3562 bp, Homo Sapiens
  NM_001018056
ctctccggccgccgccggtgcgggtgctccgctaccggctcctctccgttctgtgctctcttctgctctcggctccccaccccctctcccttccctcctctccccttgcctcccctcctctgcagcgcctgcattattttctgcccgcaggctcggcttgcactgctgctgcagcccggggaggtggctgggtgggtggggaggagactgtgcaagttgtaggggagggggtgccctcttcttccccgctcccttcccccgccaactccttcccctccttctccccctttcccctccccgcccccaccttcttcctcctttcggaaggactggtaacttgtcgtgcggagcgaacggcggcggcggcggcggcggcggcaccatccaggcgggcaccatgggcacgtccgcgctctgggcgctctggctgctgctcgcgctgtgctgggcgccccgggagagcggcgccaccggaaccgggagaaaagccaaatgtgaaccctcccaattccagtgcacaaatggtcgctgtattacgctgttgtggaaatgtgatggggatgaagactgtgttgacggcagtgatgaaaagaactgtgtaaagaagacgtgtgctgaatctgacttcgtgtgcaacaatggccagtgtgttcccagccgatggaagtgtgatggagatcctgactgcgaagatggttcagatgaaagcccagaacagtgccatatgagaacatgccgcatacatgaaatcagctgtggcgcccattctactcagtgtatcccagtgtcctggagatgtgatggtgaaaatgattgtgacagtggagaagatgaagaaaactgtggcaatataacatgtagtcccgacgagttcacctgctccagtggccgctgcatctccaggaactttgtatgcaatggccaggatgactgcagcgatggcagtgatgagctggactgtgccccgccaacctgtggcgcccatgagttccagtgcagcacctcctcctgcatccccatcagctgggtatgcgacgatgatgcagactgctccgaccaatctgatgagtccctggagcagtgtggccgtcagccagtcatacacaccaagtgtccagccagcgaaatccagtgcggctctggcgagtgcatccataagaagtggcgatgtgatggggaccctgactgcaaggatggcagtgatgaggtcaactgtccctctcgaacttgccgacctgaccaatttgaatgtgaggatggcagctgcatccatggcagcaggcagtgtaatggtatccgagactgtgtcgatggttccgatgaagtcaactgcaaaaatgtcaatcagtgcttgggccctggaaaattcaagtgcagaagtggagaatgcatagatatcagcaaagtatgtaaccaggagcaggactgcagggactggagtgatgagcccctgaaagagtgtcatataaacgaatgcttggtaaataatggtggatgttctcatatctgcaaagacctagttataggctacgagtgtgactgtgcagctgggtttgaactgatagataggaaaacctgtggagatattgatgaatgccaaaatccaggaatctgcagtcaaatttgtatcaacttaaaaggcggttacaagtgtgaatgtagtcgtggctatcaaatggatcttgctactggcgtgtgcaaggcagtaggcaaagagccaagtctgatcttcactaatcgaagagacatcaggaagattggcttagagaggaaagaatatatccaactagttgaacagctaagaaacactgtggctctcgatgctgacattgctgcccagaaactattctgggccgatctaagccaaaaggctatcttcagtgcctcaattgatgacaaggttggtagacatgttaaaatgatcgacaatgtctataatcctgcagccattgctgttgattgggtgtacaagaccatctactggactgatgcggcttctaagactatttcagtagctaccctagatggaaccaagaggaagttcctgtttaactctgacttgcgagagcctgcctccatagctgtggacccactgtctggctttgtttactggtcagactggggtgaaccagctaaaatagaaaaagcaggaatgaatggattcgatagacgtccactggtgacagcggatatccagtggcctaacggaattacacttgaccttataaaaagtcgcctctattggcttgattctaagttgcacatgttatccagcgtggacttgaatggccaagatcgtaggatagtactaaagtctctggagttcctagctcatcctcttgcactaacaatatttgaggatcgtgtctactggatagatggggaaaatgaagcagtctatggtgccaataaattcactggatcagagctagccactctagtcaacaacctgaatgatgcccaagacatcattgtctatcatgaacttgtacagccatcaggtaaaaattggtgtgaagaagacatggagaatggaggatgtgaatacctatgcctgccagcaccacagattaatgatcactctccaaaatatacctgttcctgtcccagtgggtacaatgtagaggaaaatggccgagactgtcaaaggatcaatgtgaccacagcagtatcagaggtcagtgttcccccaaaagggacttctgccgcatgggccattcttcctctcttgctcttagtgatggcagcagtaggtggctacttgatgtggcggaattggcaacacaagaacatgaaaagcatgaactttgacaatcctgtgtacttgaaaaccactgaagaggacctctccatagacattggtagacacagtgcttctgttggacacacgtacccagcaatatcagttgtaagcacagatgatgatctagcttgacttctgtgacaaatgttgacctttgaggtctaaacaaataatacccccgtcggaatggtaaccgagccagcagctgaagtctctttttcttcctctcggctggaagaacatcaagatacctttgcgtggatcaagcttgtgtacttgaccgtttttatattacttttgtaaatattcttgtccacattctacttcagctttggatgtggttaccgagtatctgtaacccttgaatttctagacagtattgccacctctggccaaatatgcactttccctagaaagccatattccagcagtgaaacttgtgctatagtgtataccacctgtacatacattgtataggccatctgtaaatatcccagagaacaatcactattcttaagcactttgaaaatatttctatgtaaattattgtaaactttttcaatggttgggacaatggcaataggacaaaacgggttactaagatgaaattgccaaaaaaatttataaactaattttgtacgtatgaatgatatctttgacctcaatggaggtttgcaaagactgagtgttcaaactactgtacattttttttcaagtgctaaaaaattaaaccaagcagcttaaccatgaaaaaaaaaa

SEQ ID NO: 898 - DNA, 1184 bp, Homo Sapiens
  NM_001018059
atgcggctgcgcttttggctcctcatttggctcctgctgggatttatcagccatcagcccacccctgtgtctttcctgaagactatcttctggtctcgaaatggacatgatggatccacggatgtacagcagagagcctggaggtccaaccgcagtagacagaaagggctgaggtccatttgtatgcacacaaagaaaagagtttcttcctttcgaggaaataaaattggcctgaaagacgtcattactctacggaggcatgtggaaacaaaagttagagctaaaatccgtaagaggaaggtgacaacgaaaatcaaccgtcatgacaaaatcaatggaaagaggaagaccgccagaaaacagaaaatgtttcaacgtgcgcaagagttgcggcggcgggcagaggactaccacaaatgcaaaatccccccttctgcaagaaagcctctttgcaactgggtcagaatggcggcagcggagcatcgtcattcttcaggattgccctgctggccctacctcacagctgaagctttaaaaaacaggatgggccgccagccacctcctccaactcaacaacattctataactgataactccctgagcctcaagacacctcccgaatgtctccttcatccccttccaccctcagtggatgataatatcaaggagtgtcctcttgctcctcttccaccctcagtggatgataatctgaaggagtatctcctggtccctcttccaccctctcctcttccaccctcagtggatgataatctgaaggactgtctctttgtccctcttccaccctctcctcttccaccctcagtggatgataatctcaagactcctcccttagctactcaggaggccgaggcggaaaaaccacccaaacccaagaggtggagggtggatgaggtggaacaatcaccgaaacccaagaggcggagggcggatgaggtggaacaatcgcccaagcccaagaggcagagggaggccgaggcacaacaattacccaaacccaagaggcggaggttgagtaagctgagaacacgccattgcactcaagcctgggcaataagaataaatccgtgggtcgaaaaaaagaaaaaaatcaaaaaacaaaacaaaacccacgctccaaaaacaaactaacgaagaataaataaataatataaaaataaaataaa

SEQ ID NO: 899 - DNA, 6719 bp, Homo Sapiens
  NM_001018069
cggatgtgtgcctggcgccggaagagaagacggcccccctctctcggcccggccatcttgtgggaagagctgaagcaggcgctcttggctcggcgcggcccgctgcaatccgtggaggaacgcgccgccgagccaccatcatgcctgggcacttacaggaaggcttcggctgcgtggtcaccaaccgattcgaccagttatttgacgacgaatcggaccccttcgaggtgctgaaggcagcagagaacaagaaaaaagaagccggcgggggcggcgttgggggccctggggccaagagcgcagctcaggccgcggcccagaccaactccaacgcggcaggcaaacagctgcgcaaggagtcccagaaagaccgcaagaacccgctgccccccagcgttggcgtggttgacaagaaagaggagacgcagccgcccgtggcgcttaagaaagaaggaataagacgagttggaagaagacctgatcaacaacttcagggtgaagggaaaataattgatagaagaccagaaaggcgaccacctcgtgaacgaagattcgaaaagccacttgaagaaaagggtgaaggaggcgaattttcagttgatagaccgattattgaccgacctattcgaggtcgtggtggtcttggaagaggtcgagggggccgtggacgtggaatgggccgaggagatggatttgattctcgtggcaaacgtgaatttgataggcatagtggaagtgatagatcttctttttcacattacagtggcctgaagcacgaggacaaacgtggaggtagcggatctcacaactggggaactgtcaaagacgaattaactgacttggatcaatcaaatgtgactgaggaaacacctgaaggtgaagaacatcatccagtggcagacactgaaaataaggagaatgaagttgaagaggtaaaagaggagggtccaaaagagatgactttggatgagtggaaggctattcaaaataaggaccgggcaaaagtagaatttaatatccgaaaaccaaatgaaggtgctgatgggcagtggaagaagggatttgttcttcataaatcaaagagtgaagaggctcatgctgaagattcggttatggaccatcatttccggaagccagcaaatgatataacgtctcagctggagatcaattttggagaccttggccgcccaggacgtggcggcaggggaggacgaggtggacgtgggcgtggtgggcgcccaaaccgtggcagcaggaccgacaagtcaagtgcttctgctcctgatgtggatgacccagaggcattcccagctctggcttaactggatgccataagacaaccctggttcctttgtgaacccttctgttcaaagcttttgcatgcttaaggattccaaacgactaagaaattaaaaaaaaaaagactgtcattcataccattcacacctaaagactgaattttatctgttttaaaaatgaacttctcccgctacacagaagtaacaaatatggtagtcagttttgtatttagaaatgtattggtagcagggatgttttcataattttcagagattatgcattcttcatgaatacttttgtattgctgcttgcaaatatgcatttccaaacttgaaatataggtgtgaacagtgtgtaccagtttaaagctttcacttcatttgtgttttttaattaaggatttagaagttcccccaattacaaactggttttaaatattggacatactggttttaatacctgctttgcatattcacacatggtcaactgggacatgttaaactttgatttgtcaaattttatgctgtgtggaatactaactatatgtattttaacttagttttaatattttcatttttggggaaaaatcttttttcacttctcatgatagctgttatatatatatgctaaatctttatatacagaaatatcagtacttgaacaaattcaaagcacatttggtttattaacccttgctccttgcatggctcattaggttcaaattataactgatttacattttcagctatatttactttttaaatgcttgagtttcccattttaaaatctaaactagacatcttaattggtgaaagttgtttaaactacttattgttggtaggcacatcgtgtcaagtgaagtagttttataggtatgggttttttctcccccttcaccagggtgggtggaataagttgatttggccaatgtgtaatatttaaactgttctgtaaaataagtgtctggccatttggtatgatttctgtgtgtgaaaggtcccaaaatcaaaatggtacatccataatcagccaccatttaacccttccttgttctaaaacaaaaaccaaagggcgctggttggtagggtgaggtgggggagtattttaatttttggaatttgggaagcagacagctttactttgtaaggttggaacagcagcactatacatgaaatataaaccaaaaacctttactgtttctaaatttcctagattgctattatttggttgtaagttgagtattccacagaaagtggtaattatctcttctctcttcctccattagaaaattaggtaaataatggattcctataatgggagcatcaccacttattaaaacacacatagaatgatgaattaaaaaagttttctaggattgtcttttattctgccacatttattgataaacagtgaaggaatttttaaaaaatttttaagaattgtttgtcacgtcatttttagaaatgttctacctgtatatggtaatgtccagttttaaaaatattggacatcttcaatcttaaacatttctatttagctgattggttctcacatatacttctaaaagaaacttttatgttataagagttactttttggataagatttattaatctcagttacctactattctgacattttaggaaggaggtaattgtttttaatgatggataaacttgtgctggtgttttggatcttatgatgctgagcatgttctgcactggtgctaatgtctaatataattttatatttacacacatacgtgctacccagagattaatttagtccatatgaactattgacccattgttcattgagacagcaacatacgcactcctaaatcagtgtgtttagacttttcaagtatctaactcatttccaaacatgtaccatgttttataaacctcttgatttccagcaacatactatagaaaacacctgctactcaaaacacaacttctcagtgtcatccattgctgtcgtgagagacaacatagcaatatctggtatgttgcaagctttcaagatagcctgaacttaaaaagttggtgcattagttgtatctgatggatataaatttgcctcctagttcactttgtgtcaagagctaaaactgtgaacctaactttctcttattggtgggtaataactgaaaataaagatttattttcatgctcacttcttaaaagtcataaaaacaatcaaataggatcatgtttattgtcatgtgtttcctggtttctgacctgtgtgcacacccctgtgtgtttataatttttaaattgaattttatatggggtttttatttgctaaaaaccaggctgttgaatcacatttgggaagggtacttatcttaatgactaatgacttaattgggaaagttgaattcttgtaaaatacaaaatccaaggacttcttggatttaatctgattgtcacttcttagcagatcacttttttgataatgaaagttaagcatactgaatgctacttttgattgacaaactggctataatagtctaggggaaaaatccctaaacagataaagattcctaaagtaatggtggcagctgatgtttcagtgaacttttatcttgatgcgtttaaatggaagtaatgccagacctgagatttttaaggcatttttacagcttgtattgaaatgattggagacatggtttctttattagctattttgagacctgtggagttaagcaagacttttaaaaattggcaccatatacatctagttagttcctttactcttatttttttaaataaaagtagtacacatcatttccagggttgtaaatatatttggggcttgtttttggtatggatttaaaaggaggatattaagtattcattctaattttgttatttttctagttgccagagatggttgcactgaaatagaacagggagttgcatacaaagcctaaatgtgtattggatttcgaaaatactaggttggtgcaattggttttgtaccaacctaacatgtctttaggaaagtaccatcatgtggaaggaaacaacaggtgttaaaaggttcaaaggaatgagaaataggaagttactagaacctaactgatgttgaccttagaggtaagattattcaggtatattagtggacctccagtccaatggtatagcaaattccagggatctcaggtgcatgcaattttactttctaaagtaaacacttagaaaatagattataacccagacgttttggattatactgagacaaatatgtaaataagttttagcaagtctgaacatgtaccagcgagatcttcaggttaactaagaaaagcccagaaacttcattatttactgtgctttgtatggcataactggtaacaaggcagtaaaatgatacatatttgaactggaccatagtaattaaatgatttatcaatatcatttgcaagataattgtcaggttgagttaatagtaagtggcagcttcccagaaatttgggttatttggcctaagctgtgccctgggattacctcttcatcttccttgacttttaagttcaaatttggaggttatgtgaagtgattgaaataaatctttcaggctgaggaagtcggtaatttcaagaatatagtgaaaacaaggttgtaatctaaacatgagaagcttaagtttaggaaatggttagaatataaattgctaaagccatcatgattttggccacagatgaaaatatgaacactggaaatgagcgccatttaaatgagatgctgtatgtaagccaggggtcagcaaagttcagcctgtgacctggtgtgtgtgggggtgtgtgtgtgtgtgtgtgtgtgtgtgtgtgtgtccgtgtccctgagttaagaatggtttttaggcttgtataggattaaaaaaaaaaaaaacccacagaaaaatgtaggcagcccagcataagataccgcctttcacagaaatgtttgctgaccccggaactgtcactctcgggttacaagagtttgtttctttgaaacagtctggctctgtcacccaggctggagtgcagtggcatgatctcaggtcactgcagcctccacctcccgggttcaagcaattctgcctcagcctcctgagtagctgggattacaggtgtgcaccaccacagacagctaattttacaggtgtacaccaccacacccaagaatcacttgaacccgggaggtgggggttgcagtgagccaagatcatagcactgtactccagtctgggtgacacactgtctgaaaaataaaagtttagttctaggtacaaattaagtggtctacccaacaggaagctgtgaaattagaagtaattttaaagcatactttacacctctatataatcaaagtaagggcaagataaaacttgttagtaaaacatgttttattattttttagataggtagcctgcaacataaaatatattttgaaagctgttaaggggtgtataatctgttaaaaaataccatgattagtatttcacatttagtgactcagatccctttgtgtaagtcctttgcgttgtgcaaagaggtttttctatgagatgagaattatgaacacttcatataggtaaattccataggttgagctggggcagaaattaatggctcctggagattgcatctttttttttttttttttgagcttagaattcccatttggacagaatttagcttttgtgctgttgattacttctgtactaaactggtagccaattgttcacttctaaatggaagggaaaaagttacccacacaagttagaaaatgatttaccgaattatttttttgagttagtatgtatatactgttttaaatcagtaatgtttgttccttttgctgcccatttgggagtatgtggcaattcctagtgctcttgtatgacattactcttcttgagacttgtatatgcaagaaagtatatataaaagatgcctggtggtaactttgtatctgagttctgattcattatggacttttagaaatctatttagataattggttcatactaggtgctcaattactctgaccttgtgtggcttaatccttaaatagttgctttaggtgttactgggtggaagcatggaaagtgaagggctaatattaaggatttttatgtattactgagtagggaaagtgggaagtagcttatctttggacagttgtattactttgcactaatcaccttgtttgcagttgtagctgattcagttctagattttaggaccaaaaagatctctaatttaaagaaacagtttttatatacctagaatgaagattctgtttaaagcggttttggttaacttggttcttgacatttgcctaaaattttgttggattgggactaaaatgttctattagccaatgaataacgtccaagtaaatttttgttttattttgggaa

SEQ ID NO: 900 - DNA, 1920 bp, Homo Sapiens
  NM_001018070
attatgaggagcaagaacgcgaaggggcctcgggtccgctaggccgggatccggagccgcccgaagccggtgccgcagccccctgcgcccccggtgcccccgacatgtccttccgcaaagtggtccggcagagcaaattccggcatgtgttcgggcagccggtcaagaacgaccagtgctatgaggacattcgcgtgtcccgtgttacctgggacagcaccttctgcgccgtcaaccccaagttcctggcggtgattgtggaggccagtggagggggtgcctttctggtgctccccctaagcaagacgggccgcattgacaaggcctacccgacggtgtgtgggcacacgggacctgtcctggacatcgactggtgtcctcacaacgacgaagtcatagccagcggctcggaggactgcacggtcatggtgtggcagatcccagagaacgggctgacctccccgctgacagagccggtggtggtactggaggggcacaccaagcgagtgggcatcatcgcctggcaccccacggcccgaaacgtgctgctcagtgcaggctgcgacaacgtggtactcatctggaatgtgggcacagcggaggagctgtaccgcctggacagcctgcaccctgacctcatctacaatgtcagctggaaccacaatggcagcctgttttgctcagcatgcaaggacaagagcgtgcgcatcatcgacccccgtcggggcaccctggtggcagagcgggagaaggctcatgagggggcccggcccatgcgggccatcttcctggcagatggcaaggtgttcaccacaggcttcagccgaatgagcgagcggcagctggcgctctgggacccagaaaacctcgaggaacccatggccctgcaggaactggactcgagcaacggggccctgctgcccttctacgaccccgacaccagtgtggtctacgtctgcggcaagggtgactccagcatccggtactttgagatcacagaggagcctccctacatccacttcctgaacacgttcaccagcaaggagccgcagcggggtatgggcagcatgcccaagcggggcctggaggtcagcaagtgcgagatcgcccggttctacaaactgcatgagcgcaagtgtgagcccatcgtcatgactgtgccaagaaagtcggacctcttccaggatgatctgtaccccgacacagccgggcccgaggcagccctggaggctgaggagtgggtgagcgggcgggatgccgacccgatcctcatctcactgcgggaggcctacgtgcccagcaagcagcgggacctgaagatcagccggcgcaacgtgttgtctgacagccggcccgccatggccccgggctcctcccacctaggggcccccgcctccaccaccactgctgctgatgccacccccagcggcagcctggccagagccggggaggctgggaagctggaggaggtgatgcaggagctgcgggccctgagggcgctggtcaaggagcagggcgaccgcatctgccgcctggaggagcagctgggccgcatggagaacggggatgcgtagggccacagccacacgccaccttcatctcctccgccgcccccttcccactcagcttctgccagcgggtcgcaccgggctagctggctgcccagagcctctgaggcagcgcaggggtcagttcccacccccacccgtcccaggcccaggccgaagccagcgcccagctttcctcactgttcctgtggaggatgtctacgcccaggcgagctcctcgacctctgagggaccatctccccgaccactgcccagccctctgctccctccccagaggaggcgggagggtgggctctatattttcattccaaataaaattctctttctaaaagccaaaaaaaaaaaaaaaaaa

SEQ ID NO: 901 - DNA, 5134 bp, Homo Sapiens
  NM_001018115
ggcctggcgggaaagtcgaaaactacgggcggcgacggcttctcggaagtaatttaagtgcacaagacattggtcaaaatggtttccaaaagaagactgtcaaaatctgaggataaagagagcctgacagaagatgcctccaaaaccaggaagcaaccactttccaaaaagacaaagaaatctcatattgctaatgaagttgaagaaaatgacagcatctttgtaaagcttcttaagatatcaggaattattcttaaaacgggagagagtcagaatcaactagctgtggatcaaatagctttccaaaagaagctctttcagaccctgaggagacacccttcctatcccaaaataatagaagaatttgttagtggcctggagtcttacattgaggatgaagacagtttcaggaactgccttttgtcttgtgagcgtctgcaggatgaggaagccagtatgggtgcatcttattctaagagtctcatcaaactgcttctggggattgacatactgcagcctgccattatcaaaaccttatttgagaagttgccagaatatttttttgaaaacaagaacagtgatgaaatcaacatacctcgactcattgtcagtcaactaaaatggcttgacagagttgtggatggcaaggacctcaccaccaagatcatgcagctgatcagtattgctccagagaacctgcagcatgacatcatcaccagcctacctgagatcctaggggattcccagcacgctgatgtggggaaagaactcagtgacctactgatagagaatacttcactcactgtcccaatcctggatgtcctttcaagcctccgacttgacccaaacttcctattgaaggttcgccagttggtgatggataagttgtcgtctattagattggaggatttacctgtgataataaagttcattcttcattccgtaacagccatggatacacttgaggtaatttctgagcttcgggagaagttggatctgcagcattgtgttttgccatcacggttacaggcttcccaagtaaagttgaaaagtaaaggacgagcaagttcctcaggaaatcaagaaagcagcggtcagagctgtattattctcctctttgatgtaataaagtcagctattagatatgagaaaaccatttcagaagcctggattaaggcaattgaaaacactgcctcagtatctgaacacaaggtgtttgacctggtgatgcttttcatcatctatagcaccaatactcagacaaagaagtacattgacagggtgctaagaaataagattcgatcaggctgcattcaagaacagctgctccagagtacattctctgttcattacttagttcttaaggatatgtgttcatccattctgtcgctggctcagagtttgcttcactctctagaccagagtataatttcatttggcagtctcctatacaaatatgcatttaagttttttgacacgtactgccagcaggaagtggttggtgccttagtgacccatatctgcagtgggaatgaagctgaagttgatactgccttagatgtccttctagagttggtagtgttaaacccatctgctatgatgatgaatgctgtctttgtaaagggcattttagattatctggataacatatcccctcagcaaatacgaaaactcttctatgttctcagcacactggcatttagcaaacagaatgaagccagcagccacatccaggatgacatgcacttggtgataagaaagcagctctctagcaccgtattcaagtacaagctcattgggattattggtgctgtgaccatggctggcatcatggcggcagacagaagtgaatcacctagtttgacccaagagagagccaacctgagcgatgagcagtgcacacaggtgacctccttgttgcagttggttcattcctgcagtgagcagtctcctcaggcctctgcactttactatgatgaatttgccaacctgatccaacatgaaaagctggatccaaaagccctggaatgggttgggcataccatctgtaatgatttccaggatgccttcgtagtggactcctgtgttgttccggaaggtgactttccatttcctgtgaaagcactgtacggactggaagaatacgacactcaggatgggattgccataaacctcctgccgctgctgttttctcaggactttgcaaaagatgggggtccggtgacctcacaggaatcaggccaaaaattggtgtctccgctgtgcctggctccgtatttccggttactgagactttgtgtggagagacagcataacggaaacttggaggagattgatggtctactagattgtcctatattcctaactgacctggagcctggagagaagttggagtccatgtctgctaaagagcgttcattcatgtgttctctcatatttcttactctcaactggttccgagagattgtaaatgccttctgccaggaaacatcacctgagatgaaggggaaggtgctcactcggttaaagcacattgtagaattgcaaataatcctggaaaagtacttggcagtcaccccagactatgtccctcctcttggaaactttgatgtggaaactttagatataacacctcatactgttactgctatttcagcaaaaatcagaaagaaaggaaaaatagaaaggaaacaaaaaacagatggcagcaagacatcctcctctgacacactttcagaagagaaaaattcagaatgtgaccctacgccatctcatagaggccagctaaacaaggagttcacagggaaggaagaaaagacatcattgttactacataattcccatgcttttttccgagagctggacattgaggtcttctctattctacattgtggacttgtgacgaagttcatcttagatactgaaatgcacactgaagctacagaagttgtgcaacttgggccccctgagctgcttttcttgctggaagatctctcccagaagctggagagtatgctgacacctcctattgccaggagagtcccctttctcaagaacaaaggaagccggaatattggattctcacatctccaacagagatctgcccaagaaattgttcattgtgtttttcaactgctgaccccaatgtgtaaccacctggagaacattcacaactattttcagtgtttagctgctgagaatcacggtgtagttgatggaccaggagtgaaagttcaggagtaccacataatgtcttcctgctatcagaggctgctgcagatttttcatgggctttttgcttggagtggattttctcaacctgaaaatcagaatttactgtattcagccctccatgtccttagtagccgactgaaacagggagaacacagccagcctttggaggaactactcagccagagcgtccattacttgcagaatttccatcaaagcattcccagtttccagtgtgctctttatctcatcagacttttgatggttattttggagaaatcaacagcttctgctcagaacaaagaaaaaattgcttcccttgccagacaattcctctgtcgggtgtggccaagtggggataaagagaagagcaacatctctaatgaccagctccatgctctgctctgtatctacctggagcacacagagagcattctgaaggccatagaggagattgctggtgttggtgtcccagaactgatcaactctcctaaagatgcatcttcctccacattccctacactgaccaggcatacttttgttgttttcttccgtgtgatgatggctgaactagagaagacggtgaaaaaaattgagcctggcacagcagcagactcgcagcagattcatgaagagaaactcctctactggaacatggctgttcgagacttcagtatcctcatcaacttgataaaggtatttgatagtcatcctgttctgcatgtatgtttgaagtatgggcgtctctttgtggaagcatttctgaagcaatgtatgccgctcctagacttcagttttagaaaacaccgggaagatgttctgagcttactggaaaccttccagttggacacaaggctgcttcatcacctgtgtgggcattccaagattcaccaggacacgagactcacccaacatgtgcctctgctcaaaaagaccctggaacttttagtttgcagagtcaaagctatgctcactctcaacaattgtagagaggctttctggctgggcaatctaaaaaaccgggacttgcagggtgaagagattaagtcccaaaattcccaggagagcacagcagatgagagtgaggatgacatgtcatcccaggcctccaagagcaaagccactgaggatggtgaagaagacgaagtaagtgctggagaaaaggagcaagatagtgatgagagttatgatgactctgattagaccccagataaattgttgcctgcttctgtgtctctgccagcctgtgatcattttgtgttagagtttgaaatccgctgtttgcctttcttactggtaggatccttttttgttcctctttttttttttttttttttttttttaaagacggggactcgctgtgtttcccaggctggagtgcagtgctgcaatcttggctcactgcaacctccatctcctaggttcaagcgattctcctgcctcagcctcctgagtagctgggacgacaggcacatgccaccatgcccagctaatttttgtatttttagtagatacggggttttaccatgtcggccagatggtctcaatctcctgaactcatgatccacctgcctcagcctcccaaagtgctgggattacaggcatgagccaccgctcccagccatattttgttcttaaagtggggtctttattaacttgtggacatcatggattgtctaacaccatcacagtccctggctcaggattctaatgtagcattatttattggtttggataaacccagctgtgctacactgcagagtaaaatctctgagtcatgattctggactttgggagctagttttgaaactctgatttattgtagaacttaggcttgtaccaattttacaaataaattctgttctaagttcaaaaaaaaaaaaaaaaaaaaaaaaaaaaaaaa

SEQ ID NO: 902 - DNA, 1474 bp, Homo Sapiens
  NM_001018122
atgcggctgcgcttttggctcctcatttggctcctgctgggatttatcagccatcagcccacccctgtgtctttcctgaagactatcttctggtctcgaaatggacatgatggatccatggatgtacagcagagagcctggaggtccaaccgcagtagacagaaagggctgaggtccatttgtatgcacacaaagaaaagagtttcttcctttcgaggaaataaaattggcctgaaagacgtcattactctacggaggcatgtggaaacaaaagttagagctaaaatccgtaagaggaaggtgacaacgaaaatcaaccgtcatgacaaaatcaatggaaagaggaagaccgccagaaaacagaaaatgtttcaacgtgcgcaagagttgcggcggcgggcagaggactaccacaaatgcaaaatccccccttctgcaagaaagcctctttgcaactgggtaagtttgtttgttttccttgcttttgaacatagtctgccaggtcaggacatggatacatttttctccctacagctctgtgctcaagccctgcagagggagatggcagagaggaaggctgcctacaggcatcacagtcccatccctgttggtaaccgtgttgtgcaaaaacaccttcatccccacccagtggggcccctgatctaaattcaaagtgtcagaggttccatatttgtaatagcaaatgggccctgactgtaaattagtgaagagtgaatgtaacttattacccacagggacaattccaaatgaaggccttaaatgatgctcagctaagctggttcttgtgtggcctctgtaccttcaaaagctgccgagtcctatgattacacgtgatgggacttgtacacttgaagtgaaacacagttttaaaacttgctttgtttagaattcccacctcatttttccatggacaaaagtattctttatgtcctagtgcacttacaatttggtattacctgggagtgaaaagaaatattacagccatgcctaagtgacttcttgaggtgagattgttctgtcagaaaaccctctcccagttcccctgcagctcttcaggaatccacatctctccagagctctttgttctcatgggtggcacctccagagtgaagaagatcctttgtcaagaagggaaacagaggggaaatgagagggtcctgcaggcagagctggaatcaacttccactctgcctcttgcaagctgtgtgaccctgggcacaatttctccttcctctggaaacctctgttttcttagatttggagcagggtggtcacactgaccttgcagagttctgagagtcagagacagaacatgaaaggcctggaaaacattctccaaaaagaagctgcaacatgtgtggacaatgggcttttcatgcctctcttactgtctcttactgtctgttgacctggtgcaagaaacatgctctggtgatggctgtgagggaggaat

SEQ ID NO: 903 - DNA, 1716 bp, Homo Sapiens
  NM_001018160
agtgcgcctgcgcgcttgtggagctggtggcggcgctccgcaggggctcggctgttttccgcgcggcaggcgcggccatggcgcagctgggaaagctgctcaaggagcagaagtacgaccggcagctgaggtattggttcgtttacaattattgatggaaatcaggtcagcggagaagatgctggaaacaatttcttccttcaaagaagcagtatcggcaagaaccgagctgaagctgccatggaattcttacaagaattaaatagcgatgtctctggaagttttgtggaagagagtccagaaaaccttctagacaatgatccctcatttttctgtaggtttactgttgtagttgcaactcagcttcctgaaagcacttcactacgcttagcagatgtcctctggaattcccagattcctcttttgatctgtaggacatatggactagttggttatatgaggatcattataaaagaacatccagtaatagaatctcatccagataatgcattagaggatctacgactagataagccatttcctgaactgagagaacattttcagtcctatgatttggatcatatggaaaaaaaggaccacagtcatactccatggattgtgatcatagctaaatatttagcacagtggtatagtgaaacaaatggacgaatacctaaaacgtataaagaaaaagaggacttcagagatttgattagacaaggaattctaaaaaatgaaaatggggctccagaagatgaagagaattttgaagaagctattaaaaatgtgaacacagcactaaatacaactcagatcccaagcagtattgaagatatatttaatgatgatcgctgcataaatatcaccaaacagactccatcattttggattttagctcgtgccttaaaggaatttgtggccaaagagggtcaaggaaatttacctgttcgaggcacaattcctgatatgattgcagattcaggcaaatatataaaactgcaaaacgtttaccgtgaaaaagcaaagaaagatgctgccgctgtgggtaatcatgttgccaaattgctgcagtccattggccaggcaccagagtccatttcagagaaagaattaaaattactctgcagcaattctgcatttcttcgagtggtaagatgtcgatccttagctgaagaatatggtttggatacaattaacaaggatgaaattatttctagcatggacaatccagataatgaaatagtgttgtacttaatgttacgggctgttgatagatttcataaacaacagggtagatatccaggagtatctaactatcaagttgaagaagatataggaaagttgaagtcttgtctcactggcttccttcaggaatatggtttatctgtaatggtgaaagatgattatgtccacgaattttgccgatatggagctgctgagccacataccattgctgcattcttggggggagctgctgctcaagaggtcatcaaaataatcaccaaacaatttgtaatttttaataatacttacatttacagtggcatgtcacaaacttcagcaactttccagttgtagagtaagcaagcaccttaagtagtgtgttaatgattgaaactgtaattgccttcgggttgtgctttagtctgtaaaattctaaaggagagctgctaaattgttttcttaataaacatttttctcatttgtaaaaaaaaa

SEQ ID NO: 904 - DNA, 1509 bp, Homo Sapiens
  NM_001018677
gggaggggcggggcctccgccaccacctcagctgcggaccgaggcgagatggcggccaccgagggggtcggggaggctgcgcaagggggcgagcccgggcagccggcgcaacccccgccccagccgcacccaccgccgccccagcagcagcacaaggaagagatggcggccgaggctggggaagccgtggcgtcccccatggacgacgggtttgtgagcctggactcgccctcctatgtcctgtacaggcatttccggagagttcttttgaagtcacttcagaaggatctacatgaggaaatgaactacatcactgcaataattgaggagcagcccaaaaactatcaagtttggcatcataggcgagtattagtggaatggctaagagatccatctcaggagcttgaatttattgctgatattcttaatcaggatgcaaagaattatcatgcctggcagcatcgacaatgggttattcaggaatttaaactttgggataatgagctgcagtatgtggaccaacttctgaaagaggatgtgagaaataactctgtctggaaccaaagatacttcgttatttctaacaccactggctacaatgatcgtgctgtattggagagagaagtccaatacactctggaaatgattaaactagtaccacataatgaaagtgcatggaactatttgaaagggattttgcaggatcgtggtctttccaaatatcctaatctgttaaatcaattacttgatttacaaccaagtcatagttccccctacctaattgcctttcttgtggatatctatgaagacatgctagaaaatcagtgtgacaataaggaagacattcttaataaagcattagagttatgtgaaatcctagctaaagaaaaggacactataagaaaggaatattggagatacattggaagatcccttcaaagcaaacacagcacagaaaatgactcaccaacaaatgtacagcaataacaccatccagaagaacttgatggaatgcttttattttttattaagggaccctgcaggagtttcacacgagagtggtccttccctttgcctgtggtgtaaaagtgcatcacacaggtattgctttttaacaagaactgatgctccttgggtgctgctgctactcagactagctctaagtaatgtgattcttctaaagcaaagtcattggatgggaggaggaagaaaaagtcccataaaggaacttttgtagtcttatcaacatataatctaatcccttagcatcagctcctccctcagtggtacatgcgtcaagatttgtagcagtaataactgcaggtcacttgtatgtaatggatgtgaggtagccgaagtttggttcagtaagcagggaatacagtcgttccatcagagctggtctgcacactcacattatcttgctatcactgtaaccaactaatgccaaaagaacggttttgtaataaaattatagctgtatctaaaaacaaaaaaaaaaaaaaaaaa

SEQ ID NO: 905 - DNA, 554 bp, Homo Sapiens
  NM_001019
ctctttccgccatctttccgcgccggtgagtagcactctctgagagctccaatttcatccgtctgccatcggcgccatcctgcaatctaagccacaatggtgcgcatgaatgtcctggcagatgctctcaagagtatcaacaatgccgaaaagagaggcaaacgccaggtgcttattaggccgtgctccaaagtcatcgtccggtttctcactgtgatgatgaagcatggttacattggcgaatttgaaatcattgatgaccacagagctgggaaaattgttgtgaacctcacaggcaggctaaacaagtgtggggtgatcagccccagatttgacgtgcaactcaaagacctggaaaaatggcagaataatctgcttccatcccgccagtttggtttcattgtactgacaacctcagctggcatcatggaccatgaagaagcaagacgaaaacacacaggagggaaaatcctgggattctttttctagggatgtaatacatatatttacaaataaaatgcctcatggactctggtgcttccaaaaaaaaaaaa

SEQ ID NO: 906 - DNA, 603 bp, Homo Sapiens
  NM_001020
gaaaagcggccagggtggcccctagctttccttttccggttgcggcgccgcgcggtgaggttgtctagtccacgctcggagccatgccgtccaagggcccgctgcagtctgtgcaggtcttcggacgcaagaagacagcgacagctgtggcgcactgcaaacgcggcaatggtctcatcaaggtgaacgggcggcccctggagatgattgagccgcgcacgctacagtacaagctgctggagccagttctgcttctcggcaaggagcgatttgctggtgtagacatccgtgtccgtgtaaagggtggtggtcacgtggcccagatttatgctatccgtcagtccatctccaaagccctggtggcctattaccagaaatatgtggatgaggcttccaagaaggagatcaaagacatcctcatccagtatgaccggaccctgctggtagctgaccctcgtcgctgcgagtccaaaaagtttggaggccctggtgcccgcgctcgctaccagaaatcctaccgataagcccatcgtgactcaaaactcacttgtataataaacagtttttgagggattttaaagtttcaagaaaaaaaaaaaaaaa

SEQ ID NO: 907 - DNA, 5416 bp, Homo Sapiens
  NM_001020658
agtgggccgccatgttgtcggagtgaaaggtaagggggagcgagagcgccagagagagaagatcggggggctgaaatccatcttcatcctaccgctccgcccgtgttggtggaatgagcgttgcatgtgtcttgaagagaaaagcagtgctttggcaggactctttcagcccccacctgaaacatcaccctcaagaaccagctaatcccaacatgcctgttgttttgacatctggaacagggtcgcaagcgcagccacaaccagctgcaaatcaggctcttgcagctgggactcactccagccctgtcccaggatctataggagttgcaggccgttcccaggacgacgctatggtggactacttctttcagaggcagcatggtgagcagcttgggggaggaggaagtggaggaggcggctataataatagcaaacatcgatggcctactggggataacattcatgcagaacatcaggtgcgttccatggatgaactgaatcatgattttcaagcacttgctctggagggaagagcgatgggagagcagctcttgccaggtaaaaagttttgggaaacagatgaatccagcaaagatggaccaaaaggaatattcctgggtgatcaatggcgagacagtgcctggggaacatcagatcattcagtttcccagccaatcatggtgcagagaagacctggtcagagtttccatgtgaacagtgaggtcaattctgtactgtccccacgatcggagagtgggggactaggcgttagcatggtggagtatgtgttgagctcatccccgggcgattcctgtctaagaaaaggaggatttggcccaagggatgcagacagtgatgaaaacgacaaaggtgaaaagaagaacaagggtacgtttgatggagataagctaggagatttgaaggaggagggtgatgtgatggacaagaccaatggtttaccagtgcagaatgggattgatgcagacgtcaaagattttagccgtacccctggtaattgccagaactctgctaatgaagtggatcttctgggtccaaaccagaatggttctgagggcttagcccagctgaccagcaccaatggtgccaagcctgtggaggatttctccaacatggagtcccagagtgtccccttggaccccatggaacatgtgggcatggagcctcttcagtttgattattcaggcacgcaggtacctgtggactcagcagcagcaactgtgggactttttgactacaattctcaacaacagctgttccaaagacctaatgcgcttgctgtccagcagttgacagctgctcagcagcagcagtatgcactggcagctgctcatcagccgcacatcggtttagctcccgctgcgtttgtccccaatccatacatcatcagcgctgctcccccagggacggacccctacacagctggattggctgcagcagcgacactaggcccagctgtggtccctcaccagtattatggagttactccctggggagtctaccctgccagtcttttccagcagcaagctgccgctgccgctgcagcaactaattcagctaatcaacagaccaccccacaggctcagcaaggacagcagcaggttctccgtggaggagccagccaacgtcctttgaccccaaaccagaaccagcagggacagcaaacggatccccttgtggcagctgcagcagtgaattctgcccttgcatttggacaaggtctggcagcaggcatgccaggttatccggtgttggctcctgctgcttactatgaccaaactggtgcccttgtagtgaatgcaggcgcgagaaatggtcttggagctcctgttcgacttgtagctcctgccccagtcatcattagttcctcagctgcacaagcagctgttgcagcagccgcagcttcagcaaatggagcagctggtggtcttgctggaacaacaaatggaccatttcgccctttaggaacacagcagcctcagccccagccccagcagcagcccaataacaacctggcatccagttctttctacggcaacaactctctgaacagcaattcacagagcagctccctcttctcccagggctctgcccagcctgccaacacatccttgggattcggaagtagcagttctctcggcgccaccctgggatccgcccttggagggtttggaacagcagttgcaaactccaacactggcagtggctcccgccgtgactccctgactggcagcagtgacctttataagaggacatcgagcagcttgacccccattggacacagtttttataacggccttagcttttcctcctctcctggacccgtgggcatgcctctccctagtcagggaccaggacattcacagacaccacctccttccctctcttcacatggatcctcttcaagcttaaacctgggaggactcacgaatggcagtggaagatacatctctgctgctccaggcgctgaagccaagtaccgcagtgcaagcagcgcctccagcctcttcagcccgagcagcactcttttctcttcctctcgtttgcgatatggaatgtctgatgtcatgccttctggcaggagcaggcttttggaagattttcgaaacaaccggtaccccaatttacaactgcgggagattgctggacatataatggaattttcccaagaccagcatgggtccagattcattcagctgaaactggagcgtgccacaccagctgagcgccagcttgtcttcaatgaaatcctccaggctgcctaccaactcatggtggatgtgtttggtaattacgtcattcagaagttctttgaatttggcagtcttgaacagaagctggctttggcagaacggattcgaggccacgtcctgtcattggcactacagatgtatggctgccgtgttatccagaaagctcttgagtttattccttcagaccagcaggtaattaatgagatggttcgggaactagatggccatgtcttgaagtgtgtgaaagatcagaatggcaatcacgtggttcagaaatgcattgaatgtgtacagccccagtctttgcaatttatcatcgatgcgtttaagggacaggtatttgccttatccacacatccttatggctgccgagtgattcagagaatcctggagcactgtctccctgaccagacactccctattttagaggagcttcaccagcacacagagcagcttgtacaggatcaatatggaaattatgtaatccaacatgtactggagcacggtcgtcctgaggataaaagcaaaattgtagcagaaatccgaggcaatgtacttgtattgagtcagcacaaatttgcaagcaatgttgtggagaagtgtgttactcacgcctcacgtacggagcgcgctgtgctcatcgatgaggtgtgcaccatgaacgacggtccccacagtgccttatacaccatgatgaaggaccagtatgccaactacgtggtccagaagatgattgacgtggcggagccaggccagcggaagatcgtcatgcataagatccggccccacatcgcaactcttcgtaagtacacctatggcaagcacattctggccaagctggagaagtactacatgaagaacggtgttgacttagggcccatctgtggcccccctaatggtatcatctgaggcagtgtcacccgctgttccctcattcccgctgacctcactggcccactggcaaatccaaccagcaaccagaaatgttctagtgtagagtctgagacgggcaagtggttgctccaggattactccctcctccaaaaaaggaatcaaatccacgagtggaaaagcctttgtaaatttaattttattacacataacatgtactattttttttaattgactaattgccctgctgttttactggtgtataggatacttgtacataggtaaccaatgtacatgggaggccacatattttgttcactgttgtatctatatttcacatgtggaaactttcagggtggttggtttaacaaaaaaaaaaagctttaaaaaaaaaagaaaaaaaggaaaaggtttttagctcatttgcctggccggcaagttttgcaaatagctcttccccacctcctcattttagtaaaaaacaaacaaaaacaaaaaaacctgagaagtttgaattgtagttaaatgaccccaaactggcatttaacactgtttataaaaaatatatatatatatatatatatatataatgaaaaaggtttcagagttgctaaagcttcagtttgtgacattaagtttatgaaattctaaaaaatgccttttttggagactatattatgctgaagaaggctgttcgtgaggaggagatgcgagcacccagaacgtcttttgaggctgggcgggtgtgattgtttactgcctactggatttttttctattaacattgaaaggtaaaatctgattatttagcatgagaaaaaaaaatccaactctgcttttggtcttgcttctataaatatatagtgtatacttggtgtagactttgcatatatacaaatttgtagtattttcttgttttgatgtctaatctgtatctataatgtaccctagtagtcgaacatacttttgattgtacaattgtacatttgtatacctgtaatgtaaatgtggagaagtttgaatcaacataaacacgttttttggtaagaaaagagaattagccagccctgtgcattcagtgtatattctcaccttttatggtcgtagcatatagtgttgtatattgtaaattgtaatttcaaccagaagtaaatttttttcttttgaaggaataaatgttctttatacagcctagttaatgtttaaaaagaaaaaaatagcttggttttatttgtcatctagtctcaagtatagcgagattctttctaaatgttattcaagattgagttctcactagtgtttttttaatcctaaaaaagtaatgttttgattttgtgacagtcaaaaggacgtgcaaaagtctagccttgcccgagctttccttacaatcagagcccctctcaccttgtaaagtgtgaatcgcccttcccttttgtacagaagatgaactgtattttgcattttgtctacttgtaagtgaatgtaacatactgtcaattttccttgtttgaatatagaattgtaacactacacggtgtacatttccagagccttgtgtatatttccaatgaacttttttgcaagcacacttgtaaccatatgtgtataattaacaaacctgtgtatgcttatgcctgggcaactattttttgtaactcttgtgtagattgtctctaaacaatgtgtgatctttattttgaaaaatacagaactttggaatctgaaaaaaaaaaaaaaaaaaaaaaaaaaaaaaa

SEQ ID NO: 908 - DNA, 3077 bp, Homo Sapiens
  NM_001020820
accaggccccgcccagcggccgcagccagccaggccgcgcccgggacgactgcagagcgcggtgctcttacagcctgttccaagtgtggcttaatccgtctccaccaccagatctttctccgtggattcctctgctaagaccgctgccatgccagtgacggtaacccgcaccaccatcacaaccaccacgacgtcatcttcgggcctggggtcccccatgatcgtggggtcccctcgggccctgacacagcccctgggtctccttcgcctgctgcagctggtgtctacctgcgtggccttctcgctggtggctagcgtgggcgcctggacggggtccatgggcaactggtccatgttcacctggtgcttctgcttctccgtgaccctgatcatcctcatcgtggagctgtgcgggctccaggcccgcttccccctgtcttggcgcaacttccccatcaccttcgcctgctatgcggccctcttctgcctctcggcctccatcatctaccccaccacctatgtccagttcctgtcccacggccgttcgcgggaccacgccatcgccgccaccttcttctcctgcatcgcgtgtgtggcttacgccaccgaagtggcctggacccgggcccggcccggcgagatcactggctatatggccaccgtacccgggctgctgaaggtgctggagaccttcgttgcctgcatcatcttcgcgttcatcagcgaccccaacctgtaccagcaccagccggccctggagtggtgcgtggcggtgtacgccatctgcttcatcctagcggccatcgccatcctgctgaacctgggggagtgcaccaacgtgctacccatccccttccccagcttcctgtcggggctggccttgctgtctgtcctcctctatgccaccgcccttgttctctggcccctctaccagttcgatgagaagtatggcggccagcctcggcgctcgagagatgtaagctgcagccgcagccatgcctactacgtgtgtgcctgggaccgccgactggctgtggccatcctgacggccatcaacctactggcgtatgtggctgacctggtgcactctgcccacctggtttttgtcaaggtctaagactctcccaagaggctcccgttccctctccaacctctttgttcttcttgcccgagttttctttatggagtacttctttcctccgcctttcctctgttttcctcttcctgtctcccctccctcccacctttttctttccttcccaattccttgcactctaaccagttcttggatgcatcttcttccttccctttcctcttgctgtttccttcctgtgttgttttgttgcccacatcctgttttcacccctgagctgtttctctttttcttttcttttttttttttttttttttttaagacggattctcactctgtggcccaggctggagtgcagtggtgcgatctcgactcactgcaacccccgcctcctgggttcaagcgattctcctgccccagcctcccaagtagctgggaggacaggtgtgagctgccgcacccagcctgtttctctttttccactcttcttttttctcatctcttttctgggttgcctgtcggctttcttatctgcctgttttgcaagcaccttctcctgtgtccttgggagccctgagacttctttctctccttgcctccacccacctccaaaggtgctgagctcacatccacaccccttgcagccgtccatgccacagccccccaaggggccccattgccaaagcatgcctgcccaccctcgctgtgccttagtcagtgtgtacgtgtgtgtgtgtgtgtgtgtgtgtgtgtgtgtttggggggtggggggtgggtagctggggattgggccctctttctcccagtggaggaaggtgtgcagtgtacttcccctttaaattaaaaaacatatatatatatatatttggaggtcagtaatttccaatgggcgggaggctttaagcaccgaccctgggtccctaggccccgcctggcactcagccttgccagagattggctccagaatttttgccaggcttacagaacacccactgcctagaggccatcttaaaggaagcaggggctggatgcctttcatcccaactattctctgtggtatcaaaaagaaaaaaaaaaaaaaagaaggagtcggggccgggcgtggtggctcacgcctgtaatcccagcactttgggagaccaagtcaggcaatcatctgaagtcaggagttcaagaccagcctggccaacatggtgaaagcatgtctctattaaaaatacaaaaattagccgggcgtggtggcgggcgcctgtaatcccaggtatttggggggactgagacaggagaatcccttcaacccgggaggtggaggttgcagtaagtcaagatggcaccactgtgctccagcctgggggacagagcgagactccatctcaaaaaaaaaaaggaatcggacgaagaaccacaggatgttgaagacaactgtctgaagtatttgtgagggacagcgatgtggccctctgtgttaagaataacgtgtcctgctttggcagagagaagaaaatagccactgcccgctttcaaggcaagatcgaccttttctgttttgttttgtttttctttctttttcctggccatgaggacaaaaattactgagtggcccttaaagagggaagtttgttttcagctgttctcttttgcccgtaggtgggagggtggggattgctgcgtcctagctagaggaatggctttgcttgaatgtgtagtgcacacgcacgggtgtttctgtgtgctagttgcttcttgctgctgcttcctgcttgtctgggactcacatacataacgtgatatatatatatatatatataaatgtataaatatatattttatttttttttaaatccctggagcttctggttcctatcagttcctgttgttaatcgtagaaccgttgtcccttcccccattcccgtatccatcatgttctttttcttttaaatatcaatataaaggtaaaagaaaaaaaaaaaaaaaaaaaaaaaaa

SEQ ID NO: 909 - DNA, 872 bp, Homo Sapiens
  NM_001022
gtactttcgccatcatagtattctccaccactgttccttccagccacgaacgacgcaaacgaagccaagttcccccagctccgaacaggagctctctatcctctctctattacactccgggagaaggaaacgcgggaggaaacccaggcctccacgcgcgaccccttggccctcccctttacctctccacccctcactagacaccctcccctctaggcggggacgaactttcgccctgagagaggcggagcctcagcgtctaccctcgctctcgcgagctttcggaactctcgcgagaccctacgcccgacttgtgcgcccgggaaaccccgtcgttccctttcccctggctggcagcgcggaggccgcacgatgcctggagttactgtaaaagacgtgaaccagcaggagttcgtcagagctctggcagccttcctcaaaaagtccgggaagctgaaagtccccgaatgggtggataccgtcaagctggccaagcacaaagagcttgctccctacgatgagaactggttctacacgcgagctgcttccacagcgcggcacctgtacctccggggtggcgctggggttggctccatgaccaagatctatgggggacgtcagagaaacggcgtcatgcccagccacttcagccgaggctccaagagtgtggcccgccgggtcctccaagccctggaggggctgaaaatggtggaaaaggaccaagatggcggccgcaaactgacacctcagggacaaagagatctggacagaatcgccggacaggtggcagctgccaacaagaagcattagaacaaaccatgctgggttaataaattgcctcattcgtaaaaaaaaaaaaaaaaaaaaaaaaa

SEQ ID NO: 910 - DNA, 10126 bp, Homo Sapiens
  NM_001023563
tggcggcgctggggaaatgagcaggtaggaggccgacagcgacctccgcgtctcggagcgaaccgtgagcctccccgtaacgagagagtttgactgtcagccaaggtcaccgggcccggcgcagggaaggggtggggctcggctgagcccgcgagacccgccctgctcgccgcagcccccgccccgctagggccacagggtcccggtatggcgatggctttgacggacccggcgcaggtgtctgtgacctttgatgatgtggctgtgactttcacccaggaggagtggggccagctggacctagctcagcggaccctgtaccaggaggtgatgctggaaaactgtgggctcctggtatctctggggtgtcctgttcccagacctgagctgatctaccacctagagcatgggcaggagccatggaccaggaaggaagacctctcccaaggcacctgtccaggtgacaaaggaaaacccaagagcacagaacctaccacctgtgagctagccttgtctgaaggaatctctttttggggacaactaacacaaggagcttcaggggactcccagttggggcaacccaaggatcaggatgggttttcagaaatgcagggagaacgcttgagaccagggttagattcccaaaaggagaagcttcctggaaaaatgagccccaaacatgatggtttagggacagctgatagtgtgtgttcaaggattatacaggatcgagtctccttaggagatgatgtccatgactgtgactcacatggatcaggtaaaaatccagttattcaggaagaggaaaatatctttaaatgcaatgaatgtgaaaaagtgtttaacaagaaacgcctgcttgctcggcatgagaggattcactctggagtgaagccctatgaatgcacagagtgtggaaaaacctttagcaagagtacatacctcctgcagcaccacatggtccacactggggagaagccctataagtgcatggagtgtgggaaggcttttaatcggaagtcacaccttacccagcaccagcggattcacagtggagagaagccttataagtgcagtgaatgtggaaaggccttcacccaccgctccacttttgtcttgcataacaggagccacactggagaaaaaccctttgtgtgcaaagagtgtggcaaagcctttcgagataggccaggtttcattcgacactacatcatccacagtggtgagaatccctacgagtgcttcgaatgtggcaaggtcttcaaacacagatcatacctcatgtggcaccagcagactcataccggggagaagccctatgagtgcagtgaatgtgggaaggccttctgtgagagcgcagcgctgattcaccactatgtcatccacactggagagaagccctttgagtgcctcgagtgtgggaaggctttcaaccaccgatcctacctcaaaaggcaccagcggattcacactggggagaagccatatgtgtgtagtgaatgcggaaaggccttcacccactgctctactttcatcttgcataaaagggcccacactggagaaaaacctttcgagtgcaaagagtgtgggaaagcctttagcaatagggcagacctcattcgccacttcagcatccacactggagagaagccctatgagtgcatggagtgtggaaaggccttcaaccgcaggtcaggcctcacaaggcaccagcggattcatagtggagagaagccctatgaatgcatcgagtgtgggaaaacattttgctggagcacaaacctcattcgacactctatcatccacactggagagaagccgtatgagtgcagtgaatgtggaaaggccttcagtcgcagctcgtccctcactcagcatcaaaggatgcatactgggagaaatcctatcagtgtaacagatgtgggaagaccttttacaagtgggcagacctcagtcaacatccaagaacttttattggggaaaaactttttgaatgtcaccactgaggaaaatcttttgcaagaggaagcatcttacatggcatctgatcgtacataccaaagagaaaccccacaagtgtcttcactgtgagaaaaccttctgttgccaaatgtcatttgtcacctaaggagtcatattagaaaatcacgcagcttagagccttattctccatccgaattcatcctggaaaaacacccagtggttattacgcacttgggaaaacctttagctccatctttctcattagtttacagtgcaatgttatctcaggaatttttataaacagaaagaggtgacatagaaaagaaaatgaaatgcagacactgcttttatactgttgtcttgtatgtacatttctgtcctgtgtcaggaaagttagtaagggaaggtctggaaacttactcaatgtctttgttctacaacattgtctcttcttaagaagcattgtttttatgagaaataatgaagccttgagttatgaaatacttttatatttaaggattaaaagaaacatgaatgcgcacattttattgtaccacttaatactgtttaggtctttgattttttaaaaaaattcttttttaatgggttttaaacactaacactgagaatttttcttgattcccatctgttggtttacttgattgctatagctgtatggtaaatctcaaaattaggtaatgtgatttcttttttcttactatttttatttaaaattcatttagcattcctagtttgactttccatatacactttaggattggtttttctgtttttcaaatattcttgcttggattttgatagaaattgagttaaatctatagatcaatgtgttggaaattggcatcttagtcttccaattcatgaacatagcctatcttttcattatttaaattttctttgatatatttcattactgttttatagtttacacagtataactcctgcacatttaaaataagaattatagctgcatagttttttgagtgattgtaaatggcattgatatttaaagtttcaatattcacatgatgttggctagtatacagaaacattattttttcaatcttattttgctgtcttgcaaccttcctaaactcattatttcttgccatttcttttgggagaatccttaggattttaaatatagaaatgtcatttgcaatttgggacagttttatttcttgcttcccatctgtataccttttatttgcttttctcatgttattgtactaggtaggatttccagtgtgatgttgaatacgaatagtgacaagttatccatgccttgttcctgatattagggggaaatgttcagtttctcattattatgatgttgaaagttgcttccaaagagtttctctatcgagtttagaaagtttccctctattcctaatttgctgggatttttttggttattattaataagtgttgaattttgtcatatgctttttctccaccaattgatttaattatgtgatgttacttctatagtcagttgatatgatgtgttaccttgattgagtttcaagtattgaaccagcctcacatctttgtgataagccctacttgatcatggagtataattttgtttgtgtactatgctacagtatttcatttgctagtattttgttgaggaagctttcctctgatttcatgagtgataatctgtagttttctttcttcaactgttactgtttggttttgatgtctagatgataactaacctcctaacatgaattggaaggaattctcttctgtttttttggaagatcatgtgtagaattggtgttatttgttcctttaatgtttggtagctttctccagtgaagaagtgggacctggagattttccttttgaatgctttttaattatgtatttattttatttaataggtatagaactattcagagtatttcatattggatgaatttttatagattttcttaaggaagtgttcattttatgtaaatgttctaatttgtagcattctttgaaatatttccttttatcctcttgatggcagcaggatctgtacttatgttccttgttgtattcttgatattggaaatgtatcacttattattgtcagtctttgtagacatatgtcaatttcattgatcatttcaaagaaatagcactttatatcactgatttttctccagtctctgttcttaatttcactgatatctgctctgatgtgtattgtatcctttctcctacttgctctggttgtatttgactcagtggtttcctgacgtggatgtttaggttattgatttgaggctttttttcttttttaatataagctttaagttctatacatttttcttacactgctgttagtttcatcccacaagtcttaatatgcttttgattatcttactcagttctaagattgcctgattccttttgagacatcttctctaacccaggaattatttagaagtatattgtttaatagtgtttggagtattccctgctatttgttattgatttctaatttgttttgcatttgatgttactgttgaaatttgttgactttttttccttatgacccaggatataggctgtcttgttttacatagctgcttgaaaagaatgtgtgttctcggtcatttggtggagtttctgtaaaagtttgtatgatcctgttagttggtggtgttatttaggtctcctgtatccttgctgattttctgtctagtatttctatcaattgccaagagaaggatgttgaagtcctgagctataattgtggaattacctattcctcctttaagttctatcagtttttgctccacataatttaaagctctgttgtttggtatatacacatgtaggtttgcttagtattcttggtgtattgacccttttataattaagtaatgtccctttttgttcctgttaatactcttatcaatttttatctgatatttgtgtggtcagtcttacgttttggttaatgcttgcatgatttacacttcatcatttttttaaaccttatctatatcactatattgggagtaagtttcttgtgaatggcgtatatttgggctgtggttttatatccagtttgcgtatctttttttttttttttttttttttttgagacggagttttgttcttgttgcccaggctggagtggagtggtgcgatctccgctcactgcaacctccgcctcctgggttcaagtgattctcctgcctcaggctcttgagtagctgggattacaggcatccgccaccatgcctgactgattttttgtatttttagtagagatggagtttcaccatgttggccaggctggtctcgaactcctgacctcaggtgatccacctgcctcagcctcccaaagtgctaggattactggtatgagcaaccacgcacagcattttttttttttttttttttttgagacggagtcttgctctgtcgccctggctggagtgcagtggcgcagtctgcaacctctgcctcccgggttcaagccattctcttgcctcagcctcccaagtagctgggattacaggtgcctgccaccacacctagctaatttttatatttttagtagagacggggtttcatcatgttggtcaggctggtctcaaactcctgacctcaggtgatctgcccacctcagcctcccaaagtgctgggattacaggtatgtgtcactgtgtctggccccagtttgcatatttctgtcttttattggtgtatttagaccatttaaagtttacaataattatgttagtgctatgtctgctattttatgattagttttttgtgtttcctgttgcttctttcttggtttgtttgggtttttttttttttgtctttaacattttttagaattccatttgatatatttgtagtgttttttaaatatatttctttgtatttttgtattaattttttagtggttgctttaagtagtataatgtacatatgtaacataattacagttaatggtatgaaaaatttagcactttgatgtatagaaaccttacttggtcccttcaccttgcctgttaatataattgtctaaagtaattcctcttcaaaattgagcaccatgttggaaaatgtaatttttgcttccactgtcaaatatattttacaaaagtcacaggaagtattgcttgttgatctctttacccattccactattctttcttgaaattctaagccaccttctattaacattttctttctgtttggcgaacttgtgtaaccttttttctagggtcagtctgctggtgtctctaaaagtgtctttatgttcccttcattcctgagggatatttttgtgggataataggatttagggtctgcagttcttttagtacttgagaaacatgtttgttccttctgtccgctatggtttcagatgagaaatctgttgccatttgaaccattgttccctagttcataatgtgccatttttatcaacctgcgttcaaagtgttttgttttttttgtagtgttcagaagtttggttatgaggtgtgtgacatggaatttttttgagtgtatcatgtttggtttttgtttagctttttgatttgtcggtttatgccctttgccaaatttgggaatttttaaccattatttcttgaaatattttttcatccctactctttctcctctctgtgatatgaatggtagagcttttgttactgtctcagaggtctcttgtgctttcatgtttaccccctttttctggtctatttttccctttttttcatattggttaatttctgttgactttttttcagctcactgattctttttttctgccatatgcagtctactgttgagcttgtccaatgagttttcgttttggtttttgtatttttcagttgtttaatttccatttgttttgttttgttttgttttgtttttttgagacagactctttgctctgttgcccaggctggagtgcagtggcgcgatctctgctcactgcaagctctgcctcccgggttcatgccattctcctgcctcagcctcccgagtagctgggactacaggtgcccgccaccatgcccggctaattttttgtatttttagtagagacggggtttcactgtgttagccaggatggtctcgatttcctgatctggtgatccacctgcctcggcctcccgaagtgctgggattacaggtgtgagccactgtgcctggcctccatttggttcttttgtacatctttgatttctttgcttagtttataatactaaagggctcagaaaacagaaaaaactaaattccagagtcatggttttctggtggtttgtctcaatatttgaatagaaatcctaaattatctggaggagtagaagtcctgtaatcttttatattgggcttcttaaatatttctgtcaacagatcttatatcagggtgatctgcatatcattcagagttacgtactccacgggaaggttgtatgtaaaatcctccagctctgtaagccttgttatatcctcaatggagaaggggtcattccttttctaagatcactcttacacttttttattagacacacacacacccttccccaaccaaacttgtctaagtcctctgtctttcatactcttgtttagtctttaacttctccttattaaccagcttctttcccataatgtatagctttagtcggatctcaagcctcgtttccaacctatttcacccttccttgcctatcaagctctggttattctttcttccacacacatgccctgagtaactattctgtgcactgtcgccacccctttacatttccttttactccccagatactactaaatggcttccaccaccgttgcctgacttaagcacgtctcagaaaggtcccttttgaccccctcactctctttttggacctccatactgctaaatctctgacttgaaggtcctttcctggcttctgtgaattcctggcttttttcctttttagggtctgtgtctttcttccatctgtaaaacagctttacttcccagcatccatcatgatcattgctgttttctaacttgtccttcaccccatgactgagttaatttgcgctgaagacactttactctcaattatctacagtgtttccctaaatctgtgtctccaggttggatgtttctcatgtcgttaaccactggtcatccttccacaccttttctgtatttgcactcactgagcctatatgcatgtatcatgtggccatgaccttggccgtggggatgcacccataatcatcataagagaacacaaattattactgtgtatcagacattgtttcgaatgttttacatgcgtcagctcttttaacctttatgacaactccataatgttatttcccccctttaactgattagaaaactgaggtacagaaagattaaggaatttgtcaaagatttcacaattatgaaatttgggtttggggactggaagccactgcactggcttcagaatccatgtccttaaccactttattgcttctcataaggtgggtctttgtttcctggtcatcacttgtttttactaaaatgggtcaaactgtgctcatttatttataatctactattcttatttgacagtacatcttggccattccttcaagcaaatgagataaaccagactcactctttaatgcctgcataagctattgtgactgtagaaaagacggagaatgtctgggtttgaggatatgtgggaggggtggggagaaggagtagagaagggctaaggcatgcatgttgttttaggtgtgtttgagatgcctgaagaacatcagtgtatccccctaatttctgtcatgttactcaaaccagacacattgtggccatttctttttcctttatcattcccacgtccggccactgccccattcctttttgttccgtagtagaccctcaatatatatgtgtgtgttggtaaatggccatacacagcagggtattttttattattattttcagttccctcagcgcgtttaccacaaagctgtgcatataggtggcaccatatatggcgtaccttgacctcgaagagaatctacatggacttttatggacctacgtacacaattttagaaatcataataaatgaatgctggagtcctcaagaccccttccagatttgatttgctaggaagactcacaggactcagcattttgtcatactcaatggctatgatttaccacaccgaaagaatccagagcaaactcagcaaaaggctcaaacccaagtccagaggaaaccaggcacaatctttgagaatcttaatgaaatcacacaggatgtgcttcattgaagctccatctgggacttaaaacaacacacgtgagatgtgttccaggaagtcgtcttgagcacccattgctcagagtttatattggacttgctttctagcacataccacaattgtagacctccagaagaacaggaggtgttcagcgtaagacaatttaggcacacggagctacttctcattactgggaacaatgggaaacttcccaaaacctaaagtacagactccagccaaggatgaaccttgcaagatcaaagaatagcagtctctggcctgctctgttctctttttcacagtaacttaaatggaaaaatgctgagttagcttaagtttctgtaacaaacattaagcaaataaaattttctataacagaaataagccatagctttgagatgaaggcttatatacgtgtaaaccattgtaaccaagaaaaaaaaaaaaagtcagagtcacagtgaaaatacttaacaaactagccaggatttaattcagtgatgacagggaacagaggaagtcttgtgagaaaggatcttgcctctgcctagtatctttcacagataggcttcaagtggtttgatttgcagatacaccctttcttggcctttatttcggcaaagatgtgatgggtaggtaaatgccgtgttctttccctagcacgtatgtcagtttctcatccactctttgttcttgctattgaaagttgtagcttctggctacaacagagatagttgaagaatatggagttcgccataatttatcattaaatgtggataatttgagattaaagaatatgttgttgcaggcttagtcactttga

SEQ ID NO: 911 - DNA, 4271 bp, Homo Sapiens
  NM_001023567
gcctctgggtcagttacgcagctgtcttccaggtgactggatgtgttgatcagcgctcgctgggatttggctgacgtggccccagccccgcctccctccccaccccacaatggcagaagaaactggacagagtaaattagctgcagccaagaaaaagttcaaagaatattggcagagaaaccgccctggtgttccagcagcagcgaagaggaacacgaaagcaaatggcagtagccctgagacggccgcttctggtggttgccactcatctgaggcttcctcctccgcctcctcctctctgcatgcgcgtcagagcccgtgccaagaacaagcagcagtcctgaactcgaggtccataaaaatcagtcgactgaatgacaccatcaaatctttgaaacaacagaagaaacaagtggaacatcagctggaagaagaaaagaaagcaaacaatgagaaacagaaagctgaaagggagctagagggtcaaatccagagattgaacacagagaaaaagaaactaaatacggacctgtatcacatgaaacattctctcagatactttgaagaagagtccaaggatctggccggccgcctgcaacgttcatcgcagcgtataggagagttagagtggtctctctgtgctgtcgccgccacacagaagaagaagccggatgggttctcgagccgcagtaaagcacttctcaagcggcagttagagcagtccatacgggagcagatactgctgaaaggacacgtgacacagttgaaggagtcgcttaaagaagtccagctggagagagatcaatatgctgaacaaataaaaggagagagggcccagtggcagcagaggatgaggaaaatgtcgcaggaggtttgcacattgaaggaggagaagaagcatgatacgcatcgggtagaggagctggagaggagcttgtccagactcaaaaaccagatggctgagccactgcccccggatgccccagcagtgtcctctgaggtggagctgcaagacctgaggaaggagctggagagagtggcaggagagctccaggctcaggtggaaaacaatcagtgcatcagtctcctgaaccgtgggcaaaaggagaggcttcgcgagcaggaggagaggcttcaggagcagcaggagaggcttcgggaacgggagaagaggcttcagcagctggccgagccacagagcgacttggaggagctgaagcacgagaacaagagcgcactgcagttggagcagcaagtaaaggagctgcaggagaagctgggccaggtgatggagacgctcacctcggccgagaaggagccagaggcagcagtcccagcctcagggactgggggcgagtctagcggccttatggacctcctggaggagaaggcggacctgagggagcatgtggagaaactggaacttggattcatccagtaccggagagagagatgccatcagaaagtacatcgccttctaacagagccaggggacagtgccaaagatgcgtcaccgggaggaggccatcatcaggctggcccaggacaaggaggagaggaaggtgaagctgctggagctgcaggagatggtgttgcggcttgtggcagctacagcgaggggcacggcaaattcctggccgctgcccggaaccctgctgctgaacccagtccaggagccccagccccccaggagctcggggctgccgacaagcatggtgatctttgtgaggcgagcctcaccaacagcgtggagcctgcacaaggagaagccagggagggttcttcccaggacaaccctactgcacagccagtcctgcagctccttggtgagatgcaggaccaccaggagcacccaggcttgggcagcaactgctgtgtgccatgcttttgctgggcttggctgccgagaagaaggagataaacaccaccatcatcaaagagctgctcaagaaatttttaaaaacgaaacaaagttatggggttaatctcctacacaattcatttacttcatttgaatgttagagctactcatgattatttgtgtttctaatttatagtttaagtttatttgtaaaaagttaaaagagagtgggtctctgtgcctctcactgatgttcactctggcatcctttagcatttttcttttttcatttcataattgtaggtcattagcatgcatatcgagtttgcccttacgtggtgggagttcaaacacacaaagacccactctttgcacaaaactgttctcgctggtttggaataggctcccgtgcttttttaatgttattgcagcatggatgttcattacagaattcagataaaatttgctaatgttctgctatgatgtttgatctcatcttaatcacagtgagctcttccatagctcaatatgcggtttgccctcaagtgtgcactgtttattactttgtaatatgccactatgagtactgacacttagagctgtttaaaggccgagaactggaaacagcctttcctccattttctgtgtattggtgatgggagtgataaccttttgggggagctttctaaatctcgcagaagaggaaagtggcctgctctggcaggtatgtgcaggatacagtgtgtttcatctgttccggtgccaagaatgagcactgtactgtggcagttccctttggatttgtatgtgctctgggctcatgaagatattgcatcgtgagctgcagcagttgcactctttttcagtgacctaaaaatggcttatttccgaggaatgaaaggctgccatcgttggctgtggatgtggaaaacctttcctagcttagagcatttgtatctacaatacattttaaagtcagagttcgtgttccctgttttaatcacatgactacctgtcccagtacacgaaagggcgctggttggcattcttcttaatgtatttagtaaagatcataagacatcctttaagagtttaaatgtctctgaaacaggcatacaggctctagtcaagaatgaattagagtgaaggaaagctgtgtgacacctggcattcctctctgttcatggagcttctttgaggcttgaagtttgattttactatctagacctctctggctaatacctattcttcaaccacctcggttactctgacataggaatttacttcttttccttgagtggaaaacactttagaaaataataacaaacattattataaactaatatatgtgagagtacttagttgaaacaaaaaggaattttagtagacagtattatattatctttgaaaatcaaggagaagtttatgcaactgaaaatgtttacacactgtgctgcaatctactgtttgtgaatgtcaatgtattatcaggaaacatgtctatacgatcgcagagttgtatttcctcacaaacttctttacgaagagtgaaatatgtttttgtacctctcagtttcagtcagggacatattttgtgcaatatttctgtgattgtgcctatgcgtgatgagtgaatgcatttcaatcatacattgcctaaatcataacttgatgatgcttgggaaagaatcaacagttaaaacttcatgaagttctaatgtctgtgttccaaaacacatcacattattaggttgtagggagatatgtatgtgtgctccctggggtggggagttttctagttactagaccatctccatttttagcacttggcagcctcatgatccttttataaataggagattaacaggagagcagcaatacgattttgccaatggaataacagatttgccggcattcactgaaagagggcagatattgggtccttgtgacttcaactgactcttccgaattgtatgaatttatcaatgtattagataaacccagtttcagaataataaagaaaaaatattagaccaaataatgtggctaatagtggtatgatttctagcccgtgggtttaaaactgtatcctaaagagtcattttaaaataatataaatatttaaaagtgtaactgctatctttatgttctgaaataagttaaaacattttaaaatatgaatactgtagtttaaaagaaagaaatggtgggaaggaaaagtagagaaagaaatgccaattccagtccaaagctttgtttgccaagttttcttagaatgaattttaccaatgtatgggttcttgttaacagaatgtgtaacagaaatactgaaagacttttgcctaaagtggcattattgactgctggtgtgatgctactgtaatgtgataaattattaaattgttgcaaa

SEQ ID NO: 912 - DNA, 2195 bp, Homo Sapiens
  NM_001023571
cgcctccaggccccttcccgcgtcgcgacgcacgctgccccggaaggccgcggcgctgtagtgcggcgtgggagccccaggttctttagtggaagaacgcgaagcgaggatgagtgatccgtggaggcagtaacaggcgcggcgagggagaagtgattcccgaagaatcaaggctgggccggacccggtggcctggcaacagggtaataagagaaatgaagccaacaggtacagacccaaggatcttatctatagctgctgaagttgcaaaaagccctgagcagaatgtccctgttatactgttgaagttaaaagaaataataaacatcacacctttaggaagctcagagttgaagaaaatcaaacaagatatatattgttatgatctcattcaatattgcctcttggtcctcagtcaagattattctcgaatccagggtggttggactacaatttcccagcttacacagatattaagccattgctgtgtgggcttggagccaggagaagatgcagaggaattttacaatgaattacttccatcagctgcagaaaattttctagttttggggagacaattacaaacatgttttatcaatgcagctaaggctgaagaaaaagatgaattactacactttttccaaattgtgactgattctctcttctggcttttgggaggccatgttgaacttattcagaatgtactacaaagtgatcatttcttacatttactgcaagctgacaatgtccaaataggatctgcagtcatgatgatgctacagaatatactacagatcaacagatccaaacgatcaaagatgttgctggagataaataggcagaaggaagaagaggacctcaaattacaattgcaacttcaaagacagagagccatgagactttcccgagaattgcagctgagtatgctcgaaatagttcatccaggtcaggtggagaaacactatcgggaaatggaagagaaatcagcactgattatccagaaacattggagagggtacagggaaaggaaaaattttcaccaacagaggcagtctctcatagagtataaagcagctgtcacacttcaaagagcagcgcttaaattcctagcgaagtgccgtaagaaaaagaaactatttgctccttggcgaggactccaagaactcactgatgcacgccgagttgaactgaagaaacgagtggatgactatgtcagaagacatttgggctctccaatgtcagatgtggtcagtagggagctccatgcccaagctcaagaacgactgcaacactactttatgggcagggccctagaagagcgagcccagcagcacagagaagctctgatagcacagatcagcaccaacgttgaacagctaatgaaggcaccaagtctgaaggaggcagaagggaaagaacctgagctcttcctaagtagatccaggcctgtggcagccaaggccaagcaggcccatctcacaaccctgaagcacatacaagcaccctggtggaagaagcttggagaagaatctggagatgagattgatgttccaaaggatgagcttagtatagaattagaaaatttattcattggtggaaccaaaccaccttagtgagtaaccctaagaattgacacaaatctcatattttaggagattatattggttctgcctctggcatgctggtagactagggccatcctaacttattattttccagaggttctcctccagacaagacctgcagtaagcaaagagttatattctacctctctctcaattttctttttcttttctctgtatcctcatcgttagccacacacagatttgtgtggcttttattgtagaactaaacttagcatagtgttctgttgtttacatgaagtgtgtttttctttggtttcttctgttttccaactaaatatttttttctaaataaatattttcaacaattgatttgaaaaatttgtcaggattatttcaacttttcacatttgttatctgaaattcctatttcctgttaacataggaggtgtgtgcagactttattaatgtgaggaaaagaaatgctcaattgaaggacatttccctgttttctataaagcaatggttgaactcattttctattttgttatttctaaaaggaactgcataccaaaaaaatgcattctttctattaaactgtgagaactacat

SEQ ID NO: 913 - DNA, 2007 bp, Homo Sapiens
  NM_001023587
cttgcgcggtgtggcggccgatgccgctataaaggcttgttttgctgcagggctcatgctcgggagcgtggttgagcggctggcgcggttgtcctggagcaggggcgcaggaattctgatgtgaaactaacagtctgtgagccctggaacctccactcagagaagatgaaggatatcgacataggaaaagagtatatcatccccagtcctgggtatagaagtgtgagggagagaaccagcacttctgggacgcacagagaccgtgaagattccaagttcaggagaactcgaccgttggaatgccaagatgccttggaaacagcagcccgagccgagggcctctctcttgatgcctccatgcattctcagctcagaatcctggatgaggagcatcccaagggaaagtaccatcatggcttgagtgctctgaagcccatccggactacttccaaacaccagcacccagtggacaatgctgggcttttttcctgtatgactttttcgtggctttcttctctggcccgtgtggcccacaagaagggggagctctcaatggaagacgtgtggtctctgtccaagcacgagtcttctgacgtgaactgcagaagactagagagactgtggcaagaagagctgaatgaagttgggccagacgctgcttccctgcgaagggttgtgtggatcttctgccgcaccaggctcatcctgtccatcgtgtgcctgatgatcacgcagctggctggcttcagtggaccaaattttcaggatggctgtattctgcggtcagaatgagagagtcaagctgggcagaatctctcgccaagagttcagccttcctttggagactgctccatcagtgccgaggtgtgtgggaacaggcttcactgcaccgccatcttactgagttgcttcacgtgaggaaaagggggctttggccctgtgactcagttccacattttggattgcatactggaaaagaagccaatcttcttgctagtaaaccagcaacccggctgtatacagtggtgacccaagcaatggatataaacctaaaaatctgagggaggggagaggtggaatacagtagttcttggaatctgaagtctcctatttgatcaggttatttcctgggacttggcaaaaatctgattggtggggatctcctaggacctagtggacatctggtattaatttaatctcaggaaaaacaagaaattaacccagagagagtctgggttttggaattcagcgtagctacctccagaccgtggtgtctggcctccatttttgtctgtcattcagctctgacttacagctgcagtcacctttgctataaggcacctgggtagaagggtggatgggcttcacatcaatttttttcttcctttagggtgggggattggtttggctttcttttgttgtggttttttgttttatttttgtcaagattgatttttagatgcaaggacttgaaaagacccagaaggatgccaccagtttttccttgaggcctaggattttttattctgtcccgagcagaggtaattcctcacaacttagtgcaccagtagcaccagccattttgagcagagtacctctttggggagcttttcgttttgttttgtttttaattctctttccttagcagcaaggtcttttttcctagagaatctactccgttgcagaatcattgcaacctcaggagccctcactgattgagtgctgtcagcctgatatactactttggactctggaaacagatatgggttctattctctatttctactgtgtgtcgttaaacaaccgtcggagaccagatgacctgttagatggctagtcctgtataactcgactctgtatgtttcaatgtatgttactgcaatgcttcacctgctgtacagtgtttgtgagatgctctttgaagatggtacttttatattttttcattttcaataaaagtacattccttcccaaaaaaaaaaaaaaaaaaaaaaaaaaaaaaaaaaa

SEQ ID NO: 914 - DNA, 1940 bp, Homo Sapiens
  NM_001024070
cctgtggccgctcccggctcggagtgtgatctaagcaggttgcgtaccttcctcaggtgactccggccacagcccattgtccgcggccaccggcggagtttagccgcagacctcgaagcgccccggggtccttcccgaacggcagcggctgcggcgggtccatggagaagggccctgtgcgggcaccggcggagaagccgcggggcgccaggtgcagcaatgggttccccgagcgggatccgccgcggcccgggcccagcaggccggcggagaagcccccgcggcccgaggccaagagcgcgcagcccgcggacggctggaagggcgagcggccccgcagcgaggaggataacgagctgaacctccctaacctggcagccgcctactcgtccatcctgagctcgctgggcgagaacccccagcggcaagggctgctcaagacgccctggagggcggcctcggccatgcagttcttcaccaagggctaccaggagaccatctcagatgtcctaaacgatgctatatttgatgaagatcatgatgagatggtgattgtgaaggacatagacatgttttccatgtgtgagcatcacttggttccatttgttggaaaggtccatattggttatcttcctaacaagcaagtccttggcctcagcaaacttgcgaggattgtagaaatctatagtagaagactacaagttcaggagcgccttacaaaacaaattgctgtagcaatcacggaagccttgcggcctgctggagtcggggtagtggttgaagcaacgaagtcaaataaatataataaagggttgagccctctactttcttcttgccacctttttgtggcaatattaaagtgaactgctaatagtgtctgcagaaccatagcttccacgcacctgaacgagcacagaatgaactgacggtggaagacattatgagctgtgtccaacgttttaaccaaagcgtatcgtaccaacgatctgtgaaaatgcactggaagcttctggtcccggtttcctttgtggtctatgtgggtcttgtcctcattgtaactccgtatagatggtataggtattttaatcctggaagctgttgccttattaatgattatcttaaaatttcctccattggggcagcgtgggccaaattaaaacaaacaaaaccgcaactcctccacagaaacacaaacacagttattccatgaagtttagtatttggttgacatagtgctcttcaaattcatcccattaccctaaaagtaataactttgatgcttgctttaactttagtcccatctctgccactttgatgctatttgggttatgatggggcaagatggcagaggtattgggtttttttgtttttttccattcctctctacttctgtttcctagctttttctttctggagtttaagtacagtgatggttggcttgagtacctttttaaatctagcccagtataaacattagcctgcttaatatttagacatttataggtagaattctgagcactcaactcatgtttggcattttaaagtaaaaacaagtgtgacttcgaggaccaaagaaattgtcagctatacatttatctttatgaactcatttatattcctttttaatgactcgttgttctaacatttcctagaagtgttcttataaaggtctaatgtatccacaggctgttgtcttattagtaaatgcaaagtaatgactttgtctgttttactctagtctttagtacttcaaaattaccttttcatatccatgatcttgagtccatttgggggatttttaagaatttgatgtatttcaatacactgttcaaaattaaattgtttaattttatgtatgagtatgtatgttcctgaagttggtcctatttaaattattaaactattgtaactttgttcttgtgaaaaaaaaaaaaaaaaaa

SEQ ID NO: 915 - DNA, 1852 bp, Homo Sapiens
  NM_001024071
cctgtggccgctcccggctcggagtgtgatctaagcaggttgcgtaccttcctcaggtgactccggccacagcccattgtccgcggccaccggcggagtttagccgcagacctcgaagcgccccggggtccttcccgaacggcagcggctgcggcgggtccatggagaagggccctgtgcgggcaccggcggagaagccgcggggcgccaggtgcagcaatgggttccccgagcgggatccgccgcggcccgggcccagcaggccggcggagaagcccccgcggcccgaggccaagagcgcgcagcccgcggacggctggaagggcgagcggccccgcagcgaggaggataacgagctgaacctccctaacctggcagccgcctactcgtccatcctgagctcgctgggcgagaacccccagcggcaagggctgctcaagacgccctggagggcggcctcggccatgcagttcttcaccaagggctaccaggagaccatctcagatgtcctaaacgatgctatatttgatgaagatcatgatgagatggtgattgtgaaggacatagacatgttttccatgtgtgagcatcacttggttccatttgttggaaaggtccatattggttatcttcctaacaagcaagtccttggcctcagcaaacttgcgaggattgtagaaatctatagtagaagactacaagttcaggagcgccttacaaaacaaattgctgtagcaatcacggaagccttgcggcctgctggagtcggggtagtggttgaagcaacgtctgcagaaccatagcttccacgcacctgaacgagcacagaatgaactgacggtggaagacattatgagctgtgtccaacgttttaaccaaagcgtatcgtaccaacgatctgtgaaaatgcactggaagcttctggtcccggtttcctttgtggtctatgtgggtcttgtcctcattgtaactccgtatagatggtataggtattttaatcctggaagctgttgccttattaatgattatcttaaaatttcctccattggggcagcgtgggccaaattaaaacaaacaaaaccgcaactcctccacagaaacacaaacacagttattccatgaagtttagtatttggttgacatagtgctcttcaaattcatcccattaccctaaaagtaataactttgatgcttgctttaactttagtcccatctctgccactttgatgctatttgggttatgatggggcaagatggcagaggtattgggtttttttgtttttttccattcctctctacttctgtttcctagctttttctttctggagtttaagtacagtgatggttggcttgagtacctttttaaatctagcccagtataaacattagcctgcttaatatttagacatttataggtagaattctgagcactcaactcatgtttggcattttaaagtaaaaacaagtgtgacttcgaggaccaaagaaattgtcagctatacatttatctttatgaactcatttatattcctttttaatgactcgttgttctaacatttcctagaagtgttcttataaaggtctaatgtatccacaggctgttgtcttattagtaaatgcaaagtaatgactttgtctgttttactctagtctttagtacttcaaaattaccttttcatatccatgatcttgagtccatttgggggatttttaagaatttgatgtatttcaatacactgttcaaaattaaattgtttaattttatgtatgagtatgtatgttcctgaagttggtcctatttaaattattaaactattgtaactttgttcttgtgaaaaaaaaaaaaaaaaaa

SEQ ID NO: 916 - DNA, 767 bp, Homo Sapiens
  NM_001024074
ttaatacttctatttcttacaaaacaaccgtataggggttaaagtatcagtgcaaagtcccgttcaaatattgactcagtaatgagctctacaagccagcctttgtggcatgttaaattcaaaacaagcttagcatttttttttttttttttggatagaaactggtgggggtggggaaagaaagagggaactgggaagagaaggaggggaacttaaaccttgcttcctgctctgtctttctcagaaaaccaaatatggcatcttccatgaggagcttgttttctgaccacgggaaatatgttgaatctttccggaggtttctcaaccattccacggaacaccagtgcatgcaggaattcatggacaagaagctgccaggcataataggaagataccagaattgctgttaacaaataaaatactggccagatgtgttggttcacgcctgtaatcctagcacttcgggaggctgaggcgggaggattacttgagcctaggagtttgagaccagcctgggcaacatagcaagatcccatctctacaaaaaagtgaaaaagttagctgaacaaggcggcatgcacatgctactccagacgctgaagtgggaagatcacttaagtccgagagatcgaggcttcagtgagatatggctgagacactgctctcagcctggatgacagagtgagaacctgtctcaaacaagagaaaaaaataaatcaaatgctactcaaaattctcaaaaaaaaaaaaaaaaaaaaaaaaaaaaa

SEQ ID NO: 917 - DNA, 4219 bp, Homo Sapiens
  NM_001024218
agcagcgctcatggcgaagaggcttaaggccacaaaaccgtgggacagcaggaggaagagaagccaggtatctccactccagctgccctgcctcagactcctcagtttcgcacgtgaggatcgtcttgcaggcactgactggagatggaatcctaaagcataggtgaagcggaaatcctccttcagggagagcccactgaggaagccagcggctagcacgaggcaggacaggatacctccctcttcgcccacggcggcctctctgtcatagtagccaccgttctgccactcatgcagctttctaagacacctctcggttccccagcgctttcagtggggcggccggccattcccgagggttgcaagaggaggcccggggtgctgagccagcctcgctgcccccgcgtagaaagccggcccgccggcgagagccagcctaaggcgcggacaaccaacgaggtgtcaggctcggcaggggattgcttctgtctggggcccggccgaggttgcgttcgtgcctcgcgcgcacacgctccgcgttcactcagccaatccggtgctactcgcgcgcccaggagcgatccgcggtcctactcaggctgggccggctccttcccgctcccaatactcagcacccgagctctcactcctcccctcactctccacgagttccacgcctaggggtgtagctccgcccttgtccccgagtccgcccccgcaacctccagagcgtgtgctatcctttcctctcagtcctgccatctagctgccttgggtctcgcgctccgcagagcgttccgacactctccggcctcgttctgccgcctccgcgcgctctccccgtgcggccaccgcgccccccaagcttgcctccttcttgccggacttggggccgcgcgccctgactccttcccctcccgcggacccgcgcactcccggcgcggcctctcccccacgcaggccaccgtgcactctgtggcctccccctccttccccgctctcctcgcgcttctctggctccctagctgtcgcgctctcctcggcgagcgcgctcccggcccgcgcgctccgggctccggtttctcccggctcctgtcagtgcggtgactgcgctgggaaacatggcgaccgagggaatgatccttactaaccacgaccatcaaatccgtgtcggagtccttacagtgagtgatagttgcttcaggaatcttgcagaagaccgcagtgggataaatctcaaagatctcgtacaagatccttctttgttgggtgggactatatcagcatacaagatagtaccagatgaaatagaagaaatcaaggaaaccctgatagattggtgtgatgaaaaggaacttaatttgatattaacaactggaggaacaggatttgcaccacgagatgtcactccagaggccacaaaagaagtaatagaacgggaagcaccagggatggccctggcaatgctgatgggatcacttaatgttacacctctgggcatgctctctaggcctgtatgtggaatcagagggaaaacgctcataattaacctgccaggtagcaagaaaggatctcaggaatgctttcaattcatactgccagctctacctcatgccattgaccttttacgtgatgccattgtaaaagtaaaggaggtgcatgatgaacttgaagatttgccttccccacctccccctctttcccctcctcctactaccagcccccataaacagacagaagacaaaggagttcaatgtgaggaagaggaagaagagaagaaagacagtggtgttgcttcaacagaagatagttcctcatcacatataactgcagcagccattgctgccaagattccagactccatcatttctcgtggtgttcaggtgctcccacgagacacagcctccctcagcactactccttcagaatcgcctcgtgctcaggctacatctcgcctctctacagcttcctgcccaacaccaaaagtccagtccaggtgcagcagcaaggagaacattctcagagccagtcacagtgctgtcgatatcaccaaggtggctagaagacatcgcatgtctccttttcctctgacatctatggacaaagcctttatcacagtcctggagatgactccggtgcttgggacagaaatcatcaattaccgagatggaatggggcgagtccttgctcaagatgtatatgcaaaagacaatttaccccccttcccagcatcagtaaaagatggctatgctgtccgagctgctgatggcccaggagatcgtttcatcattggggaatcccaagctggtgaacagccaactcagacagtaatgccaggacaagtcatgcgggttacaacaggtgctccaataccctgcggtgctgatgcagtagtacaagtggaagataccgaacttatcagggaatcagatgatggcactgaagaacttgaagtgcgaattctggtgcaagctcggccaggccaagatatcagacccatcggccatgacattaaaagaggggaatgtgttttggccaaaggaacccacatgggcccctcagagattggtcttctggcaactgtaggtgtcacagaggttgaagttaataagtttccagtggttgcagtcatgtcaacagggaatgagctgctaaatcctgaagatgacctcttaccagggaagattcgagacagcaatcgttcaactcttctagcaacaattcaggaacatggttaccccacgatcaacttgggtattgtaggagacaacccagatgacttactcaatgccttgaatgagggtatcagtcgtgctgatgtcatcatcacatcagggggtgtatccatgggggaaaaggactatctcaagcaggtgctggacattgatcttcatgctcagatccattttggcagggtttttatgaaaccaggcttgccaacaacatttgcaactttggatattgatggtgtaagaaaaataatctttgcactacctgggaatcctgtatcggctgtggtcacctgcaatctctttgttgtgcctgcactgaggaaaatgcagggcatcttggatcctcggccaaccatcatcaaagcaaggttatcatgtgatgtaaaacttgatcctcgtccagaataccatcggtgtatactaacttggcatcaccaagaaccactaccttgggcacagagtacaggtaatcaaatgagcagccgtctgatgagcatgcgcagtgccaatggattgttgatgctacctccaaagacagaacagtacgtggagctccacaaaggcgaggtggtggatgtcatggtcattggacggctatgatggtcaccagcaggagaaagctttgatgcatgtccacatatcattgactgtatcctgtaatatgcaacggcacagctagttttcccgatttggataaaagttgatctgtatagtcaacatcttgaactatatttcaaatgaatttaaatatcttttaaagaaaaaaacacctaaaaataaatcttaacagaaaattctgttctgattatatcaaggcaaatttttcctttcttgcaaattgctttgtgtgttcaatgctaggtctgatagcgatagcttttagtagacagcggtaggtgcctgcagaacttgtgtttttctcatctttaaaatacaactacttatgctcttaaatcaaggctgtctgcttatttatactagcgtaggcaacacttggatttcccttcttagtatgcttcataactgctttacagagagcttttgcttgttctttctcatgtatctcgtgtttatgtgcacagtgccaaaagaagactgactgggtggaggctctgccttgcctcaagaaccatcccctgcagagcatccagggaggtttctcgccccaatagcctcacggcacagtactcttgggcagtaactggacaccttttatttgaagaaacaaactgaagaaaaaatgcttccttaagtgctgacagcctttttaaccaatacatttaaaattgtacagaacaaaaaaataaaatcaaagactgatcttgtacagatattagtgttaccagcattcatgtggaaatcaagagcaaagacaaaataatgttaaacaattctgtaccataacattttctgtaatgatactgaaacttaatgaataaaaaaattccttgatcattatttaaaaatgtaaaaaaaaaaaaaaaaaa

SEQ ID NO: 918 - DNA, 2020 bp, Homo Sapiens
  NM_001024227
gcccgcgcgtggacggttgggattagcggccgcgggggccggtgggggtcgtggggcctcccccacccgagtacaggcgagcgagcggcatccgggcggacccccgcctcggggaccgggaaactgaggctcgggcggcctgagacgccgtcaaggtcatgtaggtggtgggggcttgcatcttcgcctcccgactccatccagttcgtgtttgctgtgaagacggtgtccctggccagtgtccttccacctgtccacaagcatggggaacatcttcgccaacctcttcaagggcctttttggcaaaaaagaaatgcgcatcctcatggtgggcctggatgctgcagggaagaccacgatcctctacaagcttaagctgggtgagatcgtgaccaccattcccaccataggcttcaacgtggaaaccgtggagtacaagaacatcagcttcactgtgtgggacgtgggtggccaggacaagatccggcccctgtggcgccactacttccagaacacacaaggcctgatcttcgtggtggacagcaatgacagagagcgtgtgaacgaggcccgtgaggagctcatgaggatgctggccgaggacgagctccgggatgctgtcctcctggtgttcgccaacaagcaggacctccccaacgccatgaatgcggccgagatcacagacaagctggggctgcactcactacgccacaggaactggtacattcaggccacctgcgccaccagcggcgacgggctctatgaaggactggactggctgtccaatcagctccggaaccagaagtgaacgcgacccccctccctctcactcctcttgccctctgctttactctcatgtggcaaacgtgcggctcgtggtgtgagtgccagaagctgcctccgtggtttggtcaccgtgtgcatcgcaccgtgctgtaaatgtggcagacgcagcctgcggccaggctttttatttaatgtaaatagtttttgtttccaatgaggcagtttctggtactcctatgcaatattactcagctttttttattgtaaaaagaaaaatcaactcactgttcagtgctgagaggggatgtaggcccatgggcacctggcctccaggagtcgctgtgttgggagagccggccacgcccttggctttagagctgtgttgaaatccattttggtggttggtttttaacccaaactcagtgcattttttaaaatagttaagaatccaagtcgagaacacttgaacacacagaagggagaccccgcctagcatagatttgcagttacggcctggatgccagtcgccagcccagctgttcccctcgggaacatgaggtggtggtggcgcagcagactgcgatcaattctgcatggtcacagtagagatccccgcaactcgcttgtccttgggtcaccctgcattccatagccatgtgcttgtccctgtgctcccacggttcccaggggccaggctgggagcccacagccaccccactatgccgcaggccgccctacccaccttcaggcagcctatgggacgcagggccccatctgtccctcggtcgccgtgtggccagagtgggtccgtcgtccccaacactcgtgctcgctcagacactttggcaggatgtctggggcctcaccagcaggagcgcgtgcaagccgggcaggcggtccacctagacccacagcccctcgggagcaccccacctctgtgtgtgatgtagctttctctccctcagcctgcaagggtccgatttgccatcgaaaaagacaacctctacttttttcttttgtattttgataaacactgaagctggagctgttaaatttatcttggggaaacctcagaactggtctatttggtgtcgtggaacctcttactgctttcaatacacgattagtaatcaactgttttgtatacttgttttcagttttcatttcgacaaacaagcactgtaattatagctattagaataaaatctcttaactatttcaaaaaaaaaaaaaa

SEQ ID NO: 919 - DNA, 1998 bp, Homo Sapiens
  NM_001024228
gcccgcgcgtggacggttgggattagcggccgcgggggccggtgggggtcgtggggcctcccccacccgagtacaggcgagcgagcggcatccgggcggacccccgcctcggggaccgggaaactgaggctcgggcggcctgagacgccgtcaaggtcatgtaggtggtgggggcttgcatcttcgcctcccgactccatccagtgtccctggccagtgtccttccacctgtccacaagcatggggaacatcttcgccaacctcttcaagggcctttttggcaaaaaagaaatgcgcatcctcatggtgggcctggatgctgcagggaagaccacgatcctctacaagcttaagctgggtgagatcgtgaccaccattcccaccataggcttcaacgtggaaaccgtggagtacaagaacatcagcttcactgtgtgggacgtgggtggccaggacaagatccggcccctgtggcgccactacttccagaacacacaaggcctgatcttcgtggtggacagcaatgacagagagcgtgtgaacgaggcccgtgaggagctcatgaggatgctggccgaggacgagctccgggatgctgtcctcctggtgttcgccaacaagcaggacctccccaacgccatgaatgcggccgagatcacagacaagctggggctgcactcactacgccacaggaactggtacattcaggccacctgcgccaccagcggcgacgggctctatgaaggactggactggctgtccaatcagctccggaaccagaagtgaacgcgacccccctccctctcactcctcttgccctctgctttactctcatgtggcaaacgtgcggctcgtggtgtgagtgccagaagctgcctccgtggtttggtcaccgtgtgcatcgcaccgtgctgtaaatgtggcagacgcagcctgcggccaggctttttatttaatgtaaatagtttttgtttccaatgaggcagtttctggtactcctatgcaatattactcagctttttttattgtaaaaagaaaaatcaactcactgttcagtgctgagaggggatgtaggcccatgggcacctggcctccaggagtcgctgtgttgggagagccggccacgcccttggctttagagctgtgttgaaatccattttggtggttggtttttaacccaaactcagtgcattttttaaaatagttaagaatccaagtcgagaacacttgaacacacagaagggagaccccgcctagcatagatttgcagttacggcctggatgccagtcgccagcccagctgttcccctcgggaacatgaggtggtggtggcgcagcagactgcgatcaattctgcatggtcacagtagagatccccgcaactcgcttgtccttgggtcaccctgcattccatagccatgtgcttgtccctgtgctcccacggttcccaggggccaggctgggagcccacagccaccccactatgccgcaggccgccctacccaccttcaggcagcctatgggacgcagggccccatctgtccctcggtcgccgtgtggccagagtgggtccgtcgtccccaacactcgtgctcgctcagacactttggcaggatgtctggggcctcaccagcaggagcgcgtgcaagccgggcaggcggtccacctagacccacagcccctcgggagcaccccacctctgtgtgtgatgtagctttctctccctcagcctgcaagggtccgatttgccatcgaaaaagacaacctctacttttttcttttgtattttgataaacactgaagctggagctgttaaatttatcttggggaaacctcagaactggtctatttggtgtcgtggaacctcttactgctttcaatacacgattagtaatcaactgttttgtatacttgttttcagttttcatttcgacaaacaagcactgtaattatagctattagaataaaatctcttaactatttcaaaaaaaaaaaaaa

SEQ ID NO: 920 - DNA, 5010 bp, Homo Sapiens
  NM_001024401
agccgcgatgccgcgatggagcgcagcccgggcgggcgccggggccggggcccgagcgccaggcggagcgcgagctggagccgcagccggagcccgggccaggccgggggccgggagcgcagggccgggctgctcgtagcggcggcgaccgagccccccagcggctgaggggcttccagcgcccgccggtggccgggacccactaaagcccccgcagccgaggagtgcggggagcccccttccacatccaggatccggcgagcctcggggaagagggggggccctcccggatccgacaccgagcgactcccctgcggggaaagcggagacttcctcggtatttagaagacagcaagccccctacggcaccgcaaggactccccctcctcagtctgggcccccgccccaagacctagaacgcagtgcccccaggccgggattgcgagaaccccctcccaagatccggtcattacaactccacacctcaagacaagaagacccagctcagaacgcccctagatcaggggatcccaattccccccaactccggtacatagaaatcccaaatctaggcagccggggacagcaagagacactctcaccagcaagaagcctcggggatcccccccctaaagctccaggacttgggcgactgagcccctggcggcaccgcttgcaccccggtccatggtcgtggcgccctgagcccccggggccgggcagacgaagaccgcgacggcgcccaggccccctgccgcggcgtccccgcggccccagcccagggagaagatgagcgtgggctgcccagagcctgagccgccccgctccctgacctgctgtgggccggggactgcccctgggcctggtgccggtgtgccccttctcactgaagacatgcaggccctgactctccgcacactggccgccagcgacgtcaccaagcactacgaactagtccgggagctgggcaaaggcacctatgggaaggttgacctggtggtctacaagggcacaggcacaaaaatggcactgaagtttgtgaacaagagcaaaaccaagctgaagaacttcctacgggaggtgagcatcaccaacagcctctcctccagccccttcatcatcaaggtctttgacgtggtctttgagacagaggactgctacgtctttgcccaggagtacgcacctgctggggacctgtttgacatcatccctccccaggtggggctccctgaggacacggtgaagcgctgtgtgcagcagctgggcctggcgctggacttcatgcacgggcggcagctggtgcaccgcgacatcaagcccgagaacgtgctgctgttcgaccgcgagtgccgccgcgtaaagctggccgacttcggcatgacgcgccgcgtgggctgccgcgtcaagcgcgtgagcggcaccatcccttacacggcgcctgaggtgtgccaggcgggccgcgccgacgggctggcggtggacacgggcgtggacgtgtgggccttcggcgtgctcatcttctgcgtgctcaccggcaacttcccgtgggaggcggcgtcgggcgccgacgccttcttcgaggagttcgtgcgctggcagcggggccgcctgccggggctgccttcgcagtggcgccgcttcaccgagcccgcgctgcgcatgttccagcgcttactggccctggagcccgagcgccgcggcccagccaaggaggtgttccgcttcctcaagcacgagctcacgtccgagctgcgccgccggccctcgcaccgcgcgcgcaagccccccggggaccgcccgcccgccgccgggccactgcgcctcgaggcgcctgggccgctcaagcggacggtgctgaccgagagcggcagcggctcccggcccgcgccccccgccgtcgggtcggtgcccttgcccgtgccggtgccggtgccagtgcccgtgccggtgcctgtgcccgagcccggcctagctccccaggggccccccggccggaccgacggccgcgcggacaagagcaaagggcaggtggtgctggccacggccatcgagatctgcgtctgagtcgcctccgccgccctcggacccgggagcagcccgggcccgccccgagccggtgcccggtgcggcggtagggaatggagccacctcgccgcggggcagggggcgcagcggtagactaggcaggacgcggcccggcacctggtccgtccccggcgggctggtgagggggccaccaaagacccctagcgcggcctggtgagcgggggcttggcccagaggagccaagccgcacagacccgagaattcggaggccaccacacaacacacacacacacacacacacacacacacacacacacacacacacacacacacacgccaggagcaagggagctttcgggccacactcccagacgcctccctgagccctggaacccggactcgttgctcctggccttccataccccctggcagatcatcctgcggtcccaccccagatcccctcctcctcgccatcccattctgccccctccccaccctgggtacagaaagggactgaagtgttgggcagagagggggcttaaggcccctgggcacaggctgggatcagggcagtgagcgaagggcagctgtgtcctgccctcccttctggaggctggaggggagaggccaagcccttggaaaatgtagcaaatgtctggatgtcgcataagtgcgtgtatgtgcgggacaggccccgagaagctagtgactcctgcacacccccattgcacaaatgaaatcacagcccaggagggagggtagcttggcactggctgagaaatagagctctctccccgcccctccccctaaccacaagggattgtcctgacaacttgtggggatagaagggctcacagggcaggggtctcagctgcccccatccttagggcaggggagttagtgtggagccgagagcaggtcccagctccccctgccagccgcactgtcccaggcccagggacctctgccgggtcctcccagcccttgccacacagcctagacgtagtagcctgggcttccagcaggtggcgagctggttcgtgctggaaatttctcctgggtttcttggggtcaaacatgccaacctccaagaccccatcctcacgtctcccacttttctggcgctggagtgtgcagggcgtaggacctgcatgtgtgggtgtgagaatgggggcggtggacaccagggggcgagtgtgtgactaggtgtgtgtgcacatgtgtagggtgcagacgcatgggtgccatcctttgcgttcagtgactgtgcgtccagacccctcaccagcggcccccccaccacaccctggtcctcccaggcagctgtcccagggcgcccaggcctgccttgcaccacagccctcaggaaatccggcaaggaggcccctgcaggttggttcaggcccccaggtagcaaaacagagacaacagcagccccgcctgaccccctgcccctctctgtggaggcccgggacccccgcaataagcaccacatgggtgaggctgtccctgtcagggtcccctgccagggtccctcctggggttctgggccatttgaggggctctttgatgggccaggccggccagagtgaactccgagcactttctggctggtgccccaacctctccactccccactcattcccaccttgaaaaagggctataggtcccctgccctgcccgggtccagtttacaaacagtgtggggtggccccagggcctggccccactctccctgctgtgcccactcctctccagactccacctccccagtgggtatgggccctccacatgccaggtaagtagcaaacccccactccctccaaggaccaggtctcagagaaggccctggtcactgcccccggcccacctggagcccatcggggctgcctctcccagccgcgacttctccttttgccttaggcctcgcgacatcctgatctctcctgcaataactaggaatcgagattccacagtagacgtcccttgccgtgctcgctctctctctcgcgcgcgctctctctctccctctctctctctctctctctctctctctctctctctctctctctctctcctctctttctctctctccctctctctgttaagatcctgttcgggagtttccccagccgttgtagtatctagtatgttagagttgggaggggaccatagttatgtagcccagccccctcattcccagaggcacccagagggccagcctccagcctgaccccagagcagaaccggaacaccaggttggggccctggtgctgccacctcctctgctggtcgggctgggaccctttgccccttaggagaggtgttggtcacagatgtttacctcagtttatgtcactgtcgaagaaacaaaaaataatagcaaaaaataacactgtagacatgaagacttagaagacaaaaaaaaaaaaatcacacaaaaaatctcccttgttgcgattcttctgtgaaggtacagtgtgtatgtgtgtatgtgtgtatgtgtgtgcgtgtctctgtcccagaccctgtgtcccccacactgccccctgtccttcggtgcttcccagagacccctctgagctggcctgtggggcacgggaagccccctggatgggaggcggggccacaggtcggctagagggtctccaccaggcccactgaacagaaccccacggctgccagaatgttccctgagcccacactgtggccagtgggacagtcctggtggctgacatcagcgtccatgcttggctcagggcctggggcggggtcctgggtagagtcctagccccagagccccagcccctcatgtcttgccgcccttcctccatgtgtttgtaaatactctggcatcctttggccctgagaaggtttttaaatgtgttatttacttctctaaacatgacgattgctataaaaataaacaaaagtttagaaaaatgaaaaaaaaaaaaaaaaaaa

SEQ ID NO: 921 - DNA, 4983 bp, Homo Sapiens
  NM_001024463
gattgggccgctgtcaggtgtcgctgcctgcaggttcggctgcgcgagcggagggaggcgggactcaagagtagccttcctcgaggacctgcctttcccatttgctgcctgaagttaatgtttcttgctggccaaatcagggacatgccggcattagcgggatgagtgggtgttccggcagggatgtggtcattgacggccagtgagggcgagagtaccacggcccacttcttccttggagctggagatgaggggctgggcacccgtggaataggcatgaggccagaagagagtgacagcgagctccttgaggatgaggaggatgaagtgcctcctgaacctcagatcattgttggcatctgtgccatgaccaagaaatccaagtccaagccaatgactcaaatcctagagcgactctgcagatttgactacctgactgttgtcattctgggagaagatgtaatccttaatgaacctgtggaaaactggccatcctgccactgcctcatctctttccactccaaaggctttcctctggacaaagctgttgcttactccaagcttcgaaacccctttcttatcaatgatctggccatgcagtattacatccaagataggagggaggtgtaccggatcctgcaggaagagggtattgatctgcctcgatatgctgtgctcaaccgtgatcctgcccggcctgaggaatgcaacctgatagaaggtgaagaccaagtagaggtcaatggagctgtctttcccaagccctttgtggagaagccagtgagtgcagaagaccacaatgtttacatctactaccccagctcagctggaggaggaagccagcgtctctttcgtaagattggcagccgaagcagtgtttactctcctgagagcagcgtccgaaagacggggtcgtacatctatgaggagtttatgccaacagatggcacagatgtcaaggtgtatacagtggggccagattatgcccatgctgaagctagaaaatctccagctttggatgggaaggttgaacgagacagtgaggggaaagagattcgatatccagtcatgctgactgccatggaaaagctggtggccaggaaagtctgcgtagctttcaagcaaacagtttgtggatttgaccttcttcgtgccaatggtcattcctttgtgtgtgatgtcaatggctttagttttgtcaagaactcgatgaaatactacgatgactgtgccaagattctggggaacaccataatgcgggagcttgccccacagttccagattccatggtccatccccacggaggctgaggacattcccattgttcccaccacatctggcactatgatggaacttcgttgtgtcattgcaattattcgtcatggggatcgtactcccaagcagaagatgaagatggaagtgaaacacccaaggttttttgctctgtttgaaaaacatggtggctacaagacagggaaattaaaactcaagcgacctgagcagctccaggaggtgctggatatcacaaggctgttgttggctgaactggagaaagaaccaggtggtgagatcgaggagaagactggaaaactagagcagctgaagtctgtactggagatgtatggtcacttctcaggtataaaccggaaggtacaattgacttactaccctcatggagtaaaagcttctaatgaggggcaagatccacagagggaaactctggccccatctctgttgctggtactgaagtggggtggagaactgactcctgctggccgtgttcaggctgaggagctggggcgagcttttcgctgcatgtaccctggaggacagggtgactatgctggcttccctggttgtgggctgcttcgtctccatagcactttccgccacgatctcaagatctatgcctctgatgagggtcgtgttcagatgactgctgctgccttcgccaagggccttctggctctagaaggggagctgacacccattttggtgcaaatggtgaagagtgccaacatgaatgggctactggacagcgatggggattccttgagcagctgccagcaccgggtgaaggctcggctgcaccatattctacagcaggatgcgccctttggccctgaggactacgatcagctggctcccaccagaagtacttccctgctcaactccatgactatcatccagaatcctgtgaaggtctgtgatcaggtatttgccctgatcgaaaacctcacccaccagatccgggaacgaatgcaggaccccaggtctgtagacctgcagctctaccacagtgagacactagagctaatgctacagcgttggagcaagctggagcgtgactttcgacagaagagtgggcgctatgatatcagtaagatccctgacatctatgactgtgtcaagtatgatgtgcagcacaatgggagtctgggacttcaaggcacagcagagttgctccgtctctctaaggcactggctgatgtggtcattccccaggagtacgggatcagtcgggaggagaaactggaaattgctgtgggcttctgtcttccactgttgcggaagatactacttgacctgcagagaacccacgaggatgagtactcccgaggcgtgctctccccaggtcgccacgttcgaacgcgtctctatttcaccagtgagagccatgtccactccctgctcagtgtcttccgttatggaggacttcttgatgagacccaggatgcagaccgggcattgcagacttcaccccagcctcctgagggccctggccttccgaggagatcacccctcattcgtaaccgaaaagctggttccatggaggtactttctgagacttcatcctcgaggcctggtggctaccggctcttttcatcttcacggccacccacagaaatgaagcagagtggcctaggctcacagtgcacagggctgttcagcaccacagtgctgggtggctcctccagtgccccgaatcttcaggactacgcccgcagccatggcaaaaagctaccacctgccagtctgaagcaccgagatgagctcttgtttgtcccggccgtaaaacgattttctgtgtcgtttgcaaagcatccgactaacgggtttgaagggtgttccatggtgcctaccatctaccctctggaaacactgcataatgccctttccctacgtcaagtgccacctatggaaaccagccagccatacgaggaggtcagccagccatgtcaggaggtccctgacatcagccagccatgccaggacatttctgaggcgctcagccagccatgtcagaaggtccctgacatcagccagcaatgccaggagaaccatgacaatggtaaccacacatgccaggaggtccctcacatcagccagccatgccagaagtccagccaactgtgccagaaagtctctgaggaagtttgccagctatgtctggagaactccgaggaggtcagccagccatgccagggggtctctgtggaggttggcaagctggtccataagttccatgtaggggttggtagcttggtccaggaaacccttgtagaagttggcagcccagctgaagagatccctgaggaggtcatccagccataccaggagttctctgtggaggttggcaggctggcccaggagacttctgcgatcaatctgttatctcagggcatccctgagattgataaaccatcccaagagttccctgaggagattgatctgcaggcccaggaggtccctgaggagataaattagaagtcctgggtggtccctgaagtgattgatcagctgcctggagagggtattcctcaagcccagcatccatctggtgatccaaaccctcagagccagtctctagcccatgaccagcactcaccccttccaccagcaacatgtgattaattttctcattagtggtatcacactataccagccatttgagccagcaaccttttctgttggctaactcactggccagctctcaccagcggtgtctggggaagtagttctctttgtatgaagcatacctgtgccagagctgtggttgaggaggagccagttttaggttcgaagaagccattggctcctcacttagccattagacttgaataggatttccttggggtgggttggtctgtcattacccagccttctctgagcatcctaggaaatcacagattgttaaaggaaatgccgcttcactgctgaagacaccatctggcgacagcaaatgcaaaagaggggactctagggtcttcacttttctggggaaatgttcacgacttctcaaggtacgcttagaccatatgtgcattcaggggactcttgtctttgccagcactcctcaggtgagcccgggatggctatctgaaatgtctggaaaatagagtcccttccccaaacatctgacatggccactaaatctttagacttgccttatagatccttccatatcatccccaagtgccccttctgcctcagtcctgttcctctgggcaatagctctagggaaaagtaggtattagactgctgtgcaaaattcagagcaactacttaaaatgctctagaggattcttagccagtctgtgaaagtgggcctcctctgtggtggggctgtttggcttaggagatgctgtagtagtagagataatcaggttctattttaagcaatcagcagagatcaatattgtacagatacaagcaaaggtttaataaatatatatatatatatttatttctgtagttgtgccagggacagactggccaaagaccaaacactgcagggtccccaagaaatttgtccttatatcattgtgtctgagggccagatatgattatgaagctttttccaaagatccagggatgggaatgggagtgggtaggaggggtaatgcggtcattggagtcgggggctggaacattatgagtgctcaataaatataaactaatgagaatggtggtgatggaaaa

SEQ ID NO: 922 - DNA, 1035 bp, Homo Sapiens
  NM_001024465
gcggtgcccttgcggcgcagctggggtcgcggccctgctccccgcgctttcttaaggcccgcgggcggcgcaggagcggcactcgtggctgtggtggcttcggcagcggcttcagcagatcggcggcatcagcggtagcaccagcactagcagcatgttgagccgggcagtgtgcggcaccagcaggcagctggctccggttttggggtatctgggctccaggcagaagcacagcctccccgacctgccctacgactacggcgccctggaacctcacatcaacgcgcagatcatgcagctgcaccacagcaagcaccacgcggcctacgtgaacaacctgaacgtcaccgaggagaagtaccaggaggcgttggccaagggagatgttacagcccagatagctcttcagcctgcactgaagttcaatggtggtggtcatatcaatcatagcattttctggacaaacctcagccctaacggtggtggagaacccaaaggggagttgctggaagccatcaaacgtgactttggttcctttgacaagtttaaggagaagctgacggctgcatctgttggtgtccaaggctcaggttggggttggcttggtttcaataaggaacggggacacttacaaattgctgcttgtccaaatcaggatccactgcaaggaacaacaggccttattccactgctggggattgatgtgtgggagcacgcttactaccttcagtataaaaatgtcaggcctgattatctaaaagctatttggaatgtaatcaactgggagaatgtaactgaaagatacatggcttgcaaaaagtaaaccacgatcgttatgctgatcataccctaatgatcccagcaagataatgtcctgtcttctaagatgtgcatcaagcctggtacatactgaaaaccctataaggtcctggataatttttgtttgattattcattgaagaaacatttattttccaattgtgtgaagtttttgactgttaataaaagaatctgtcaaccatcaaaaaaaaaaaaa

SEQ ID NO: 923 - DNA, 918 bp, Homo Sapiens
  NM_001024466
gcggtgcccttgcggcgcagctggggtcgcggccctgctccccgcgctttcttaaggcccgcgggcggcgcaggagcggcactcgtggctgtggtggcttcggcagcggcttcagcagatcggcggcatcagcggtagcaccagcactagcagcatgttgagccgggcagtgtgcggcaccagcaggcagctggctccggttttggggtatctgggctccaggcagaagcacagcctccccgacctgccctacgactacggcgccctggaacctcacatcaacgcgcagatcatgcagctgcaccacagcaagcaccacgcggcctacgtgaacaacctgaacgtcaccgaggagaagtaccaggaggcgttggccaagggggagttgctggaagccatcaaacgtgactttggttcctttgacaagtttaaggagaagctgacggctgcatctgttggtgtccaaggctcaggttggggttggcttggtttcaataaggaacggggacacttacaaattgctgcttgtccaaatcaggatccactgcaaggaacaacaggccttattccactgctggggattgatgtgtgggagcacgcttactaccttcagtataaaaatgtcaggcctgattatctaaaagctatttggaatgtaatcaactgggagaatgtaactgaaagatacatggcttgcaaaaagtaaaccacgatcgttatgctgatcataccctaatgatcccagcaagataatgtcctgtcttctaagatgtgcatcaagcctggtacatactgaaaaccctataaggtcctggataatttttgtttgattattcattgaagaaacatttattttccaattgtgtgaagtttttgactgttaataaaagaatctgtcaaccatcaaaaaaaaaaaaa

SEQ ID NO: 924 - DNA, 5553 bp, Homo Sapiens
  NM_001024630
gtgtgaatgcttcattcgcctcacaaacaaccacagaaccacaagtgcggtgcaaactttctccaggaggacagcaagaagtctctggtttttaaatggttaatctccgcaggtcactaccagccaccgagaccaacagagtcatttaaggctgcaagcagtatttacaacagagggtacaagttctatctgaaaaaaaaaggagggactatggcatcaaacagcctcttcagcacagtgacaccatgtcagcaaaacttcttttgggatccgagcaccagccggcgcttcagccccccctccagcagcctgcagcccggcaaaatgagcgacgtgagcccggtggtggctgcgcaacagcagcagcaacagcagcagcagcaacagcagcagcagcagcagcaacagcagcagcagcagcaggaggcggcggcggcggctgcggcggcggcggcggctgcggcggcggcagctgcagtgccccggttgcggccgccccacgacaaccgcaccatggtggagatcatcgccgaccacccggccgaactcgtccgcaccgacagccccaacttcctgtgctcggtgctgccctcgcactggcgctgcaacaagaccctgcccgtggccttcaaggtggtagccctcggagaggtaccagatgggactgtggttactgtcatggcgggtaacgatgaaaattattctgctgagctccggaatgcctctgctgttatgaaaaaccaagtagcaaggttcaacgatctgagatttgtgggccggagtggacgaggcaagagtttcaccttgaccataaccgtcttcacaaatcctccccaagtagctacctatcacagagcaattaaagttacagtagatggacctcgggaacccagaaggcacagacagaagcttgatgactctaaacctagtttgttctctgaccgcctcagtgatttagggcgcattcctcatcccagtatgagagtaggtgtcccgcctcagaacccacggccctccctgaactctgcaccaagtccttttaatccacaaggacagagtcagattacagaccccaggcaggcacagtcttccccgccgtggtcctatgaccagtcttacccctcctacctgagccagatgacgtccccgtccatccactctaccaccccgctgtcttccacacggggcactgggcttcctgccatcaccgatgtgcctaggcgcatttcagatgatgacactgccacctctgacttctgcctctggccttccactctcagtaagaagagccaggcaggtgcttcagaactgggccctttttcagaccccaggcagttcccaagcatttcatccctcactgagagccgcttctccaacccacgaatgcactatccagccacctttacttacaccccgccagtcacctcaggcatgtccctcggtatgtccgccaccactcactaccacacctacctgccaccaccctaccccggctcttcccaaagccagagtggacccttccagaccagcagcactccatatctctactatggcacttcgtcaggatcctatcagtttcccatggtgccggggggagaccggtctccttccagaatgcttccgccatgcaccaccacctcgaatggcagcacgctattaaatccaaatttgcctaaccagaatgatggtgttgacgctgatggaagccacagcagttccccaactgttttgaattctagtggcagaatggatgaatctgtttggcgaccatattgaaattcctcagcagtggcccagtggtatctgggggccacatcccacacgtatcaatatatacatatatagagagagtgcatatatatgtatatcgattagctatctacaaagtgcctattttttagaagatttttcattcactcactcagtcatgatcttgcagccataagagggtagatattgagaagcagaaggctcaagagagacaattgcaatcgagcttcagattgtttactatttaagatgtacttttacaaaggaacaaagaagggaaaaggtatttttgtttttgttgtttggtctgttatcatcaataacctgttcatatgccaattcagagaggtggactccaggttcaggagggagaagagcaaagccgcttcctctctgtgctttgaaacttcacaccctcacggtggcagctgtgtatggaccagtgccctccgcagacagctcacaaaaccagttgaggtgcactaaagggacatgaggtagaatggatgcttccatcacagtaccatcattcagaataactcttccaatttctgctttcagacatgctgcaggtcctcatctgaactgttgggttcgtttttttttttttttttcctgctccaagaaagtgacttcaaaaataactgatcaggatagattattttattttactttttaacactccttctccccttttcccactgaaccaaaaagaaatcccatccctaaaacctgccttctccttttatgcaaaactgaaaatggcaatacattattatagccataatggtatagatagtgattgcgtttggctatgtgttgttttctttttttttaaattatgaatatgtgtaaaatctgaggtaacttgctaacgtgaatggtcatataactttaaagatatatttataattatttaatgacatttggacccttgaaacatttcttagtgtattgatatgttgacttcggtctctaaaagtgctctttattaaataacaaatttcttcagtggtctagagccatatctgaaatattgctaagcaatttcagttcatccaggcacaatgtgattttaaaaaatacttccatctccaaatattttagatatagattgtttttgtgatgtatgaaggaaatgttatgtttagttctttcagatctttgaatgcctctaacacagctttgccttctaaagcggtaattagggatttaaaaaacaacctttagccctttatcagcatgaaatgctggagtgatgtggttttctaatttctttggggtaattatgactcttgtcatattaaaaagacaagcacaagtaaatcattgaactacagaaaaatgttctgtggtttcatagttaagcaaaactctaaatcgccaggcttcatagcaaagacatagtcagctaaaagccgcacatgtggatagagggttcaattatgagacacctagtacaggagagcaaaattgcaccagagattcttaaccaaccagccttaccaaacaacacaacaggggaaccccaatctgccttacccaaggccccactggcagctttccacagaatttgcatttagaggagcagaatgacatcactgtcctttgggagtaggtcctctgaaaaggcagcaggttccagcaggtagctgagctgagaggacatatggcccacggggacctacagacagcctttgacatttgtatttcttacaatggagggccaaggagggcaaggggctgtggagtttggtgtctactagtgtgtatgaatttgagctagagtccttctgtggcatgcactttgaccactcctggcagtcacatggcagatttccaagtgcaaatccttaatccaaacaaggatcatctaatgacaccaccaggccaatccctgctctcctccccgaaaagtcagggtcccttcattggaatcctccacccacccaagcagaatttagcagagatttgccttcaaaccctaacggcccccttgttctctggtccttctcaaacccacctttgtaggccacccagcattgcaggacagcgtgtggggcagctggacctgtgcttcctgcctgggagtctcccttggaattcatcctgactccttctaataaaaatggatgggaaagcaaaacactttgccttctaaaggccgtataccaagtatgcttagataaataagccacttttctattacttaagtaagaaggaagtagtaattgatactatttattgtttgtgtgtggtagcttgaagcacaccactgtccatttatttgtaagtgtaaaatatgtgtgtttgtttcagcagcacttaaaaaagccagtgtctggttacacatttcaattttaattaattgacataaaaatgctaccgccagtgccagctgcatcctatttaattaaaaaggtactatatttgtacattattttttaatgttaaaagggcttttttaagtttacagtacacataccgagtgactttagggatgcttttgtgttgaaatgttactatagtggctgcaggcagcaacccagaaacactttagaagctttttttccttgggaaaaattcaagcacttcttccctccaccctcactccaaccaccccaatgggggtaattcacatttcttagaacaaattctgcccttttttggtctagggattaaaattttgtttttctttctttctttttttttttttttcactgaacccttaatttgcactgggtcatgtgtttgatttgtgatttcaagaccaaagcaaagtcttactactactgtggaaccatgtactagttcctgggaattaaaatagcgtggttctctttgtagcacaaacattgctggaatttgcagtcttttcaatgcagccacatttttatccatttcagttgtctcacaaattttaacccatatcagagttccagaacaggtaccacagctttggttttagattagtggaataacattcagcccagaactgagaaactcaacagattaactatcgtttgctctttagacggtctcactgcctctcacttgccagagccctttcaaaatgagcagagaagtccacaccattagggaccatctgtgataaattcagaagggaggagatgtgtgtacagctttaaggattccctcaattccgaggaaagggactggcccagaatccaggttaatacatggaaacacgaagcattagcaaaagtaataattatacctatggtatttgaaagaacaataataaaagacacttcttccaaaccttgaatttgttgtttttagaaaacgaatgcatttaaaaatattttctatgtgagaattttttagatgtgtgtttacttcatgtttacaaataactgtttgctttttaatgcagtactttgaaatatatcagccaaaaccataacttacaataatttcttaggtattctgaataaaattccatttcttttggatatgctttaccattcttaggtttctgtggaacaaaaatatttgtagcattttgtgtaaatacaagctttcatttttattttttccaattgctattgcccaagaattgctttccatgcacatattgtaaaaattccgctttgtgccacaggtcatgattgtggatgagtttactcttaacttcaaagggactatttgtattgtatgttgcaactgtaaattgaattatttggcatttttctcatgattgtaatattaatttgaagtttgaatttaattttcaataaaatggcttttttggttttgtta

SEQ ID NO: 925 - DNA, 8839 bp, Homo Sapiens
  NM_001024647
ctaagcaagcctgggcaatggcgggcgtccctcccccagcctcgttgccgccttgcagtttgatctcagactgctgtgctagcaatcagcgagattccgtgggcgtaggaccctctgagccaggtgtgggatatagtctcgtggtgcgccgtttcttaagccggtctgaaaagcgcaatattcggatgggagtgacccgattttccaggaactgaagttaaaagatgaagaatgtgagaggctttcaaaagtgcgagatcaacttggacaggaattggaagaactcacagctagtctatttgaggaagctcataaaatggtgagagaagcaaatatcaagcaggcaacagcagaaaaacagctaaaagaagcacaaggaaaaattgatgtacttcaagctgaagtagctgcattgaagacacttgtattgtccagttctccaacatcacctacgcaggagcctttgccaggtggaaagacaccttttaaaaaggggcatacaagaaataaaagcacaagcagtgctatgagtggcagtcatcaggacctcagtgtgatacagccaattgtaaaagactgcaaagaggctgacttatccttgtataatgaattccgattgtggaaggatgagcccacaatggacaggacgtgtcctttcttagacaaaatctaccaggaagatatctttccatgtttaacattctcaaaaagtgagttggcttcagctgttctggaggctgtggaaaacaatactctaagcattgaaccagtgggattacaacctatccggtttgtgaaagcttctgcagttgaatgcggaggaccaaaaaaatgtgctctcactggccagagtaagtcctgtaaacacagaattaaattaggggactcaagcaactattattatatttctcctttttgcagatacaggatcacttctgtatgtaacttttttacatacattcgatacattcagcagggactcgtgaaacagcaggatgttgatcagatgttttgggaggttatgcagttgagaaaagagatgtcattggcaaagctgggttatttcaaagaggaactctgatgctctgcgtgggaccatgcctgaactccccgaataactgaaaaatggctgaatatttttatggttacttgatatttatttccaaggagtgagcctaagacttttttccccttttgcaaattgctctaagaagtaccatgatttcttttaaactgatctatgctgtgtttgcttattctttagttgaacacactatgaagaattccaggtgtactagtgaatgtaatttatagttgccaaaaaaaaaaaaaacctgaaataaataaatgttagattgaatgtgtgtacattttctcttctagctctgacatggcatttagggttagcagaatgtattaaatagtaattttcaaactacacagtagcttccttccttgtgagaggcaagaaagaagtctgagtggatagtactcactttccaaggcccccacctctagaatggctttatttttatctgttttctatattgggtttcaaaaaagattttatttgaagaaatacttctgctgctacaaagtttgaaagttactattttaattattctgctctctgtaactgaaagaatccctttattttggttattcattaaaatataatagaaggcagtcagattttatcccagagatgtattcctgagtgtcttgatatagtgtattcatgttttatatgtgttgaccactatattgtcattggagggacatagatgtaaatgagtttgacgtgtgtcaaaggggtttaaaggggtgtggattgaatgaatggtacgtgcgaagtatatgctgattatagaaccacttgatctctgcattccaaattgtaaaactgactcaactggagaaattataacaaagaggtttgtggtagacatgtaataagtatagaaaagcaaaaagaaaagagaaactgctttagtttctgtttagagaaagctgctgttaatatttttggatagtagcctttcagctttcagatattttctacttacatatgcatatttttgaaacaaaaagtaggctttttttttgctttttaaacctaaacattaaatatattttcccttgggtaaacctacacatcctaatccctgtttatagaattttaacataatttaattgtgtttggagatgaggtggttttcagtttatttttcatattataatgctgtgacgagtatccttatctgtacacttctgaacattgtggagttctttcatgtggatgcctggagataaaattgtgtcgagatatatatgtatttttaaatgtttgatctgcattgctagattgccatccagaaaagttaatcaatttgtattcacagcagcagtgtacaagagggctggttttctgaagataacatttttttcagtcctgttcagaggtttggtcaatcttacctgtagatgacttcagccaccaggctggatgggagcccacagacaaaaggacattggtgtatgttatggtgaaaaccatcagtaccatgcctagctcaagaatgtgaaattgaacctgaaaaaaactttgaacctacaattttatgttctgaaaatagttattctaatgtgagggcattaataagaatatgtaccatcaaagcttcagaagattttccgtacaaactaaaatcacttttggagaaagtacctaaataaaaagagaaacaaatccaggagatactgtacggtttgaaagaaaggtaatcaaatactcagaaaaagtttgttgatgacttaaaaaggataaataaaaagtaagactaaagaaaatcagtatacccattaataataaatctttagtaatctataaggggaagaatgcttttcaaccttatacactagaagcatgctctttaaaattaatgcaacaggatgacgacttgatgtagaaactatatgtggaattatagattaaaatgtgattgaaacatatttagaaaatgtgattatcttcctgatcctactccctttaggaagaacttcttaaactggaagcaggaaaaaaaaaaaccataaaagataaccataaaagaatataagttatggtatattataaattcttaatttagaaatcgtgcatcagtagttaggcattgtggctcatgcctgtaatcccagcactttgggaggcagaggcagaaggattacttgagctgcttgagcccaggagtttgagacgggcctgggaaaaatagggaaactccatttacacacacacacacacacacacacacacacacactgtgtccatgaacttgggaggatgaggtgggaggattgcttgagcccaggggttcaagtccaacttgggcaacatagggagaccttgtctctaaaaaaaaaactaaagctaaactacaaactgtgaggcaatatctgcaacatttataactagtaatagcttagtatcaagaatgtatgcagaaattctacaaaccaacaaaaaaggacagtgtcacagaaaaacaggcaaaagactgaaccaggccttccacacaattagaagtgcatgtgggccaataaacattaagaggttttcatctctcaatcaggaaaacgtaaatcaagatgacaatgacatgttcaaattcattcgattggtgaaaatgaagaaacacaaagtcaagttttggagagggttttagtcattaggatcactcacatattgctgatgggggtatcaattggtatatccactgtgaaaaaccattcactagaaaagttgggccaggcccagtggctcatgcctcttggctttgggaggccaaggtaggaggatcacttgagcccaagagttcaagaccagcttgagcaacatagggagaccacatctgcacaaaaagatttttttgaattagctgggcatggtggtgcatgcctgtggtcccagctacttgggaagctgaggtggaaggattgcttaagcccaggaggttgaggctgcagtgaatcatgattgtgccactgcactcttaccttgggtgacagagtaagatcataccttaaaaaaaaaaaaaaagtatacccatgggtcagcaatttcacttttcagtatatacttgagaaatgcttgcacaggtcccccagatcacacatataagaatgttctggaataaattaaaatgtctatttttaggaaggtgtaatgtgttcacagaatgggtgattattacatggcagcaaaatgaatgaataccagctacttgcagcacaataactcagaatgaaaaagcaattctgagaaaactatatgtgacatgatacttttcttataaaagtcaagaacaactaaaactgaacagctgtttaggcattgacatatgtgacaaaacttttaaaaagtaataaagttcaagatagtggttacctctggagaggtagaggaggagcaaatctatgagtaagtcactggtaatgttttagtccctgggttaggtggtgggttttggggtggttcatttgtcattaaaagtaagtacatgagctgggtgtagtggtgcgtgcttatagtcccagctacttgggagtctgagataggaagatccttgaggccagttcaaggctatagtgtgctatgatttcacctgtgaatagctactatattccaacctgggcaacgtagaccttgcccccctttaaaaaaattcaaaaacaaaataaatgcatggacaaatgaataagagagttatgcatggaacatcggtggtgtattatgaatcaagcattattactagctcagttatatgtgccttcattccaaaacaaaaaataaaaggtaagaaaattgttgaattgcatttgagagagaggaaaggaaagaattcaggtctgaatcttaggcttttggcttgagctattgcagtttattgagatggggaaatacatggtggggaaagtttgggtatgtgcataacagagacagaaattcagtgtttgacagatcaagtgtgaggtgcccactgagcatcaaagtggatatgttaagcaggtattggatgtacaaatctaaattcagtaaggtcagtccaggagaaaatttggggagtagttagccatgggatcagatgggcgctttagggacactttggagatgaagtacagcactgagccctgagttcctgtgacagagaagcagcctgcaaagacgaaaggaggagctgttaggaagagcaaggcaacagaaaaggaagaaccagcatgctgattatgttcaggagagtgtttctacgctgaatttaattgccaagattaccaattctaaagaagaggaggactcttggacaagtttttagaagttggtttggagctggggtgagagcctggcctaatggagacagctctggattgggagtcacttagacctacattctggtctaggtttggctcccaaaaactgggaaggttagttaggtggccactcctctctcttcatggtctctctcagcttgaagacaatttacagtctttgactaagcatccacactggaagaacaagatttggtttctgaacattgggtcttagtccttaaaataacttgcaacctgttacgtcttcacttactcccatcgccaccacaagaatcctgtgtgtttttgttttgtgcatccagtctaaaacgggtctgcttttattcataggcttttgttttcagtggtttttgttgttgcatttttccctagataaaatgttttttctataagacactgcttaaaagagtccaatgcagtatgaatttgtatttgtgtttaacttttgtgcttaacagatctgccatggctgaactctcagttgcttaagcaaaattctggggcttattctaggttcctttatttgtcattgtcactcccattccagttatcagcaaattccatcagctgtctccgagacatcttaaatctgtctacctccctccatgtccactgctaccactctgcccaagctattatcatctttcacctgaactcctgcactaatgtctgctgtccttgcatccactcctgccctcctacaatcactgacggcagccgcagggatctttataaaacgaaaatcagataatgtcacttccctgcttaaagccctttgagtggcttcccattgcacttagaaaaaaaaaaaaaaaaaaaaactggccaggtgcgatggctcatgcctgtaatcccagcactttgggaggccgaggcgggcggatcccctgaggttggtagttcgagacctgcttggccaacatggagaaaccctgtctctactaaaaacacaaaattagtcaggtgtgatggcgcatgcctgtaatcccagctacttgggaggctgagtcaggagaaacgctcgaacccaggaggcagaggttgtggtgagttgacatcacgccattgcactccagcctgggcaacaagagtgaaactccgtctgaaaaaaaaaaaaaaaaacccaaactcaatagaaaatcaagttttcatagtggtagttgttaacagagaaataacaatgaaagctttaaaaaactccatgaaaatttgcaaaacttaaaaaaaaaatgtagaagaggactaaacttgataaaatattaaaagaattgaaacccttcctaaaggcagcttctcaagggagcacaagttcacacacagtttacttttggaggaacgtctgaggtcatgaggactagattctagagctacaggtctcagggacagtctcgagggatacagggcccccatcaccacatccccagatttaaccgcagcagctcagcttttatctgtatctgttggagctctctaggaaatgtcaataccaaagcaaacccaaatcacaactagattagattactattcaagagaatgattctctaccgaaactctgcaaaatggggatatcaagagagttggaaaatgtaagacgtaaagaccataatcaggaaaatacgcatcatatttgttattcactgagagggaggaatttccacttaaatcctatttccagcagctggattgtgctctcagtggagtgctctggattctgattaatagagattttctagtcctcccagcaacttccttctcaattctcttcactttccgcagatctcggcaccagggttgcatcttgtgggctccattgtgttttcacacaatgtgctatttgtccttcacagtgttttggtttatttttctgtttgtccatcttgtttttgaacaattgccagcatttaaaaatgaggaaatctaaaatctgcatttcaagctgctcttttttaaaatgtgccgtttcgacaacactgagcccacagtcttgaatgacaacacttgggtggagctgagtgactccacctgtcgggtggctacacccttgctcagggtatgcactccatggtttgctctatggcccaccatcctggattgtctccctgacaccaaggctaagggacccactttactcacttatctgctgggccttggaagtatttcagttcggaaccccaattctaaccttagcttctcaggccattaaatgaaatctcatttctatgatgcttcctgtcacatcactgtgctgctgagaacatgaagtctgtgggtgaattggtggacgggatccagaatcattacttggcagtggattatagtgtgatgactcatttccggtggtctccaggagacttggctgggagcttctcttggagtctagggttagccagaggctacatgttttaggcatcttaattcatattttatctaaaggcatataaatccttaaaaaaaatcatttgacttcatccttgctccctacatccagccagtaaccattgctttgttttacatcgcgtgcttcaggctttactacagcctacctggattttgcagtagcttcttaaactgcttaaactttggatattgccccagccaacacattctgccacagagatctctctgagttaaatgggattgtatcatgccccacacccaagcagatagaaactgtcaatagatacacttagaatgaatatgcatggaatcaaattacattcagaatctaccactataggtagtgaatacaacaggatagcagaggctgggaagggtaatgggggttggggggtgggaggataaaggggttgggtaatgggtgtaaaaatctatagaaggaatatgatctgttgtttggtagcacaatagggtaaatacagttaataatttattgtatatttcacaataaaggagtggatttggaatgttctcaacacaaatgataaatgtttgaggtgatggataccccaattaccctgatttgatcattatacgttgtatgtttgtatcaaaatatcatatgtaccccataaatatgtacaactattatgtatccataaaaattggaaataaactaccaccatctttcttcagcctattttcctatctcctctcgcaccatactaggcacacaatctctgtacctgtgctgtcttccaagccattgctcatgttttaagaaatatacttattgtttaatatatcctgtaccactgtaggatgactgtagttaacaataatgtgtagtttcaaatagctaatagctggaaggaagttgttgaatgtttccaacataaagaaatgataagtgtttgagatgatggatatgctaattaccctgatctgatcactacacattatatgtatggaaatatcattgtgtaccccatgaatatgggcaattattatttgttaattaaaaaaataaaaaaaagacccacccactgtttaa

SEQ ID NO: 926 - DNA, 1148 bp, Homo Sapiens
  NM_001024662
gattgcttatagaccggaagccgggaccttaattctctttcccatcttgcaaggtaagaatcgcgggcctgtctgcaagacttgagttcaggactcccaatccttcgccatccgaacctggagggcatccagtcgacacctacaggggtcggacatgtccaaggctaactgagaggccttccagacgcttcatttttgttgtttgggtttgcggcagggcacaaagaggatggcgggtgaaaaagttgagaagccagatactaaagagaagaaacccgaagccaagaaggttgatgctggtggcaaggtgaaaaagggtaacctcaaagctaaaaagcccaagaaggggaagccccattgcagccgcaaccctgtccttgtcagaggaattggcaggtattcccgatctgccatgtattccagaaaggccatgtacaagaggaagtactcagccgctaaatccaaggttgaaaagaaaaagaaggagaaggttctcgcaactgttacaaaaccagttggtggtgacaagaacggcggtacccgggtggttaaacttcgcaaaatgcctagatattatcctactgaagatgtgcctcgaaagctgttgagccacggcaaaaaacccttcagtcagcacgtgagaaaactgcgagccagcattacccccgggaccattctgatcatcctcactggacgccacaggggcaagagggtggttttcctgaagcagctggctagtggcttattacttgtgactggacctctggtcctcaatcgagttcctctacgaagaacacaccagaaatttgtcattgccacttcaaccaaaatcgatatcagcaatgtaaaaatcccaaaacatcttactgatgcttacttcaagaagaagaagctgcggaagcccagacaccaggaaggtgagatcttcgacacagaaaaagagaaatatgagattacggagcagcgcaagattgatcagaaagctgtggactcacaaattttaccaaaaatcaaagctattcctcagctccagggctacctgcgatctgtgtttgctctgacgaatggaatttatcctcacaaattggtgttctaaatgtcttaagaacctaattaaatagctgactacaaaaaaaaaaaaaaaaaaa

SEQ ID NO: 927 - DNA, 4454 bp, Homo Sapiens
  NM_001024666
agaataattttgctgccaagtgaatcagagagacttgcagttctcggagagcacggaacttattcctgcccagagttcagacacagccagaaattaccatttcatacttcacagaatggaggtttcagcagccaaagccccaagtgccgcagacttgtctgagattgaaataaagaaagagatgaagaaagaccctctcaccaacaaagctccagaaaagcccctgcacgaagtgcccagtggaaactctttgctgtcttctgaaacgattttaagaaccaataagagaggcgagcgacggaggcgccggtgccaggtggcattcagctacctgccccagaatgacgatgaacttgagctgaaagttggcgacatcatagaggtggtaggagaggtagaggaaggatggtgggaaggtgttctcaacgggaagactggaatgtttccttccaacttcatcaaggagctgtcaggggagtcggatgagcttggcatttcccaggatgagcagctatccaagtcaagtttaagggaaaccacaggctccgagagtgatgggggtgactcaagcagcaccaagtctgaaggtgccaacgggacagtggcaactgcagcaatccagcccaagaaagttaagggagtgggctttggagacattttcaaagacaagccaatcaaactaagaccaaggtcaattgaagtagaaaatgactttctgccggtagaaaagactattgggaagaagttacctgcaactacagcaactccagactcatcaaaaacagaaatggacagcaggacaaagagcaaggattactgcaaagtaatatttccatatgaggcacagaatgatgatgaattgacaatcaaagaaggagatatagtcactctcatcaataaggactgcatcgacgtaggctggtgggaaggagagctgaacggcagacgaggcgtgttccccgataacttcgtgaagttacttccaccggactttgaaaaggaagggaatagacccaagaagccaccgcctccatccgctcctgtcatcaaacaaggggcaggcaccactgagagaaaacatgaaattaaaaagatacctcctgaaagaccagaaatgcttccaaacagaacagaagaaaaagaaagaccagagagagagccaaaactggatttacagaagccctccgttcctgccataccgccaaaaaagcctcggccacctaagaccaattctctcagcagacctggcgcactgcccccgagaaggccggagagaccggtgggtccgctgacacacaccaggggtgacagtccaaagattgacttggccggcagttcgctatctggcatcctggacaaagatctctcggaccgcagcaatgacattgacttagaaggttttgactccgtggtatcatctactgagaaactcagtcatccgaccacaagcagaccaaaagctacagggaggcggcctccgtcccagtccctcacatcttcatccctttcaagccctgatatcttcgactccccaagtcccgaagaggataaggaggaacacatttcacttgcgcacagaggagtggacgcgtcaaagaaaacttccaagactgttaccatatcccaagtgtctgacaacaaagcatccctgccgcccaagccggggaccatggcagcaggtggcggtgggccagcccctctgtcctcagcggcgccctcccccctgtcatcctctttgggaacagctggacacagagccaactccccgtctctgttcggcacggaaggaaaaccaaagatggagcctgcggccagcagccaggcggccgtggaggagctaaggacacaggtccgcgagctgaggagcatcatcgagaccatgaaggaccagcagaaacgagagattaaacagttattgtctgagttggatgaagagaagaaaatccggcttcggttgcagatggaagtgaacgacataaagaaagctctacaatcaaaatgaatacttgatcaatgaaatgtcacattattcatcctgagtccgagactcaaattttctgccccagccaaaataatcttgtgccaaaagattaaaggtttgcctcaaaatgtccctgtttgaaagattagcacaaaagtcttgatagcacaacacaaattccatccaagaggagaatcttccccagggtttagtcctggggctggcactcgttgtgacttacacagagcaaaattgtgctaaaggcttttctactctgagatctcaatgcgaaatgaaaactcaggcagtttagtccatagtggtactattttgatgatattttccattaataaaatgtaatttcagattattcgtttacaagctttataattttatgattttttaatcgtgttttgtcacagacttccctagtgtttgtactacacgtagtcagaagcgagtgtccttttcttttgcttcaggctaagagctgcctcgctctttgtccccccattaggattctattacatatgcaattgtaggttcaacctgtccctttccctgccagcaaaccccaccaccctaagagaaattttagcttatatatgacggtatatttacaaaaagagaaagagaaaatctggtatttgcaatgatctgtgccttctttttaccaccctcttgattggagcttttgtgatgcagctaccatgattcaaaaaaattaaaaattaaaaaaaaaaaatctgccacttatccaagtccactagaggccactgtcttcaaagcttctctcaccctagccaaaggtcctaagaggagacagctgtgaagttgggcgtgctctgtggtaccagctgtgacttttctatttctcctagttttaggttgttcatgaaactagaaatgtcatcctgcttgatttttcatcagccaagttaaacccctgctttctgtcctttgcaccttttgcgtgaacagaatatgcattattaaagcaaaaataaataaaagtaaaatgcaaatgaaaacaagggagggaaagttgtattatttcctgcactgggttacccgtgtgtgttatcgtttaaactgtattcacataatgtcatttgccttgctcacttgtaaccccttcctcaggtccaagagaatgggaggagggtcatgttgaagtgtagccactggaactttcttgcatttatggagttgctttttctttcccaaggaaactgatgtttgcctgtccgctttatctttgtagtacatgaacagttcagccttagactatgtaactgttttctcatccttagctgaaaatgaggggcctactgtattgcgagactgttcaggggtaggggtggagggggtggtcccttaatggcccctgaagatgttggatgtgtttctcaaaagctgctttgtctctttcctgagtttaatagtgaaactactaaacattaatagatttgcacagccacaaagaatgagagttgataataccgaagaagtgatgcaaaaacaaaaaatcacattactgatcattgatagtattacaaataaatgtctcttcctttctcttcctcccttcctccccctgccttcctcttaacctatgtgctcatccttgctacttgaggctgttatttccctccgagtatttaaggagcccaaacaccttggtcttcctgggtgggggcataattaagggaagggagtgtataaggaaggaaacctcataccctccattcccatccctggatatattgccttttcagcagcctcgggttcagtgtgcttggggtcaggagtgccaggttcccaagagcagcgtaaaacatccctgtaccccttgacagttataagcatttctgcgttaaacttgaagattccagagattccccacgacctaatgatctaagaatgcagattggattctttgatgttcaaatttctcatttacttatgaaaatccctaattatatagttttatataatgtgtatacagagtaggattgttgatgaaattgagcggttggaacaccctcatggaacactggcaacatggaatgtagagagctgatgtcttccccctcatagaggccattggcttcctttgtataaggagagggagaagtgattctggaaggagaagttggtatgtctagcttcattgcggcccctcgggctacccagcaagaggattctgcatcaaggaactggacgagccgctacccaaactgccaccatctttactctttacaaaatggacccatcgagaatgttgaaaagcttggaagtatcacttttgaaaaaaaaaaaaattattttgcattcagcatggactcgaccaggcatctatggagattatttttttgcttcattttataaagttgtatttagaaaagtcttaagtattgtgctttgtaaagaagatgattaaaatgaaattttgtgagaatagttttgttca

SEQ ID NO: 928 - DNA, 2922 bp, Homo Sapiens
  NM_001024667
agtgaaggggtttcccatatgaaaaatacagaaagaattatttgaatactagcaaatacacaacttgatatttctagagaacccaggcacagtcttggagacattactcctgagagactgcagctgatggaagatgagccccaacttctaaaaatgtatcactaccgggattgagatacaaacagcatttaggaaggtctcatctgagtagcagcttcctgccctccttcttggagataagtcgggcttttggtgagacagactttcccaaccctctgcccggccggtgcccatgcttctgtggctgctgctgctgatcctgactcctggaagagaacaatcaggggtggccccaaaagctgtacttctcctcaatcctccatggtccacagccttcaaaggagaaaaagtggctctcatatgcagcagcatatcacattccctagcccagggagacacatattggtatcacgatgagaagttgttgaaaataaaacatgacaagatccaaattacagagcctggaaattaccaatgtaagacccgaggatcctccctcagtgatgccgtgcatgtggaattttcacctgactggctgatcctgcaggctttacatcctgtctttgaaggagacaatgtcattctgagatgtcaggggaaagacaacaaaaacactcatcaaaaggtttactacaaggatggaaaacagcttcctaatagttataatttagagaagatcacagtgaattcagtctccagggataatagcaaatatcattgtactgcttataggaagttttacatacttgacattgaagtaacttcaaaacccctaaatatccaagttcaagagctgtttctacatcctgtgctgagagccagctcttccacgcccatagaggggagtcccatgaccctgacctgtgagacccagctctctccacagaggccagatgtccagctgcaattctccctcttcagagatagccagaccctcggattgggctggagcaggtcccccagactccagatccctgccatgtggactgaagactcagggtcttactggtgtgaggtggagacagtgactcacagcatcaaaaaaaggagcctgagatctcagatacgtgtacagagagtccctgtgtctaatgtgaatctagagatccggcccaccggagggcagctgattgaaggagaaaatatggtccttatttgctcagtagcccagggttcagggactgtcacattctcctggcacaaagaaggaagagtaagaagcctgggtagaaagacccagcgttccctgttggcagagctgcatgttctcaccgtgaaggagagtgatgcagggagatactactgtgcagctgataacgttcacagccccatcctcagcacgtggattcgagtcaccgtgagaattccggtatctcaccctgtcctcaccttcagggctcccagggcccacactgtggtgggggacctgctggagcttcactgtgagtccctgagaggctctcccccgatcctgtaccgattttatcatgaggatgtcaccctggggaacagctcagccccctctggaggaggagcctccttcaacctctctctgactgcagaacattctggaaactactcctgtgatgcagacaatggcctgggggcccagcacagtcatggagtgagtctcagggtcacagttccggtgtctcgccccgtcctcaccctcagggctcccggggcccaggctgtggtgggggacctgctggagcttcactgtgagtccctgagaggctccttcccgatcctgtactggttttatcacgaggatgacaccttggggaacatctcggcccactctggaggaggggcatccttcaacctctctctgactacagaacattctggaaactactcatgtgaggctgacaatggcctgggggcccagcacagtaaagtggtgacactcaatgttacaggaacttccaggaacagaacaggccttaccgctgcgggaatcacggggctggtgctcagcatcctcgtccttgctgctgctgctgctctgctgcattacgccagggcccgaaggaaaccaggaggactttctgccactggaacatctagtcacagtcctagtgagtgtcaggagccttcctcgtccaggccttccaggatagaccctcaagagcccactcactctaaaccactagccccaatggagctggagccaatgtacagcaatgtaaatcctggagatagcaacccgatttattcccagatctggagcatccagcatacaaaagaaaactcagctaattgtccaatgatgcatcaagagcatgaggaacttacagtcctctattcagaactgaagaagacacacccagacgactctgcaggggaggctagcagcagaggcagggcccatgaagaagatgatgaagaaaactatgagaatgtaccacgtgtattactggcctcagaccactagccccttacccagagtggcccacaggaaacagcctgcaccatttttttttctgttctctccaaccacacatcatccatctctccagactctgcctcctacgaggctgggctgcaggattctgaacccaagaaagaacaaagttcaagattttccatgtctttgtaacacttagccctgtgcaaatcagagtatgtgagtggaagaaggggtgagtcctaactgtacatctcggatataacaaatgtgcaaattctgattgattgccctgtaaaatgaattattctcatgcagtgctctacttgacttttatctttgaattcacaactaaaaacccatagcccagaaatctaaaaaaagtaattttagtggagcctttgaaaataaaagaccattggaaaaagtaaaaaaaaaaaaaaaaaaaaaaa

SEQ ID NO: 929 - DNA, 2026 bp, Homo Sapiens
  NM_001024668
acggttaactttgacccaaagacaacctcttctctcccgcttctctcgctgtgaagatggcgctctccagggtcttcaaagcttcacctttctccaaaggcagatgtgaagaacttgatgtcttatgtggtaaccaagacaaaagcgattaatgggaaataccatcgtttcttgggtcgtcatttcccccgcttctatgtcctgtacacaatcttcatgaaaggattgcagatgttatgggctgatgccaaaaaggctagaagaataaagacaaatatgtggaagcacaatataaagtttcatcaacttccataccgggagatggagcatttgagacagttccgccaagacgtcaccaagtgtcttttcctaggtattatttccattccaccttttgccaactacctggtcttcttgctaatgtacctgtttcccaggcaactactgatcaggcatttctggaccccaaaacaacaaactgatttcttagatatctatcatgctttccggaagcagtcccacccagaaattattagttatttagaaaaggtcatccctctcatttctgatgcaggactccggtggcgtctgacagatctgtgcaccaagatacagcgtggtacccacccagcaatacatgatatcttggctctgagagagtgtttctctaaccatcctctgggcatgaaccaactccaggctttgcacgtgaaagccttgagccgggccatgcttctcacatcttacctgcctcctcccttgttgagacatcgtttgaagactcatacaactgtgattcaccaactggacaaggctttggcaaagctggggattggccagctgactgctcaggaagtaaaatcggcttgttatctccgtggcctgaattctacgcatattggtgaagataggtgtcgaacttggctgggagaatggctgcagatttcctgcagcctgaaagaagctgagctgtctctcttgctgcacaacgtggtcctgctctccaccaactaccttgggacaaggcgctgaatgaaccatggagcggatggcattgtcctgcagtcgtatagtatagcagtgcaggaacaaacagcacttgccagcaaagtctgtgtgtactgttaagtgtgtgggaggcagagagaggagcaggggccatgggcttcacagcatggcacacatgtgggaactgcagacattcctctcacagctagaactgaaacaaaccctcttgctaggggtggtccgtgtgaggtgtcatcctgtccccctcataattactaatagctggaactggcagcagcctctactgggcttttactgtgatgtgttcagttcatgtcctaggaagtcagcttttgccccaggtgggaatccttatttggcttaggactgatccacttccatgttacttacatctgtgggtttttgttgttgctgttagaaaatttgtggctggtgaaaacagcactcctttggctggagcacttgtgtccgtgcatgtacttgggtgtttccctccatcctttctgatatgaccaaaaatcaagttgttttgttttttgtcaccttcactggcatgggctaaccacttctttttcaaaccctctgaacacctttttctgatgggtaacttgcaggaatattctattggaaaagataacaggaagtacaagtgcttcttgaccccttcctcaatgtttctagccttcactctccattgtcttttctgggctgtattacagccctctgtggatcttcaactctgctgcctccactgtgatgcagcagtccaactgtaactgacagtggctgccttctctgggccatggatcacacctgtaaggtactaattactgcccagcctggggagatcaggagaggtctgcatagttagtaagttgggtttagcttttgtgtgtgcatcagtgacttagagttctgtaataacttattgtaaatgcatgaagcactgtttttaaacccaagtaaagactgcttgaaacctgttgatggaaatgaa

SEQ ID NO: 930 - DNA, 1798 bp, Homo Sapiens
  NM_001024674
gtcacgtgacatgggttggaagatggcgtctcccacagacgggacagatctggaagcatctttgctaagttttgaaaaacttgaccgtgcctcaccagatctttggccagaacaattaccaggtgttgctgaatttgcagcttccttcaaaagtcctattactagttctccacccaaatggatggctgagatagaacgtgatgacatcgacatgttgaaagaactggggagtctcaccacggctaatttgatggagaaggttcgaggcctacagaacctagcctatcagctggggctggatgagtccagagagatgacacgggggaaattcctcaatattctagagaagcccaagaagtagcagctgcttgcggacaggatgtcctggggtccgaaaccaagctcccttcccggtgcacctctaacaatgcacacctcactgcttgcttgggagaggccagagggtgtacctccaggactgccctctcccctgctcctggcactctacacgtctgaggacattcagcagcaagagaagaatctgctctacccaaggatcattgcagttactcaatcaactttcagacttgaaccttcttagcctcggatattggtaacagctgagggcatatcattcttaaaggtcgaagtcctgctttctcatttctggaagtgattcaggagccccaggatcttacggttgatttgactcagtcatggcagtcagttgtgacatgttgattggatgggttcttttgaattgttcttgatctcttagaaagtgtttacgatgtgaggagaccagagaccaagtagattctggaccagaccatgcagcctgacctgtgaactctccagtatatactaagttcccagaatccccagctgaagaaaccagaatcttctcgaaatgtatatctgttttttaaaacttctatacctcttatgatagtcccatttgcttttcattccttacttcccagccccaccttctagttctgacttcgggcagagggatccctgagtccctcctggaattagcttgtatagtgaaaggcccatccaaggttgtctaaagaccaatgtgaaggtgacagaaaggacttttgagttctaattaatctgttacagcttcaagcaagaaagtcagtatagcctgaaagacaagagaaacgggatggtttataggagttcccatttggttgaaagctagaagccctaattgaccttaaagtaacatgctatgggatggtgggattgtcccctctgacagcacatatgaaatagttcatctatataatagaaacgcacacacacgaaaaagaatcttctgacttaaatacaactttcatggagttcttcaccacttatctgtctctgttaaaatctgaaaatctagcccatggctaaaatctattatatgtgttctccatatttcttgtataagccagtccccagcatctgatgttttgagaagtgcatggagtttcctaaactttgcacaaaagaatatcctggggccgggcatggtggctcacgcctgtaatcccagcactttgggaggccgaggcaggtggatcataggtcaaaagatcgagaccatcctggccaatatggtgaaaccctgtctctactaaaatacaaaaattagctgggcatgatggtgcatgcctatagtcccagctacttgggggcctgaggcacgagaatcgcttgaattcgggaggtggaggttgcagtgagccgaaattatgccactgcactccagcctgggcaacagagtgagactctgtctcag

SEQ ID NO: 931 - DNA, 2028 bp, Homo Sapiens
  NM_001024675
caggaacttccgtcaagcccaggtgagaggtgccaggaggctgcctgggtcctcaagggggatatatgtccaaatggccttaccacaaggccccttcgccctcaaagttctgctcctcccgggggcttcttaggatctaaaaggatcagtcctagccatctcgtcagccatctcagcaagggctgacggggcggaacagcaaagcagaggcgggtcctgagagcgtggagcctgaagcccggcgccagagggagaccaagagggtgagatgcggctggaacccagccagagcggagactgaagcctgaactaggggccgggcctcaggcctaggaactagccacgagctgaaaaggaggcggatggcccggacagaagaggcggggctttcagaccagagggcggagccaagagctgaaaagggtggtgatttggtccagaagaggaagaacttaggctccggaggcagagccaaaggctgaaggggactactccctaggacagaggccgggaggtatcgggccgacgaagccgagtggcgcggaggagcggagccttcagccccgcggctgggccgagcccgaaggtggcgtcggtgtcggggagccgccgcgtgcaccggccgtcctccctgggccgcatcgcggtggtggtggaccagggctcgggcttcaccaaggcgggcttcgcgggcgagaaccagccgcgcatagtgctgaagagctctagcttggtgcccagctgggaccggccggtgctgcccggagcgccgggctgcgagctggcgggcggcgtggcgcgggcgcaccccatcaagcacggcgtggtggcggactgggaggcgctggaagggctgtgggagcgcctgctggtgggcggcctgcgggtgtgcccagagcagtggcccgtgctggtgagcgactcgccgttggcgccgcccgcgggccgcgaaagggtggcggagctgctgttcgagaccctggcagtgcccgcgtgccacatggctagcaccgcgttgctggcgctctgctccaccggcgcgttcagcgggctggccgtggaggcgggcgcgggcgtgtgccacgccacgcccatctacgcgggtcactcgtggcaccaggccaccttccgactgaacgtggcaggcagcaccctgtcgcgctacctgcgggatctgctggtggcggcgaaccctgacctcttgcagcaggccctgccccgcaaggccatcacacatctcaagaagcgcagctgctacgtgtccctggacttcgagggcgacctccgcgaccccgcccgccaccatccggccagtttcagcgtgggtaacgggtgctgcgtctgcctcagcagtgagcgcttccgctgccccgaacccatcttccagccgggcctgctgggccaggctgagcaggggctgcccgcgctggccttccgggcgctgcagaagatgcccaaaacgctgcggacacgcctggcagacaccgtggtgctagccggcggctccacactgtttcctggcttcgccgagcgcctggacaaggagctggaggcgcagtgccggcggcacggctacgcggccctgcggccccacctggtggccaagcatgggcgtggcatggctgtgtggaccggcggctccatggtggcctccctgcactccttccagcgccgctggataactcgggccatgtaccaggagtgtggctccaggctgctgtacgatgtgttcaactgagtcaggctggactggggggggtggcactgcgttgggggacagctctctatctaaagagtcaagtgtttggagctggcagggtcctcctggaggttggagctgactggatgggtcacccccataccctttctgggccaggagaaggtatttgggacccatgggaccctcattttgaactgcagtttgaatctccccaaccactgccagttcagagaatgccagtccagctgcctacccacagggccctactttatggcaataaaggtgatgccccacttgtgtccatgcca

SEQ ID NO: 932 - DNA, 1151 bp, Homo Sapiens
  NM_001024683
ttctaccgcgggtgtacacatggtttgccagggtgtgcgcgtcttcccaaggggtctggggaccaaattccagctcccgccatcgggaggcacggtaagagaccgtaggggacacaatcccgagcaccgcagatgccgaggtctccgctgcgctccagtctgtcaacagaggcttcaggaccgcggggtcccttcaaatgccccgccagtcccaggccaatcaccgcgcagcttcttccgggatcgtcgccaatcatcggccgttgcgtattgcgggtacagaggggattcccaggccccaaaccagccctcatctcttggatggaacaggagagtgaggcttggagccccgccgcccaggatcctgagaagggggaaagactgggaggagctcggagaggagatgtcccaaacaggaaggaagaggaaccggaggaagtcccaagagccaaagggcctagaaaggctcctgtgaaggagagtcctgaagtgctggtggaacgcaaccctgacccagctattagcgtggccccggcacgggcacagccacccaaaaatgctgcctgggacccgaccacaggagcacagcccccggcacccatacccagcatggatgctcaggccggccagcggcgccacgtgtgcacggactgcggccgccgcttcacctacccctcactgctggtcagccacaggcgcatgcactcgggggagcggcctttcccctgccccgagtgtggcatgcgcttcaagaggaagttcgcagtggaagcgcaccagtggatccaccgctcctgctccggggggcggcggggccggaggcctgggatccgggctgtgcctcgggcccccgtccgaggtgaccgggacccgcctgtgctcttccggcactacccagacatcttcgaggagtgcggctgagcggcaccgcaggctggagttgagcctgaccttggcacgaaggactgacggatccctgaggtgggccactgagtcggggactccggaactgaaattcatgccctgggctttcctcaaggatccctcaagtttccaacttgtaaaaagaaaagtgcctgtaaagattcgaatagattagacttgccacccatctccccagtcttttgtttaacaaaaaaaaaaaaaaaaaa

SEQ ID NO: 933 - DNA, 4689 bp, Homo Sapiens
  NM_001024688
gagcgcgcacgtcccggagcccatgccgaccgcaggcgccgtatccgcgctcgtctagcagccccggttacgcggttgcacgtcggccccagccctgaggagccggaccgatgtggaaactgctgcccgccgcgggcccggcaggaggagaaccatacagacttttgactggcgttgagtacgttgttggaaggaaaaactgtgccattctgattgaaaatgatcagtcgatcagccgaaatcatgctgtgttaactgctaacttttctgtaaccaacctggtatagaaaaacattttggaaatttctacagaaaaagtaaaattgttactagtcaaacagatgaaatccctgtattgacattaaaagataattctaagtatggtacctttgttaatgaggaaaaaatgcagaatggcttttcccgaactttgaagtcgggggatggtattacttttggagtgtttggaagtaaattcagaatagagtatgagcctttggttgcatgctcttcttgtttagatgtctctgggaaaactgctttaaatcaagctatattgcaacttggaggatttactgtaaacaattggacagaagaatgcactcaccttgtcatggtatcagtgaaagttaccattaaaacaatatgtgcactcatttgtggacgtccaattgtaaagccagaatattttactgaattcctgaaagcagttgagtccaagaagcagcctccacaaattgaaagtttttacccacctcttgatgaaccatctattggaagtaaaaatgttgatctgtcaggacggcaggaaagaaaacaaatcttcaaagggaaaacatttatatttttgaatgccaaacagcataagaaattgagttccgcagttgtctttggaggtggggaagctaggttgataacagaagagaatgaagaagaacataatttctttttggctccgggaacgtgtgttgttgatacaggaataacaaactcacagaccttaattcctgactgtcagaagaaatggattcagtcaataatggatatgctccaaaggcaaggtcttagacctattcctgaagcagaaattggattggcggtgattttcatgactacaaagaattactgtgatcctcagggccatcccagtacaggattaaagacaacaactccaggaccaagcctttcacaaggcgtgtcagttgatgaaaaactaatgccaagcgccccagtgaacactacaacatacgtagctgacacagaatcagagcaagcagatacatgggatttgagtgaaaggccaaaagaaatcaaagtctccaaaatggaacaaaaattcagaatgctttcacaagatgcacccactgtaaaggagtcctgcaaaacaagctctaataataatagtatggtatcaaatactttggctaagatgagaatcccaaactatcagctttcaccaactaaattgccaagtataaataaaagtaaagatagggcttctcagcagcagcagaccaactccatcagaaactactttcagccgtctaccaaaaaaagggaaagggatgaagaaaatcaagaaatgtcttcatgcaaatcagcaagaatagaaacgtcttgttctcttttagaacaaacacaacctgctacaccctcattgtggaaaaataaggagcagcatctatctgagaatgagcctgtggacacaaactcagacaataacttatttacagatacagatttaaaatctattgtgaaaaattctgccagtaaatctcatgctgcagaaaagctaagatcaaataaaaaaagggaaatggatgatgtggccatagaagatgaagtattggaacagttattcaaggacacaaaaccagagttagaaattgatgtgaaagttcaaaaacaggaggaagatgtcaatgttagaaaaaggccaaggatggatatagaaacaaatgacactttcagtgatgaagcagtaccagaaagtagcaaaatatctcaagaaaatgaaattgggaagaaacgtgaactcaaggaagactcactatggtcagctaaagaaatatctaacaatgacaaacttcaggatgatagtgagatgcttccaaaaaagctgttattgactgaatttagatcactggtgattaaaaactctacttccagaaatccatctggcataaatgatgattatggtcaactaaaaaatttcaagaaattcaaaaaggtcacatatcctggagcaggaaaacttccacacatcattggaggatcagatctaatagctcatcatgctcgaaagaatacagaactagaagagtggctaaggcaggaaatggaggtacaaaatcaacatgcaaaagaagagtctcttgctgatgatctttttagatacaatccttatttaaaaaggagaagataactgaggattttaaaaagaagccatggaaaaacttcctagtaagcatctacttcaggccaacaaggttatatgaatatatagtgtatagaagcgatttaagttacaatgttttatggcctaaatttattaaataaaatgcacaaaactttgattcttttgtatgtaacaattgtttgttctgttttcaggctttgtcattgcatctttttttcatttttaaatgtgttttgtttattaaatagttaatatagtcacagttcaaaattctaaatgtacgtaaggtaaagactaaagtcacccttccaccattgtcctagctacttggttcccctcagaaaaaaattcatgatactcatttcttatgaatctttccagggatttttgagtcctattcaaattcctatttttaaataatttcctacacaaatgatagcataacatatgcagtgttctacaccttgcttttttacttagtagattaaaaattataggaatatcaatataatgtttttaatattttttcttttccattatgctgtagtcttacctaaactctggtgatccaaacaaaatggcttcagtggtgcagatgtcacctacatgttattctagtactagaaactgaagaccatgtggagacttcatcaaacatgggtttagttttcaccagaatggaaagacctgtacccctttttggtggtcttactgagctgggtgggtgtctgttttgagcttatttagagtcctagttttcctacttataaagtagaaatggtgagattgttttctttttctaccttaaagggagatggtaagaaacaatgaatgtcttttttcaaactttattgacaagtgattttcaagtctgtgttcaaaaatatattcatgtacctgtgatccagcaagaagggagttccagtcaagagtcactacaactgattagttgtttagagaatgagaaatggaacagtgaggaatggaggccatatttccatgacttcccttgtaaacagaagcaacagaagggacaagaggctggcctctacatcactctcaccttccaaatcttgtggaagtgcatctacttgccagaaccaaattaacttacttccaagttctggctgcttgcaggtggaactccagctgcaagggagttagggaaatgaaggtctttttttaaaagcttctcagccttcctagggaacagaaattgggtgagccaatctgcaatttctactacaggcattgagaccagttagattattgaaatattatagagagttatgaacacttaaattatgatagtggtatgacattggatagaacatgggatactttagaagtagaattgacagggcatattagttgatgaaatggagtcatttgagtctcttaatagccatgtatcataattaccaagtgaagctggtggaacatatggtctccattttacagttaaggaatataatggacagattaatattgttctctgtcatgcccacaatccctttctaaggaagactgccctactatagcagtttttatatttgtcaatttatgaatataatgaatgagagttctggtacctcctgtctttacaaatattggtgttgtcagtatttttcctttttaaccattccaatcggtgtgtagtgatgtttcattttggttttaatttgtatatccctgatagctataattgggtcatagaaattctttatacattctagatgcaagtctcttgtcggatatatgtattgagatattacacctagtctgtggcttgactgttttctttatgtcttttgatgaatagaagttttaaattttgacaaggtcaaatttatttttttcttttgtttgatattttttctctccaatttaaccccaagatttcagatattctgctctattatataaactttatatttttatatttgtgatctaccttgaattgatatgtatgttgtgaattatggatcagggttctttttttcccccatacaagtatccagtcattgtaacactgtttattgaaagaattatcctttcctcattaaattaccttgccaattagtaaaaaatcaattaaccataatggtggatctgtttctggactttctgtttggttacactgaaatgtttgtccatccttgcactcactcataccatactgccttgaattactgtagctgcatagatgctccttaagttgggattacattgtaataaacgcaatgtaagttaaaaaaaaaaaaaaaaaa

SEQ ID NO: 934 - DNA, 2434 bp, Homo Sapiens
  NM_001024732
gccggggcgtcaggctctgtgttggttggagcgagcatgtgggtctgcagtaccctgtggcgggtgcgaacccccgcccggcagtggcgggggctgctcccagcttctggctgtcacggacctgccgcctcctcctactccgcatccgccgagcctgcccgggtccgggcgcttgtctatgggcaccacggggatccagccaaggtcgtcgaaaccgtaattcctgggcacacatggcagctcagaaatgttgcctgacctactttgaggagatgatttgagcgaaacacccattctagcctggatgacatgaacatctccgtttggctttgtgcttagactcaagaacctggagctagctgctgtgagaggatcagatgtccgtgtgaagatgctggcggcccctatcaatccatctgacataaatatgatccaaggaaactacggattccttcctgaactgcctgctgttggagggaacgaaggtgttgcacaggtggtagcggtgggcagcaatgtgaccgggctgaagccaggagactgggtgattccagcaaatgctggtttaggaacctggcggaccgaggctgtgttcagcgaggaagcactgatccaagttccgagtgacatccctcttcagagcgctgccaccctgggtgtcaatccctgcacagcctacaggatgttgatggacttcgagcaactgcagccaggggattctgtcatccagaatgcatccaacagcggagtggggcaagcagtcatccagatcgccgcagccctgggcctaagaaccatcaatgtggtccgagacagacctgatatccagaagctgagtgacagactgaagagtctgggggctgagcatgtcatcacagaagaggagctaagaaggcccgaaatgaaaaacttctttaaggacatgccccagccacggcttgctctcaactgtgttggtgggaaaagctccacagagctgctgcggcagttagcgcgtggaggaaccatggtaacctatggggggatggccaagcagcccgtcgtagcctctgtgagcctgctcatttttaaggatctcaaacttcgaggcttttggttgtcccagtggaagaaggatcacagtccagaccagttcaaggagctgatcctcacactgtgcgatctcatccgccgaggccagctcacagcccctgcctgctcccaggtcccgctgcaggactaccagtctgccttggaagcctccatgaagcccttcatatcttcaaagcagattctcaccatgtgatcatcccaaaagagctggagtgacatgggaggggaggcggatctgaggggctgggtgcaggcccctcagttggggctcccaccttccccagactactgttctcctcactgcctcttcctattaggaggatggtgaagccagccacggttttccccagggccagccttaaggtatctaataaagtctgaactctcccttccaaaaagtagaagtcatccctgtcgagaaggaccaacactgtgcactggtcagctcacagcaccaagaggcccccttcctgcttttctgtcatgtgttcccccagtaatcattttctgaccaccctgaaagcaaagcctgggtgggtactggcagtgcaaaggccagtaggccaccatccctggccccaagctgcacaagcccacagacgagggtcctgtagaacaaacgctttgatgtgcttctcaggtagcctgcggcccagtccagggcttggggaggatcagctgcatggaagagtgaatgccaggctgaggtcatcagggccctgaggaacttggacgtggggtcttcactctcatggaactgcccttctaactggagacatagacaatataccagtggttctcaaccagaggcaattttacccccaggagacatttgacaatgtctggggatatttctggctatcacagcttatgaaggaggttgctactggcatctagcaggcagagtgagtgctgctgttaaacccaccacaggacacagaacagtctactgcaacaaagaattacccaaggcctggcgcggtggctcacacctgtaatcccagcactttgggaagccaaggcaagcggatcacttgagcccaggagttcaaggtcaacctaggtaacgtggtgaaacaccatctctacaaaaaatacaaacattagccaggtatggtgctgtgcacctgtagtcccagctactcgggaggttgaggtgggaggatcacctgagcctgggaggtctagactgcagtgagccatgatcatgccactgcattccagcctaggcaacagagcaagaccctatatcaaaaaaaaaaaaaaaatctagccccaaatgttcaatgttcatgaggtcgttgataaaccgtgcattaaacaatctcacagtaattaccat

SEQ ID NO: 935 - DNA, 1640 bp, Homo Sapiens
  NM_001024844
ggcctgccgagtccgcggcgttccccggctgcagccgggagggggccgaggagtgactgagccccgggctgtgcagtccgacgccgactgaggcacgagcgggtgacgctgggcctgcagcgcggagcagaaagcagaacccgcagagtcctccctgctgctgtgtggacgacacgtgggcacaggcagaagtgggccctgtgaccagctgcactggtttcgtggaaggaagctccaggactggcgggatgggctcagcctgtatcaaagtcaccaaatactttctcttcctcttcaacttgatcttctttatcctgggcgcagtgatcctgggcttcggggtgtggatcctggccgacaagagcagtttcatctctgtcctgcaaacctcctccagctcgcttaggatgggggcctatgtcttcatcggcgtgggggcagtcactatgctcatgggcttcctgggctgcatcggcgccgtcaacgaggtccgctgcctgctggggctgctgaagcaggagatgggcggcatcgtgactgagctcattcgagactacaacagcagtcgcgaggacagcctgcaggatgcctgggactacgtgcaggctcaggtgaagtgctgcggctgggtcagcttctacaactggacagacaacgctgagctcatgaatcgccctgaggtcacctacccctgttcctgcgaagtcaagggggaagaggacaacagcctttctgtgaggaagggcttctgcgaggcccccggcaacaggacccagagtggcaaccaccctgaggactggcctgtgtaccaggagggctgcatggagaaggtgcaggcgtggctgcaggagaacctgggcatcatcctcggcgtgggcgtgggtgtggccatcatcgagctcctggggatggtcctgtccatctgcttgtgccggcacgtccattccgaagactacagcaaggtccccaagtactgaggcagctgctatccccatctccctgcctggcccccaacctcagggctcccaggggtctccctggctccctcctccaggcctgcctcccacttcactgcgaagaccctcttgcccatcctgactgaaagtagggggctttctggggcctagcgatctctcctggcctatccgctgccagccttgagccctggctgttctgtggttcctctgctcaccgcccatcagggttctcttagcaactcagagaaaaatgctccccacagcgtccctggcgcaggtgggctggacttctacctgccctcaagggtgtgtatattgtataggggcaactgtatgaaaaattggggaggagggggccgggcgcggtggctcacgcctgtaatcccagcactttgggaggccgaggcgggtggatcacgaggtcaggagatcgagaccatcctggctaacatggtgaaaccccgtctctactaaaaatacaaaaaaaatttagccgggcgcggtggcgggcacctgtagtcccagctacttgggaggctgaggcaggagaatggtgtgaacccgggagcggaggttgcagtgagctgagatcgtgctactgcactccagcctgggggacagaaagagactccgtctcaaaaaaaaaaaaaaaaaaaaaaaaaa

SEQ ID NO: 936 - DNA, 3206 bp, Homo Sapiens
  NM_001024845
acaacaggctgtggaagagctgcgagcggcgcggcggggcgggcgaactcggcgcggcacagagcctcgggaggctgatgcaactttccctttaagaaagccacctgggcgcaccgcggtgcggacccagcacgcctgggccgggggctgcagcatgctcttgagatctgtggcctgaaaggcgctggaagcagagcctgtgagtgtggtccccgtcaccagagccccaacccaccgccgccatggtaggaaaaggtgccaaagggatgctgaatggtgctgtgcccagcgaggccaccaagagggaccagaacctcaaacggggcaactggggcaaccagatcgagtttgtactgacgagcgtgggctatgccgtgggcctgggcaatgtctggcgcttcccatacctctgctatcgcaacgggggaggcgccttcatgttcccctacttcatcatgctcatcttctgcgggatccccctcttcttcatggagctctccttcggccagtttgcaagccaggggtgcctgggggtctggaggatcagccccatgttcaaaggagtgggctatggtatgatggtggtgtccacctacatcggcatctactacaatgtggtcatctgcatcgccttctactacttcttctcgtccatgacgcacgtgctgccctgggcctactgcaataacccctggaacacgcatgactgcgccggtgtactggacgcctccaacctcaccaatggctctcggccagccgccttgcccagcaacctctcccacctgctcaaccacagcctccagaggaccagccccagcgaggagtactggaggctgtacgtgctgaagctgtcagatgacattgggaactttggggaggtgcggctgcccctccttggctgcctcggtgtctcctggttggtcgtcttcctctgcctcatccgaggggtcaagtcttcagggaaagtggtgtacttcacggccacgttcccctacgtggtgctgaccattctgtttgtccgcggagtgaccctggagggagcctttgacggcatcatgtactacctaaccccgcagtgggacaagatcctggaggccaaggtgtggggtgatgctgcctcccagatcttctactcactgggctgcgcgtggggaggcctcatcaccatggcttcctacaacaagttccacaataactgttaccgggacagtgtcatcatcagcatcaccaactgtgccaccagcgtctatgctggcttcgtcatcttctccatcctcggcttcatggccaatcacctgggcgtggatgtgtcccgtgtggcagaccacggccctggcctggccttcgtggcttaccccgaggccctcacactacttcccatctccccgctgtggtctctgctcttcttcttcatgcttatcctgctggggctgggcactcagttctgcctcctggagacgctggtcacagccattgtggatgaggtggggaatgagtggatcctgcagaaaaagacctatgtgaccttgggcgtggctgtggctggcttcctgctgggcatccccctcaccagccaggcaggcatctattggctgctgctgatggacaactatgcggccagcttctccttggtggtcatctcctgcatcatgtgtgtggccatcatgtacatctacgggcaccggaactacttccaggacatccagatgatgctgggattcccaccacccctcttctttcagatctgctggcgcttcgtctctcccgccatcatcttctttattctagttttcactgtgatccagtaccagccgatcacctacaaccactaccagtacccaggctgggccgtggccattggcttcctcatggctctgtcctccgtcctctgcatccccctctacgccatgttccggctctgccgcacagacggggacaccctcctccagcgtttgaaaaatgccacaaagccaagcagagactggggccctgccctcctggagcaccggacagggcgctacgcccccaccatagccccctctcctgaggacggcttcgaggtccagccactgcacccggacaaggcgcagatccccattgtgggcagtaatggctccagccgcctccaggactcccggatatgagcacagctgccaggggagtggccccacccccaccccgtgctcccaccgcagagactggtgaggcagaggccaggtgtctctgcctgccccctgccacgccctggccaggacggctgctgtcaccttggtcaccactgctagtgcagtcattcatgctcatgtccccagtgtttacatgtcctttggatgccaagatagcagctggggggaggggtgggagtggagggttgctgggaggtccaaagcactttggaggggtctcgggccaggtccccagcagcctggatggctttacgtggcctccgatacccttataccctgccctgagctgaggttctgggtgggcctccagccccatgactagtgctcctgccctcagagccgaccccagcctctgccaggcacatttggctattcctccctaggggcaggatgaagggctgggggactgcccagtgttacttgtcaggctgtgctgcccagccctgtttatctgtgtaattatttttgtaaacattgtattctctgtggtcgccacctcctcgcccccagcctcgggttcagtctgtcttccaggcctgcttgcacctcactgggctgctccggggtctctgcccctcattccaggcctggctgtcaggcccagccagcaggggcccgtgacccagcagcctgcccaaagcatttgtttctgggggatggggtgggggctgctccacaggaggtttgagcccagcaccctggggaaggggaccctgcacgacacccccttgccctccctccatgaggctaaaggcccagtcttcccaaatgtgctgccctcgttcatgtgccaaatggccccagcccacatgcccctcccctctctggagtgggagccccttctgaagtgtctgaatccctgaagtgttcatttgtccgtcctctgtgcagtgacagccccggccaagccacctctaatcctctgtagcaataacggtgcgccgcccatccctgcccattgtgcaccactaggattttaaagtccatagattttaatgaaatttctattcctgtctctga

SEQ ID NO: 937 - DNA, 3475 bp, Homo Sapiens
  NM_001024912
aaagctctgggccccagggaggaggctcagcacagagagtggaaaacagcagaggtgacagagcagccgtgctcgaagcgttcctggagcccaagctctcctccacaggtgaagacagggccagcaggagacaccatggggcacctctcagccccacttcacagagtgcgtgtaccctggcaggggcttctgctcacagcctcacttctaaccttctggaacccgcccaccactgcccagctcactactgaatccatgccattcaatgttgcagaggggaaggaggttcttctccttgtccacaatctgccccagcaactttttggctacagctggtacaaaggggaaagagtggatggcaaccgtcaaattgtaggatatgcaataggaactcaacaagctaccccagggcccgcaaacagcggtcgagagacaatataccccaatgcatccctgctgatccagaacgtcacccagaatgacacaggattctacaccctacaagtcataaagtcagatcttgtgaatgaagaagcaactggacagttccatgtatacccggagctgcccaagccctccatctccagcaacaactccaaccctgtggaggacaaggatgctgtggccttcacctgtgaacctgagactcaggacacaacctacctgtggtggataaacaatcagagcctcccggtcagtcccaggctgcagctgtccaatggcaacaggaccctcactctactcagtgtcacaaggaatgacacaggaccctatgagtgtgaaatacagaacccagtgagtgcgaaccgcagtgacccagtcaccttgaatgtcacctatggcccggacacccccaccatttccccttcagacacctattaccgtccaggggcaaacctcagcctctcctgctatgcagcctctaacccacctgcacagtactcctggcttatcaatggaacattccagcaaagcacacaagagctctttatccctaacatcactgtgaataatagtggatcctatacctgccacgccaataactcagtcactggctgcaacaggaccacagtcaagacgatcatagtcactgagctaagtccagtagtagcaaagccccaaatcaaagccagcaagaccacagtcacaggagataaggactctgtgaacctgacctgctccacaaatgacactggaatctccatccgttggttcttcaaaaaccagagtctcccgtcctcggagaggatgaagctgtcccagggcaacaccaccctcagcataaaccctgtcaagagggaggatgctgggacgtattggtgtgaggtcttcaacccaatcagtaagaaccaaagcgaccccatcatgctgaacgtaaactataatgctctaccacaagaaaatggcctctcacctggggccattgctggcattgtgattggagtagtggccctggttgctctgatagcagtagccctggcatgttttctgcatttcgggaagaccggcagctcaggaccactccaatgacccacctaacaagatgaatgaagttacttattctaccctgaactttgaagcccagcaacccacacaaccaacttcagcctccccatccctaacagccacagaaataatttattcagaagtaaaaaagcagtaatgaaacctgtcctgctcactgcagtgctgatgtatttcaagtctctcaccctcatcactaggagattcctttcccctgtaggggtagaggggtggggacagaaacaactttctcctactcttccttcctaataggcatctccaggctgcctggtcactgcccctctctcagtgtcaatagatgaaagtacattgggagtctgtaggaaacccaaccttcttgtcattgaaatttggcaaagctgactttgggaaagagggaccagaacttcccctcccttccccttttcccaacctggacttgttttaaacttgcctgttcagagcactcattccttcccacccccagtcctgtcctatcactctaattcggatttgccatagccttgaggttatgtccttttccattaagtacatgtgccaggaaacaagagagagagaaagtaaaggcagtaatgccttctcctatttctccaaagccttgtgtgaactcaccaaacacaagaaaatcaaatatataaccaatagtgaaatgccacacctttgtccactgtcagggttgtctacctgtaggatcagggtctaagcaccttggtgcttagctagaataccacctaatccttctggcaagcctgtcttcagagaacccactagaagcaactaggaaaatcacttgccaaaatccaaggcaattcctgatggaaaatgcaaaagcacatatatgttttaatatctttatgggctctgttcaaggcagtgctgagagggaggggttatagcttcaggagggaaccagcttctgataaacacaatctgctaggaacttgggaaaggaatcagagagctgcccttcagcgattatttaaattattgttaaagaatacacaatttggggtattgggatttttctccttttctctgagacattccaccattttaatttttgtaactgcttatttatgtgaaaagggttatttttacttagcttagctatgtcagccaatccgattgccttaggtgaaagaaaccaccgaaatccctcaggtcccttggtcaggagcctctcaagattttttttgtcagaggctccaaatagaaaataagaaaaggttttcttcattcatggctagagctagatttaactcagtttctaggcacctcagaccaatcatcaactaccattctattccatgtttgcacctgtgcattttctgtttgcccccattcactttgtcaggaaaccttggcctctgctaaggtgtatttggtccttgagaagtgggagcaccctacagggacactatcactcatgctggtggcattgtttacagctagaaagctgcactggtgctaatgccccttggggaaatggggctgtgaggaggaggattataacttaggcctagcctcttttaacagcctctgaaatttatcttttcttctatggggtctataaatgtatcttataataaaaaggaaggacaggaggaagacaggcaaatgtacttctcacccagtcttctacacagatggaatctctttggggctaagagaaaggttttattctatattgcttacctgatctcatgttaggcctaagaggctttctccaggaggattagcttggagttctctatactcaggtacctctttcagggttttctaaccctgacacggactgtgcatactttccctcatccatgctgtgctgtgttatttaatttttcctggctaagatcatgtctgaattatgtatgaaaattattctatgtttttataataaaaataatatatcagacatcgaaaaaaaaaa

SEQ ID NO: 938 - DNA, 2292 bp, Homo Sapiens
  NM_001024938
cggacctgcctctcacgcaatggatcccctggcggcaacccgagaccggttctcctacccgcattccgccaagtctctcgctctgcccaggacgcacagatgagagcgctccgaagactgattcagggcaggatcctgctcctgaccatctgcgctgccggcattggtgggacttttcagtttggctataacctctctatcatcaatgccccgaccttgcacattcaggaattcaccaatgagacatggcaggcgcgtactggagagccactgcccgatcacctagtcctgcttatgtggtccctcatcgtgtctctgtatcccctgggaggcctctttggagcactgcttgcaggtcccttggccatcacgctgggaaggaagaagtccctcctggtgaataacatctttgtggtgtcagcagcaatcctgtttggattcagccgcaaagcaggctcctttgagatgatcatgctgggaagactgctcgtgggagtcaatgcaggtgtgagcatgaacatccagcccatgtacctgggggagagcgcccctaaggagctccgaggagctgtggccatgagctcagccatctttacggctctggggatcgtgatgggacaggtggtcggactcagggagctcctaggtggccctcaggcctggcccctgctgctggccagctgcctggtgcccggggcgctccagctcgcctccctgcctctgctccctgaaagcccgcgctacctcctcattgactgtggagacaccgaggcctgcctggcagcactacggcggctccggggctccggggacttggcaggggagctggaggagctggaggaggagcgcgctgcctgccagggctgccgtgcccggcgcccatgggagctgttccagcatcgggccctgaggagacaggtgacaagcctcgtggttctgggcagtgccatggagctctgcgggaatgactcggtgtacgcctacgcctcctccgtgttccggaaggcaggagtgccggaagcgaagatccagtacgcgatcatcgggactgggagctgcgagctgctcacggcggttgttagttgtgtggtaatcgagagggtgggtcggcgcgtgctgctcatcggtgggtacagcctgatgacctgctgggggagcatcttcactgtggccctgtgcctgcagagctccttcccctggacactctacctggccatggcctgcatctttgccttcatcctcagctttggcattggccctgccggagtgacggggatcctggccacagagctgtttgaccagatggccaggcctgctgcctgcatggtctgcggggcgctcatgtggatcatgctcatcctggtcggcctgggatttccctttatcatggaggccttgtcccacttcctctatgtccctttccttggtgtctgtgtctgtggggccatctacactggcctgttccttcctgagaccaaaggcaagaccttccaagagatctccaaggaattacacagactcaacttccccaggcgggcccagggccccacgtggaggagcctggaggttatccagtcaacagaactctagtcccaaaggggtggccagagccaaagccagctactgtcctgtcctctgcttcctgccagggccctggtcctcactccctcctgcattcctcatttaaggagtgtttattgagcaccctttgtgtgcagacatggctccaggtgcttagcaatcaatggtgagcgtggtattccaggctaaaggtaattaactgacagaaaatcagtaacaacataattacaggctggttgtggcagctcatgactgtaatcccagcactttgggaggccaaggtgggaggatcaattgaggccagagtttgaaaccagcctaggtaacatagtgagaccccctatctctacaaaaaattttaaacattagctgggcatggtggtatgtgctaacagctctagctactcaggaggctgaggcagcaggatcacttgagtccaagagttcaaggtagcagtaagctacaatcacaccactgcatgccagactgggtgacagagggagacttcatctctttaaaacataataataataattacagactcaggaaatgcagtgaaagaaaaatacaggttggccaggtgaggtggctgatgcctgtaatcccagcactttgggaggccaagatgggaagattgctttgagaccagaagtttgagaccagcctgggccacatagtaagatcctgtttctaccaaaaaaaaaaaaaaa

SEQ ID NO: 939 - DNA, 5371 bp, Homo Sapiens
  NM_001024948
tcactcactggggagcccggcggtggcggcacctttcgaggtagacccgctgagctgctagcccgccggccagcgagtgagaggtcggacagactgtggagccgacagactgaaggacagcggcaccgccagacggccagaaagttccgccatgagctggggcacggagctgtgggatcagttcgacagcttagacaagcatacacaatggggaattgacttcttggaaagatatgccaaatttgttaaagagaggatagaaattgaacagaactatgcgaaacaattgagaaatctggttaagaagtactgccccaaacgttcatccaaagatgaagagccacggtttacctcgtgtgtagccttttttaatatccttaatgagttaaatgactatgcaggacagcgagaagttgtagcagaagaaatggcgcacagagtgtatggtgaattaatgagatatgctcatgatctgaaaactgaaagaaaaatgcatctgcaagaaggacgaaaagctcaacaatatcttgacatgtgctggaaacagatggataatagtaaaaagaagtttgaaagagaatgtagagaggcagaaaaggcacaacagagttatgaaagattggataatgatactaatgcaaccaaggcagatgttgaaaaggccaaacagcagttgaatctgcgtacgcatatggccgatgaaaataaaaatgaatatgctgcacaattacaaaactttaatggagaacaacataaacatttttatgtagtgattcctcagatttacaagcaactacaagaaatggacgaacgaaggactattaaactcagtgagtgttacagaggatttgctgactcagaacgcaaagttattcccatcatttcaaaatgtttggaaggaatgattcttgcagcaaaatcagttgatgaaagaagagactctcaaatggtggtagactccttcaaatctggttttgaacctccaggagactttccatttgaagattacagtcaacatatatatagaaccatttctgatgggactatcagtgcatccaaacaggagagtgggaagatggatgccaaaaccacagtaggaaaggccaagggcaaattgtggctctttggaaagaagccaaagggcccagcactagaagatttcagtcatctgccaccagaacagagacgtaaaaaactacagcagcgcattgatgaacttaacagagaactacagaaagaatcagaccaaaaagatgcactcaacaaaatgaaagatgtatatgagaagaatccacaaatgggggatccagggagtttgcagcctaaattagcagagaccatgaataacattgaccgcctacgaatggaaatccataagaatgaggcttggctctctgaagtcgaaggcaaaacaggtgggagaggagacagaagacatagcagtgacataaatcatcttgtaacacagggacgagaaagtcctgagggaagttacactgatgatgcaaaccaggaagtccgtgggccaccccagcagcatggtcaccacaatgagtttgatgatgaatttgaggatgatgatcccttgcctgctattggacactgcaaagctatctacccttttgatggacataatgaaggtactctagcaatgaaagaaggtgaagttctctacattatagaggaggacaaaggtgacggatggacaagagctcggagacagaacggtgaagaaggctacgttcccacgtcatacatagatgtaactctagagaaaaacagtaaaggtgcagtaacttatatctaaactaaccaggcacctttgtgccatgtgtgacataggaagagtaacataaaatgaaaacacattcaacaggttgaaaaaaataaggaaacttaaagggcatccaagattaattgttcactatgtgagctgagtgtaggcttgatcttgtgaatattaccacaagaaacattttgtggcactttactgtttgagtaacgttggtgtgaagcttaattgatgccttttgctttatgtcccgcttaagtctgtgtgaaggatttgtgtttttctgccttacaaatagaatttgatttattgggcaggaattcatggatagtaatgctctctgccccctttacttcagaaaacacagtgactttagtgaatttgaatagtgaaactgctctgaaatgctatggaaagccgactccccaaagagtggtttcttctagaagtttgaatttgtagctacagtttccaagaagaaaaatagtagttggataatttagtaaaataataacatcattttcattttcttacctattcttaactttggtttcctaaaggaagaaaatgagcaggtagcacataatctatttaagtagatttaaagagagtttcaaaataaatctcctggtctagctcttaggtgaataaaatagattttgtttgagacctcaaaatattttgaggttagctggtaattttcaataatttacaagcttccttccaaactaatctcatacttttgtatgtttcatcttgaaaatatcttttgggaaataccactttagtgattatttagcatttagcagttacacataggaaaatacacagttacatagaaaaatacacatttgaagatagaggaaaccttgaatggaggggaagtgttgacaaattttaatttttaaaggagaaactttttgactatctgggttagaggaagatatgtgtaccgcctttagggcattttgttatttccgctgaatcattagttattaggatagataaatttttccaattagtttcagcaagcgttgttggaaacactgtgcagtcaaggattgtgcagtgctggttgtgtgaccacaccctgagtcagtggtgtggggaagtaaagtgtgaagaagcagtaagattggtttttaattttgcccatgttttaaattttcctggtgttttcggtagctgactataaaatgatagagacatttgggacaggcactttaaactgaacaccccttttggttttaccaaaggtcttcagtaattgttcttttctttttcctcctggactgcaggttcctgaagagggtttctgaggaaatgggcaagatgttgaaggaggttacatgcagctgcttttgggggagggtattagagttgtcaggctcaaagagagtgagagaagcaagttgcatgagtgcatgcagacatgattttttttttactaacttcattagcatttccatacattgtttttaaaaatcataataccaacccttaagttcctagttcacagttattcccacaaaagaaaaagccaacaatagtgtaccatttttctatttattttattgctgtctaatcaataaagaatgcagagctgtcaaaaaatgtgtcttacattagctgtcccaacaggattgtcttccctcccagctctgttttaattggcttttagacccactatctgtcagatccttgccatctgtcagtgtctgcctgcgccacctccgtgcttgcttaacatcctgttgcatgtctagcgtgattgagctagatttttcaggcatgtctttagattcccttgttcttgtcaaagccttgttttgttttacatttgtagtgcaaatcactttgtcaaacatctccagcactaatgtttccatcttagtatttgtgcacactgctataacttccccactgcaaacattccagttttggcattacgaagaagtagctgtgaacctgaagtatttatgataagaaaaagaaaacatctctgctgtagcctacagcccagttgaaagaactctttgaaacgtgatacatcttcagcacctcagtctgggaagaatctagtcagcactgaaatcctggcataataaacacagaagatattcaccacctcaagacaaaggactattgtcaaaagtcagctgcttccattcaaatgctgccttaaacttgagtgcctaaatctgttgattgccaacactaccactacagtatcccacaaagggctttatgtgtcagctcagtgcgacctgctttaactctgcagcaccgctgcagctgccgatgtagcctcggtaggtggctattagagctctaccatatacagtggtgcatcttcaaatttatgcatcaaactaaagacatgtccaagtccattttaatttcctcagtggttttatgagaagttttatgggcctcccccaattgtctttttattttgggttatgacgatcatgtttgataattacaatgatagtctctttccacgtgatgcttttgtttgaacctgataaaatttagtgaaactttgtaatgatctatgtgcacttttacttgtaaaatggaatttctgtatgtttatacttgtaaatatgattgttgttagtgctcctgttgctcatggtgtcctgcctcgcatttgtgattctgttaatgacatgtatcttaactaatttcttagtggtgttgtaatagggagatggggcaggtggggggttatttgtaccactgaatcttcattaatttggttctttactgttttgaggggagaaagaacgtgaaatggtttgtgtattattgaattttaagcaatattttagaagctgtgtgactgctttaataactttttcccagtgttatttgaatcatactacccgttatactaaagctgaatgacaattgtgtgaaagttactgccttcataagatcaagtcaccactgttacacagctgacatatagtgtattacctttgcagctagtaaactataaagtttagatattgaatctcgttacagggttatttatataatgtgacattattcagtactgacagactacatgaagtagttttaaaatctagtgctatttttattttaaaggttagcaatgaggaggaaatgtgatctggctgtgtttgtcttctgtacaaagcctgaagtgcttatggttttttggctaacagccacagagggcaaagtttaagactttcttgtaaggactaactgttcttttcaagctactgtttgtttttctaaaagcaggatttgcttccgtaggaggcaagttccttgatgtggaatagtgcaacctgtatatgggttattataataggaaagacatttgtacttgcacagtttaaatcattcttaaattttgaacatgtgaattgtcccaaaaaatctttaattttttggtaatttttactctttttgtgcacatgttgatttcttaatggtaaatccttcatttaaagatagtgttctctgttgagaatatttacatggaataaaacaatcttttcatggcctgttaaaaaaaaaaaaaaaaaaaaaaaaaaaaaa

SEQ ID NO: 940 - DNA, 1622 bp, Homo Sapiens
  NM_001024959
agttgacgcgggggcggggagtcagcgagggcgagcctactggagtttgccgggggtgggaagaaggtgggcctcgagcaaagccgctagaggtggggtgcgggtggtcggcctcaggcgagccccggggcacagcccggggcgggaggcggagcttggcggccgagatctccgcgctgcagttagccccgccgagcgccaggagctgcggactgccactctccgcccctacctgagtgccgtgcgggccacattgcaggctgccctctgcctggagaacttctcctcccaggttgtggaacgacacaacaagccggaagtggaagtcaggagtagcaaagagctcctgttacaacctgtgaccatcagcaggaatgagaaggaaaaggttctgattgagggctccatcaactctgtccgggtcagcattgctgtgaaacaggctgatgagatcgagaagattttgtgccacaagttcatgcgcttcatgatgatgcgagcagagaacttctttatccttcgaaggaagcctgtggaggggtatgatatcagctttctgatcaccaacttccacacagagcagatgtacaaacacaagttggtggactttgtgatccacttcatggaggagattgacaaggagatcagtgagatgaagctgtcagtcaatgcccgtgcccgcattgtggctgaagagttccttaagaatttttaaaccatctggctggatctcgtggccttccccctcagactacccatgtctccacgaaggcgtcctggagtcactccccgagcagcgcggcggcggcagggagttgggttggggtgggcatttgatgcgggaggtgggtggtgtgcttgctagctgggcaagaaagcagcagtggacctgccccaaggccacacgtgcctggtcaggctggcttctgatgttcagtcccctgggccgggacagattttttttaacgtcttgaaacttaaactctgtgcttgtaggatactgtaacctttttgtctttttttttttttttttttttaaacctccacctccagtggctgtgactggtcccagtgattatacgttattggttgctgtgggtctgggcgggcctggagccagaaggcgacttattttttctctcctatgccaccccaggtggggagggagggaggtttcagactccagtttctcccttgcccttttattcccaagcctccttggccccagtataagtgttgggaactctctgccagcttcctgagttctgcctaaagatggccccccagcactggttggggacaagggccaaattggtgaccaccagtcatgcctaggacctggggcccaaaagccgggcaacctctggctacaggggccattgggtgccctcccagttgagaggggccgctgtttcgccttgtccgtcagtgccagtgcctgtgccagaggtggcgaggtgagtcctccagagcttcctggccgggccctcctcctgcctgttctggctcctctgctcccacgctagctgtcccttttctgattctggtggatcctccctcccctaattaaagtctctttttgcccctttggggctgcatgaggtcaaaaaaaaaaaaaaaaa

SEQ ID NO: 941 - DNA, 3325 bp, Homo Sapiens
  NM_001025
ggggtccttggctgggcggggcttgctcgcggtggcttgtggctccttcctgcggtgcttctctctttcgctcaggcccgtggcgccgacaggatgggcaagtgtcgtggacttcgtactgctaggaagctccgtagtcaccgacgagaccagaagtggcatgataaacagtataagaaagctcatttgggcacagccctaaaggccaacccttttggaggtgcttctcatgcaaaaggaatcgtgctggaaaaagtaggagttgaagccaaacagccaaattctgccattaggaagtgtgtaagggtccagctgatcaagaatggcaagaaaatcacagcctttgtacccaatgacggttgcttgaactttattgaggaaaatgatgaagttctggttgctggatttggtcgcaaaggtcatgctgttggtgatattcctggagtccgctttaaggttgtcaaagtagccaatgtttctcttttggccctatacaaaggcaagaaggaaagaccaagatcataaatattaatggtgaaaacactgtagtaataaattttcatatgccaaaaaatgtttgtatcttactgtcccctgttctcaccacgaagatcatgttcattaccaccaccacccccccttattttttttatcctaaaccagcaaacgcaggacctgtaccaattttaggagacaataagacagggttgtttcaggattctctagagttaataacatttgtaacctggcacagtttccctcatcctgtggaataagaaaatgggatagatctggaataaatgtgcagtattgtagtattactttaagaactttaagggaacttcaaaaactcactgaaattctagtgagatactttcttttttattcttggtattttccatatcgggtgcaacacttcagttaccaaatttcattgcacatagattatcttaggtacccttggaaatgcacattcttgtatccatcttacaggggcccaagatgataaatagtaaactcaaaattgctccccactctgtttattatttaaaggtgtcaggatctgtgttgtaatgtgtctacattaatgtgtttaggagaatacaggcattggatcatttagttgatggaagtatatgccaggcaagggagataaggtatacgacaagactgatgttttcagtatcttctcatgaggttgtcagagaccttcatgtcttcaaagactagtcagcaaatgaagtggtttagtgtagagacaagattggttgtgttttgataatttaagctaggtattgagtacatgtggattttgctgtccacaaatacttgtttcagagttttcatggatacagtggcatggttgaaatgaagctgtgagccttctgctttaaatctgatgtaagaaactcctgttaacaaatagtaagtatgggttaattagccctttgatcaaagcctagctttacattgtttaggatctttggaaaacaattggtttggttgcccactttccgtaggatcaagagcagaacctttcacatggcacagaagaacccaggttgcgcttcatacctgcatattccagccttagcctgccatttctctccttggcactttgtgctccagcaacactggtctcagttggtcatcctcaaacttgggttccatatccagcctcaggacctctgttcctgttactatggttccttgcatgtcgcctgctcttactaaagagctcgtgtgttttccagcacacttcggtttatctcttgatgatgatgctagtctctccctccgcaagggcggaaaggctgcctgttggtttgtaccagtgtttcctaacgtgtagctgcagtcagtatttggctaagctgttcccaggggctcaacagatgctttcggatgagccttaactgacccaatcctttgtgatgcgggagagattgctaggcctcgctcacctggccagaaccagggaaagaggccgcggttgcagcgcgattccaggccctgggcgtcaggcgcggggtgggcagctctccccgggcggtggggcccttgtgaccgcgaggcggggcgcaccaggaagggagtgggacagcgcgggcgcccagggatgtggcctggttacctgccttctctgatacgtcaagacaccttcaacaatggcttgcagctgtaccctgttggctgcacccaggacgcccttttcactgctaagcagtcctacctgaggcccaggggctgccagattgacccataaataatctccggcgcctcagatccagaagctgctgagcctgatcttagtgccttctcctttctctgtgtggccccccagcccctttccccactgccttgtgtccaaggccctttccttcatgtatccatggaggagagacaaaaatacacatcaataaaataagatagggaatccataaatagacattcagaagtatggccaacggatttatcttaaaaccaatggaggaagaagagtttcaataaatgttgtggacttccatttgtcaaagaccaaaacaaaggaaccccaaccttacatgtaatacaaacttaactcaaaatggatcatatatctaaatgtaaaatggaaagctataaaactgaaaacagactatctttacaacctaggcgtaggtatagtttttagacattacaccaaaagcacatgccgtaaaagaaaaaatagataaattggtggatttcattaaaattaaaaaactttttctctctgaaaaatcctgttaagctgggcgctgtggttcatgcctgtaatcccagcactttgggaggctgagttgggaagaaattaatagcttgaggccaggagttcaagatcatcctgggcagcaaagtcatacactcttgagggaagagagagaccttctcatattgttttatattgttttatactcagtacctgttttaagaaaaaaacaaggaagtgaaatcaaagacaggcagcccggcaccaggcctgaaaccagccctgggcctgcctggcctaaacctagtagttaaaaatcaacttacgacttagaacctgatgttatccgtagattccaagcattgtataaaaaaattgtgaaactccctgttgtgttctgtaccagtgcatgaaacccctgtcacatatcccctagattgctcaatcaatcacgaccctttcatgtgaaatctttagtgttgtgagcccttaaaagggacagaaattgtgcacttgaggagctcagattttaaggctgtagcttgccgatgctcccagctgaataaagcccttccttctacaaaaaaaaaaaaa

SEQ ID NO: 942 - DNA, 793 bp, Homo Sapiens
  NM_001025071
ctccgccccctcccactctctctttccggtgtggagtctggagacgacgtgcaggtaggaggcccgggcgcgacaatcggggggcatcctgcggcgaggggaccctgtggggcttgggacgagagacgggggtctttccgtgggaaccgagctaggtgccgggcaagagacgcgcggctggcccacctggatcctggccaactcgggattgagttcgttcctggtctcagaaggcccgttttgctttcagggaggagcttgtgaagtaaggaaatggcacctcgaaaggggaaggaaaagaaggaagaacaggtcatcagcctcggacctcaggtggctgaaggagagaatgtatttggtgtctgccatatctttgcatccttcaatgacacttttgtccatgtcactgatctttctggcaaggaaaccatctgccgtgtgactggtgggatgaaggtaaaggcagaccgagatgaatcctcaccatatgctgctatgttggctgcccaggatgtggcccagaggtgcaaggagctgggtatcaccgccctacacatcaaactccgggccacaggaggaaataggaccaagacccctggacctggggcccagtcggccctcagagcccttgcccgctcgggtatgaagatcgggcggattgaggatgtcacccccatcccctctgacagcactcgcaggaaggggggtcgccgtggtcgccgtctgtgaacaagattcctcaaaatattttctgttaataaattgccttcatgtaaactgtttcaaaaaaaaa

SEQ ID NO: 943 - DNA, 4706 bp, Homo Sapiens
  NM_001025072
acctccggtcgctggacgtgctctcgcgtagctccgcctttcgtaagtccccccgcctcgcatgatggctgcggtgccgccgggcctggagccgtggaaccgtgtgagaatccctaaggcggggaaccgcagcgcagtgacagtgcagaaccccggcgcggcccttggttgagcaatgtttaaagcgtttgaaaaacatgaatttggagggctcaattcaagacctgtttgagttgttttcttccaagtaatgaaaatcagcccttaactaccaaagtatgtgttgtccccagtcagccagtggtggagttggtgttgatgaaggttttgggagcctgcaagttgttgctccgcttgttggactgctgctgcaaaacttttcttttgactgtgaaacatctaggtttgcaagagttcattattttaaaccttgtgatggttgggctggtgagcaggttatgggttctctataaaggtgtcttaaaaaggttgattttgttatatgagcctttgtttggattgcttcaagaggtcgctaggattcaaccaatgccttacttcaaagattttacctttccttctgatatcactgaatttttaggacagccatattttgaagcctttaagaaaaaaatgcctatagcttttgcagctaaaggaataaataaattgctaaataaactgtttttaataaatgagcagtcaccaagagccagtgaagaaaccttgcttggaatttcaaaaaaagctaaacaaatgaagatcaatgtacagaataatgtggatcttggacagccagtaaagaataagagagtcttcaaagaagagtcatcagaatttgatgtgagggctttctgcaaccagctgaaacacaaagctactcaggagaccagttttgattttaaatgttctcaatccagactaaagacaaccaagtattcttctcagaaagtgataggaactcctcatgccaaaagttttgtgcaaagattccgagaggctgagtccttcacacaactttctgaagaaatccagatggcagttgtatggtgcaggagcaaaaaactcaaggctcaggccatttttctgggtaacaaacttcttaaaagcaaccggcttaaacatctggaagctcaaggtactagtttgccaaagaaactagagtgcataaaaacgtctatttgcaaccaccttcttcgtggctcaggtatcaaaacttcaaagcatcatctgagacagagaagatcacagaataaatttttacggagacaaaggaaaccacagagaaagttgcagtcgactcttttaagggaaattcagcagttctctcaagggactcggaagagtgctacagataccagtgctaagtggagactctcacactgtactgtgcatagaactgatctctaccctaacagtaagcagctcttgaatagtggagtttcaatgcctgtcatacaaactaaggagaaaatgattcatgaaaatcttagaggcatccatgaaaatgaaactgattcgtggacggtgatgcaaataaataaaaacagtacatcaggaaccattaaggagacagatgacattgatgatatttttgctttaatgggagtttagatgttcgttcatatgtgagacttttaagtgattaacaaggctagttcagtgttctaagtagaactgctaagatctggaagtaccacctggactcacagaggagctgctttagtgcagcattgcacaggagttcatttcagttcagtctacatttaaagtagcattgtgtcatttcatcaacaagtatttcttttttggcttcaactacatgtcaggtgttaatatgaaaaatctgccacagcctacccttgagaagcagatgtaattccttgagtgaggctagtaagtctctgaaaaactgaataattttatgacttactaggcaatttaataatcgtttgcaaaaaccattgtgtcttgaggtaaatgaggagcgggggtgggagatagcaaggaaacacctgaaaggtcaatttggtcttattggctccattatacataggtccgcctctgaatactaaagtttgtagctcctgacatttatgttttcttgtttatatgttggaattgatcaacaaggtttgccactgcttgtattaccagggactggttacaaccattatttctcttcatttgcttggcttatctcatattaaagtgagtttggagttctccaaaacgttttaattttatttatttgggtaccagtgattgattccaaataaacctttttacaaaaaggcaataaggtggtttatggttacatatgaaatataataggataacaggtagatgagaaagtaaaatgaaaaaatgaggttaggagatacaaagtagacccaggaatgaggctagaacatttataatttggtgttgatgctgtcatctgataggggatgttgctcgtactgttgctctgaggggagtacatcttgagtattttcaaataatgatgtgaagtttgaggtaggtatctttccaatgttctaactttactagaattaggttattaagcttctctagtgcccttaacttttgttacatagagatttaaagaaaaagaaagtagtaccttagtatgtaccgcatccttcttttcctcagccaccctatcataacagaagttatttcccttccattctttatttggctttgttctttccctgtctgccttctccattttctcagttatctctaccagtggttctcaaactttagactttttgagaatcacctggtgggttgctaaaagatgcagattagccctttcccagagactgataaacaggggccagaaacctgcatttttaacatggagcccaagtgattttgatccaggtggcccccaaatccagttatataaacactactttagcttctctcctgaagccttaagtaaactggtttaattcttaatctgtagtcagttttcatattccttttggctttctaccaagtggtagtatccatttagtgccttaaaatacagacaataccaaggagatttcattctagacaagtctagaaatggccattaacttctaagtgtccttgtgttcaatgaatatcctttacctattgggaaatagaaggtaaattagtaagagaactggtgtatagctttgtggaccatagggcttatttgctgagagttgtctatattcatgcacccagtcccctaagtagcctcttttaatacttcatttagctgattcagaaaaaaactccctgggaattaggagatttaaggttcagtcttgcttctcctacttgtggcttcactgagctagtcagtttcctcaggcttaggtttctggatttgaagtggaattttttcaagaatgaaacttttatagctgaaataaactttggagcttatctttcattggaaaaaccagggtggttcagtgagttaaggacaatatagcatggactgggctgccagtctagcatttgtttccaaattcattcatgttcttttggagtatcttcatctcctctcattttcccatcttctgccctttactattctgggaaaatggcaaaaaagcttcacatgtgtccacaaaatgacaatttgtatgtttataaggaattcagtattctgtatcagttactttttccaaataaatccaaatatttaacatttaaaaaaatgcaatctaaagtataccaaactgtaacttacctagtaaatgagattagaaactattgtcagggtcatcgtagtgaattattattattattattttttgagacagagtcttgtgctgttgcccaggctggagcacagtggtatgatctcagttcactgcaccctccacctcctgggctcaagctattctcccacctcagccgcctgagtagctgacactataggcaccaccatgccctggctaattttttaaaaactttgtgtagagatagggtttcaccatgttgcttaggctggtctcaaactcctggactcaagggatccacccactttggtctcccaaagtgctgggattacccacatcctagtaccaactttatcacttctgatggcattaggacacacaggccatttataagagcagtgtttgagacctcctgtgtgtcacttccaatcctcttggccttcatactaaagtcactgctgtggcaaccagtttcaagcagggctgaaccttgcctcttgctctggggatgtctcacttcctgcccctgggcttctcaccagctacaggaactgcctagcacttgggtatgtacaacctggaagaggtgtggggccaccccatcccctcctcaaagaaattcacaggcacagtatgaggctaaagtaacttccatcttggatgctaatctaccatgttgacttctgataaccagttcctggaatgccctctaagatttctacttttatctattaaaagaacacacacacacacacacactgtaaatcctggccttaagcaagttataggctaagttgtaaacagcattcttgcctttccctgaggaggtgacttcagtgtctcacatgttccttcatgtacccccttttctctatggcatataagccctgggtcggggggtaactgtggggatcactgcctgagacatggcttctgtgcataagtccctattaaatgtttctttctgacaaa

SEQ ID NO: 944 - DNA, 3474 bp, Homo Sapiens
  NM_001025091
gcgccagcttggagagccagccccatcggggttccccgccgccggaagcggaaatagcaccgggcgccgccacagtagctgtaactgccaccgcgatgccgaaggcgcccaagcagcagccgccggagcccgagtggatcggggacggagagagcacgagcccatcagacaaagtggtgaagaaagggaagaaggacaagaagatcaaaaaaacgttctttgaagagctggcagtagaagataaacaggctggggaagaagagaaagtgctcaaggagaaggagcagcagcagcagcaacagcaacagcagcaaaaaaaaaagcgagatacccgaaaaggcaggcggaagaaggatgtggatgatgatggagaagagaaagagctcatggagcgtcttaagaagctctcagtgccaaccagtgatgaggaggatgaagtacccgccccaaaaccccgcggagggaagaaaaccaagggtggtaatgtttttgcagccctgattcaggatcagagtgaggaagaggaggaggaagaaaaacatcctcctaagcctgccaagccggagaagaatcggatcaataaggccgtatctgaggaacagcagcctgcactcaagggcaaaaagggaaaggaagagaagtcaaaagggaaggctaagcctcaaaataaattcgctgctctggacaatgaagaggaggataaagaagaagaaattataaaggaaaaggagcctcccaaacaagggaaggagaaggccaagaaggcagagcagggttcagaggaagaaggagaaggggaagaagaggaggaggaaggaggagagtctaaggcagatgatccctatgctcatcttagcaaaaaggagaagaaaaagctgaaaaaacagatggagtatgagcgccaagtggcttcattaaaagcagccaatgcagctgaaaatgacttctccgtgtcccaggcggagatgtcctcccgccaagccatgttagaaaatgcatctgacatcaagctggagaagttcagcatctccgctcatggcaaggagctgttcgtcaatgcagacctgtacattgtagccggccgccgctacgggctggtaggacccaatggcaagggcaagaccacactcctcaagcacattgccaaccgagccctgagcatccctcccaacattgatgtgttgctgtgtgagcaggaggtggtagcagatgagacaccagcagtccaggctgttcttcgagctgacaccaagcgattgaagctgctggaagaggagcggcggcttcagggacagctggaacaaggggatgacacagctgctgagaggctagagaaggtgtatgaggaattgcgggccactggggcggcagctgcagaggccaaagcacggcggatcctggctggcctgggctttgaccctgaaatgcagaatcgacccacacagaagttctcagggggctggcgcatgcgtgtctccctggccagggcactgttcatggagcccacactgctgatgctggatgagcccaccaaccacctggacctcaacgctgtcatctggcttaataactacctccagggctggcggaagaccttgctgatcgtctcccatgaccagggcttcttggatgatgtctgcactgatatcatccacctcgatgcccagcggctccactactataggggcaattacatgaccttcaaaaagatgtaccagcagaagcagaaagaactgctgaaacagtatgagaagcaagagaaaaagctgaaggagctgaaggcaggcgggaagtccaccaagcaggcggaaaaacaaacgaaggaagccctgactcggaagcagcagaaatgccgacggaaaaaccaagatgaggaatcccaggaggcccctgagctcctgaagcgccctaaggagtacactgtgcgcttcacttttccagaccccccaccactcagccctccagtgctgggtctgcatggtgtgacattcggctaccagggacagaaaccactctttaagaacttggattttggcatcgacatggattcaaggatttgcattgtgggccctaatggtgtggggaagagtacgctactcctgctgctgactggcaagctgacaccgacccatggggaaatgagaaagaaccaccggctgaaaattggcttcttcaaccagcagtatgcagagcagctgcgcatggaggagacgcccactgagtacctgcagcggggcttcaacctgccctaccaggatgcccgcaagtgcctgggccgcttcggcctggagagtcacgcccacaccatccagatctgcaaactctctggtggtcagaaggcgcgagttgtgtttgctgagctggcctgtcgggaacctgatgtcctcatcttggacgagccaaccaataacctggacatagagtctattgatgctctaggggaggccatcaatgaatacaagggtgctgtgatcgttgtcagccatgatgcccgactcatcacagaaaccaattgccagctgtgggtggtggaggagcagagtgttagccaaatcgatggtgactttgaagactacaagcgggaggtgttggaggccctgggtgaagtcatggtcagccggccccgagagtgagctttccttcccagaagtctcccgagagacatatttgtgtggcctagaagtcctctgtggtctcccctcctctgaagactgcctctggcctgcagctgacctggcaaccattcaggcacatgaaggtggagtgtgaccttgatgtgaccgggatcccactctgattgcatccatttctctgaaagacttgtttgttctgcttctcttcatataactgagctggccttatccttggcatccccctaaacaaacaagaggtgaccaccttattgtgaggttccatccagccaagtttatgtggcctattgtctcaggactctcatcactcagaagcctgcctctgatttaccctacagcttcaggcccagctgccccccagtctttgggtggtgctgttcttttctggtggatttaatgctgactcactggtacaaacagctgttgaagctcagagctggaggtgagcttctgaggcctttgccattatccagcccaagatttggtgcctgcagcctcttgtctggttgaggacttggggcaggaaaggaatgctgctgaacttgaatttccctttacaaggggaagaaataaaggaaaggagttgctgccgacctgtcactgtttggagattgatgggagttggaactgttctcagtcttgatttgctttattcagttttctagcagcttttaatagtcccctcttccccactaaatggatcttgtttgcagtcttgctgacagtgtttgctgtttaaggatcataggattcctttcccccaacccttcacgcaaggaaaaagcaaagtgattcataccttctatcttggaaaaaaaaaaaa

SEQ ID NO: 945 - DNA, 8136 bp, Homo Sapiens
  NM_001025108
ctgatcacctgcctttccagaccggagacgggcggcaagtttgaagtcgacacccagaggccagtttgtcccccttcccgcgcgcgggcggcccgagcctcggcggcggcggtagcggcggcggcgacgctgacacctcccaccatggacagcttcgacttagccctgctccaggaatgggacctcgagtcactgtggggtgaagacatcttaaaccagaggaatgactctctagttgtggaatttcagtcatcagccagcagatgcaggagtgtctatgaaccagatagaaatgcattacggaggaaagaacgagaaagaagaaatcaagaaactcaacaggatgatggcacgtttaattctagttactctctcttcagtgagccctacaagactaacaagggggatgaactctccaaccggatccagaacactttaggcaattatgatgaaatgaaagactttttaactgatagatccaatcagagtcatctcgttggagttcccaaacctggggttcctcagactcctgtgaacaagatcgatgaacattttgttgcagattcaagagcccagaaccagccctcgtctatctgtagcactacaacttccacaccagcagctgtccccgtgcagcagagtaagagaggcactatgggctggcagaaggctgggcacccaccctctgacggccaacagagagcaacacaacagggctctctcaggaccttgcttggagatggtgttggcagacagcagcctcgggccaaacaagtgtgcaatgtggaggtgggccttcagacccaggagaggccacctgccatggcggccaagcacagcagcagcggacactgtgttcagaactttcctccatccctagcttcaaaacccagcctggtccagcagaaaccgaccgcgtatgtgaggccaatggacggccaagatcaggcccctgatgagtctcctaagctgaagtcgtcttcggaaaccagcgtgcactgcacatcatacaggggagtccctgccagcaagccggagcctgccagagccaaggccaagctctccaagttcagcatccccaagcagggggaggagagtagatctggagaaaccaacagctgtgttgaagaaataatccgggagatgacctggcttccaccactttctgctattcaagcacctggcaaagtggaaccaaccaaatttccatttccaaataaggactctcagcttgtatcctctggacacaataatccaaagaaaggtgatgcagagccagagagtccagacaatggcacatcgaatacatcaatgctggaagatgaccttaagctaagcagtgatgaagaggagaatgaacagcaggcagctcagagaacggctctccgcgctctctctgacagcgccgtggtccagcagcccaactgcagaacctcggtgccttccagcaagggcagcagcagcagcagcagcagcggcagcagcagctcctccagcgactcagagagcagctccggatctgactcggagaccgagagcagctccagcgagagtgagggcagcaagcccccccacttctccagccccgaggctgaaccggcatcctctaacaagtggcagctggataaatggctaaacaaagttaatccccacaagcctcctattctgatccaaaatgaaagccacgggtcagagagcaatcagtactacaacccggtgaaagaggacgtccaggactgtgggaaagtccccgacgtttgccagcccagcctgagagagaaggagatcaagagcacttgcaaggaggagcaaaggccaaggacagccaacaaggcccctgggagtaaaggcgtgaagcagaagtccccgcccgcggccgtggccgtggcggtgagcgcagccgccccgccacccgcagtgccctgtgcgcccgcggagaacgcgcccgcgcctgcccggaggtccgcgggcaagaagcccaccaggcgcaccgagaggacctcagccggggacggcgccaactgccaccggcccgaggagcccgcggccgcggacgcgctggggacgagcgtggtggtccccccggagcccaccaaaaccaggccctgtggcaacaacagagcgagccaccgcaaggagctgcgctcctccgtgacctgcgagaagcgccgcacgcgggggctaagcaggatcgtccccaaatccaaggagttcattgagacagagtcgtcatcttcatcctcctcctcggactccgacctggagtccgagcaggaggagtaccctctgtccaaagcacagaccgtggctgcctctgcctcctccgggaatgatcagaggctgaaggaggccgctgccaacgggggcagtggtcctagggcccctgtaggctccatcaacgccaggaccaccagtgacatcgccaaggagctggaggagcagttctacacactggtcccctttggccggaacgaacttctctcccctctaaaggacagtgatgagatcaggtctctctgggtcaaaatcgacctgaccctcctgtccaggatcccagaacacctgccccaggagccaggggtattgagcgcccctgccaccaaggactctgagagcgcaccgcccagccacacctcggacacacctgcagaaaaggctttgccaaaatccaagaggaaacgcaagtgtgacaacgaagacgactacagggagatcaagaagtcccagggagagaaagacagctcttcaagactggccacctccaccagtaatactttgtctgcaaaccactgcaacatgaacatcaacagtgtggcaataccaataaataaaaatgaaaaaatgcttcggtcgcccatctcacccctctctgatgcatctaaacacaaatacaccagcgaggacttaacttcttccagccgacctaatggcaacagtttgtttacttcagcctcttccagcaaaaagcctaaggccgacagccagctgcagcctcacggcggagacctcacgaaagcagctcacaacaattctgaaaacattcccctccacaagtcacggccgcagacgaagccgtggtctccaggctccaacggccacagggactgcaagaggcagaaacttgtcttcgatgatatgcctcgcagtgccgattattttatgcaagaagctaaacgaatgaagcataaagcagatgcaatggtggaaaagtttggaaaggctttgaactatgctgaagcagcattgtcgtttatcgagtgtggaaatgcaatggaacaaggccccatggaatccaaatctccttatacgatgtattcagaaacagtagagctcatcaggtatgctatgagactaaaaacccactcaggccccaatgccacaccagaagacaaacaactggctgcattatgttaccgatgcctggccctcctgtactggcggatgtttcgactcaaaagggaccacgctgtaaagtattcaaaagcactaatcgactatttcaagaactcatctaaagccgcccaagccccatctccgtggggggccagtggaaagagcactggaaccccatcccccatgtctcccaacccctctcccgccagctccgtggggtctcagggcagcctctccaacgccagcgccctgtccccgtcgaccatcgtcagcatcccacagcgcatccaccagatggcggccaaccacgtcagcatcaccaacagcatcctgcacagctacgactactgggagatggccgacaacctggccaaggaaaaccgagaattcttcaacgacctggatctgctcatggggccggtcaccctgcacagcagcatggagcacctggtccagtactcccaacagggcctgcactggctgcggaacagcgcccacctgtcatagggacctcaccctggggccagagtgggctctggtctccacagatggctcaacgtttttggacactgtgctactgaaactcccagccacagcatttatcagactgcggtgaacatttcctcagcattgaacaatgatcttttgcagggcatgtgtgtttgtatgtgtgggtatataagaagccgcctgtgtatgtgtgtaagatacacagctcttcagaacacaccttctttgtctagtttccataatcccaggctagacaaagtgatcagaggtttctgactagaggaagtacacacacacacacacacacacacacacaccgtacactcacacacaatcacagacacacactttctattccattccagtgctaaaccgtgacttcttagaaaattcaaccaaaatctcatgggttagttaaccaggtgcaatacagcacaccaaaagcttgactgccagtgaagatggacctgctcttatactgttgattactttcagtattaatatactattccccaattattttttgattggtatgtattaatgggtaattgaataatgaaaataagccaggtatttttgtgccggaagtttactagattgcatgttaccaaataccctgctcttcctctaattcccttcccccatctgactctattatcaactaaatgcattccaggcaaacagatggacactcacagcccttcccagccccacctccaagtagtatgcaaatggcactgagatttagcaaaaacgcggcgtctttgaaagttaacagacactaaggtagcagtgcctgtgtgttggagctcagttaggagttgaagttttctgcacctgtgataacaagcccaccagccacatgcatttcttcttcctgccactgtgactcggtggctgtagagccacatggcatttgtcagccaatctgtttcaagtcttttctttccaccaatagctttcttacagattttcttggctaaatgaggccattacctagattgtcccttcagtaggagcctgaatccttcgcttaccaggctgagagctatttgccatgataatgctgattctctcactcctcatgcagaatgtgcacctgcagccctttgatgcgttttgatttgggggcgatttttcaggctttgattagcaggctgcttgcaatgcagaagatcacagttcctttctggggcagcagcaaccagagcctcttcctgtgtcctgtgtgtctggtatgtttacaccttgctctgagtttttctcttgttttctttttttaattaagtttacattttagtttctttgacatcttgtttacagtttttgtctgatgttttttcttttgtagtgtcttatgccctagatttagtcatcttgttaaatatatttggatatgaaatcttgacgaaaagaaaataactcctgaaaaagagggtctatcttgccacacgttaaaaacaaaaataatgtccttgtggcctcttacttgataaagttgcaccaggacggtctgagaaaggcaggcggtgtaatatgtggtgcaatccattttttcaaggtgatgacggcacaaaatacttagactagatgctgatccataaacattcactgatattcttacaggttggtttgcagtgttaacatttttgttagcctgatctgtaggtgggaagtaagatcatcataattccttagctctgagcactgattcaaaattgtataaatgactgaacaacttagatgatttgaaattaattgaaaataagaagggcttgtggaatttgcatttggctttggccttcaagcatttggaaatattaagagaatttccattttacatgtctccaactggggtgcttcttacaaccctttcactttttttttgagacgagtttcgctctgttgcccaggctggagtgcagtggcacgatctcggctcactgcatcctctgcctcctgggttcaagtgattgtcccgcctcagcctcccaagtagctgggattacaggtgtgcactaccatgcccagctaatttttgtgtttttagtagagactgggtttcaccatgttggccaggctcgtctcaaactcctgacctcaggtgatctacccgcctccacctcccaaagtgttgtgattacaggcgtgagccaccacacccagccctttcactaatttttggcagagttcacaatcccatcctatgtcagaaacttgaacctaacttaagaaattttgagtcatttttttggaggactgaggctttgttctacctactcttgaagaatcctgatgaaatattcaaacacataaagggatggccctggaggtctatcctgcatacctggagagcttctctggtcctgcccaccttgaaagttgcagactttgttgtaacatctatgtgatgagcttccctgtgaagccccatttgacaggtgggccagcagtgttttatcagcactctgatggcccacatttcccaggaaaacttcttgaaacttaccgttgtgggcagtggtcagagcgtgtagttcttatgactgtcttgtttcatctgtggagcacgtgtggagcacgttggtacagcagtttctgtggggtttggcatgggtgattttggttagtaaccatcctccaattgttgcttgtgaaagtcattcataacttgttccttttacttagttttgttgttactgctgttgttgttggtttggttggttttgagaccgggtctggctctgtagcccaagctggaatgcggtggcgcgatcatggctccctgcagcctcaaactcctgggctcaagcaatcctcctgcctcagcctcccaagcagctgggaagataggcacgtgccaccacacccggctaattttttctttattttttttgtagagatgggggtctcactatgttgcccaggctggtctcaaactcctgggctcaagcgatcctttggcctcggcctcccaaagtgcatgagccaccatgcctggcctgtttagttttgtttcaagttgaaatacctttcttgtgttttctaattagaaaagtaatatctactcattgtaaaaactcaaacagtgcagaaatgtagaaagtagaaagtgtaagtccctggttgtcccttctgcctgagacaaccactgctcacagtttgatgtatatccttccagagactctcaaatttaagcaaataatttttattaccatgtctttttatttgaagacgtacatttgcctccaaagttcaacacaagttcaactgaccatatccttccatgacctgaatagatgctatcctttatcacgatgttcaattgcctttgaaagagagtagtccaggtatattcctgatcaaaatttggcatttttgatgatactactctacacagatcagactcatgtgcagaatcgtgcctggagagagaggtttggttaagacagagatttctggaaacattcaaattgcaaatggaaacttgaaacccacaatctaatgaggaatgtactggaaaaataatctgaagagttgacaaattgtgtactagattgaacacatggaatgcaatgcaatgagactttctgcactaaaacttatcctcatatgtacaacaatgatgtgtgtattatataacagtgatgtgtacatttctgacaccccatacataatatacacagtttgtataaatgcatacatttaaaaatatatatgtacaatacagctaacataaaactgtagtacgcctgaaggatattactagtgcctaatattgagtatgagtcactgcgtgttcgcatcaacttggaagtgcagtaattgttataaaattaatcagtgcagccaacattatttatgaatcacatctttgaaactgtgcagtagcatatacatatatatttttaaataacatttttcacagttttccagagttactgttgaaatctgcatcaccaaaaaaaaaaaaaagcaagatttttttaacaatgtagacactcttcagacccagtaatctgcgtgtgatttcctatttgtagattcccaagagactttagcagtcaccagccttaatgcatgtacaggatattattgtgacttaatttatctgcagtttttaatccatgtgaaattggaatttataaacggacttggattaaacatgtctgcctttctaaggttgcaaatgttacattaaatgatttatgttgtaaaaaaaaaaaaaaaaaa

SEQ ID NO: 946 - DNA, 1519 bp, Homo Sapiens
  NM_001025159
cagggtcccagatgcacaggaggagaagcaggagctgtcgggaagatcagaagccagtcatggatgaccagcgcgaccttatctccaacaatgagcaactgcccatgctgggccggcgccctggggccccggagagcaagtgcagccgcggagccctgtacacaggcttttccatcctggtgactctgctcctcgctggccaggccaccaccgcctacttcctgtaccagcagcagggccggctggacaaactgacagtcacctcccagaacctgcagctggagaacctgcgcatgaagcttcccaagcctcccaagcctgtgagcaagatgcgcatggccaccccgctgctgatgcaggcgctgcccatgggagccctgccccaggggcccatgcagaatgccaccaagtatggcaacatgacagaggaccatgtgatgcacctgctccagaatgctgaccccctgaaggtgtacccgccactgaaggggagcttcccggagaacctgagacaccttaagaacaccatggagaccatagactggaaggtctttgagagctggatgcaccattggctcctgtttgaaatgagcaggcactccttggagcaaaagcccactgacgctccaccgaaagtactgaccaagtgccaggaagaggtcagccacatccctgctgtccacccgggttcattcaggcccaagtgcgacgagaacggcaactatctgccactccagtgctatgggagcatcggctactgctggtgtgtcttccccaacggcacggaggtccccaacaccagaagccgcgggcaccataactgcagtgagtcactggaactggaggacccgtcttctgggctgggtgtgaccaagcaggatctgggcccagtccccatgtgagagcagcagaggcggtcttcaacatcctgccagccccacacagctacagctttcttgctcccttcagcccccagcccctcccccatctcccaccctgtacctcatcccatgagaccctggtgcctggctctttcgtcacccttggacaagacaaaccaagtcggaacagcagataacaatgcagcaaggccctgctgcccaatctccatctgtcaacaggggcgtgaggtcccaggaagtggccaaaagctagacagatccccgttcctgacatcacagcagcctccaacacaaggctccaagacctaggctcatggacgagatgggaaggcacagggagaagggataaccctacacccagaccccaggctggacatgctgactgtcctctcccctccagcctttggccttggcttttctagcctatttacctgcaggctgagccactctcttccctttccccagcatcactccccaaggaagagccaatgttttccacccataatcctttctgccgacccctagttccctctgctcagccaagcttgttatcagctttcagggccatggttcacattagaataaaaggtagtaattagaaaaaaaaaaaaaaaaaa

SEQ ID NO: 947 - DNA, 936 bp, Homo Sapiens
  NM_001025200
agacaggcgtcctacacccctgccagcggcaccatggctttcctctggctcctctcctgctgggccctcctgggtaccaccttcggctgcggggtccccgccatccaccctgtgctcagcggcctgtccaggatcgtgaatggggaggacgccgtccccggctcctggccctggcaggtgtccctgcaggacaaaaccggcttccacttctgcgggggctccctcatcagcgaggactgggtggtcaccgctgcccactgcggggtcaggacctccgacgtggtcgtggctggggagtttgaccagggctctgacgaggagaacatccaggtcctgaagatcgccaaggtcttcaagaaccccaagttcagcattctgaccgtgaacaatgacatcaccctgctgaagctggccacacctgcccgcttctcccagacagtgtccgccgtgtgcctgcccagcgccgacgacgacttccccgcggggacactgtgtgccaccacaggctggggcaagaccaagtacaacgccaacaagacccctgacaagctgcagcaggcagccctgcccctcctgtccaatgccgaatgcaagaagtcctggggcaggaggatcaccgacgtgatgatctgtgccggggccagtggcgtctcctcctgcatgggtgactctggaggccccctggtctgccagaaggacggagcctggaccctggtgggcattgtgtcctggggcagccgcacctgctctaccaccacgcccgctgtgtacgcccgtgtcgccaagctcataccctgggtgcagaagatcctggccgccaactgagcccgcagctcctgccacccctgccttaagatttcccattaaatgcatctgtttagaagccctgaaaaaaaaaaaaaaaaaaaaaaaaaaaaaaaaaaaaaaaaaaaaaaa

SEQ ID NO: 948 - DNA, 2509 bp, Homo Sapiens
  NM_001025201
gggaacgcactcgaccgggaagcccgagggagaggcgggaggcagcggcgcggccgagctcgtgggagacgctatcgcaagatggcgtctgcgaggccgcgggatgcggagtgagcgcgccccgccgggggctgtgcgaggctgctgctgctctccccgtcgccgccgccgccgccgccagtgcggcgccgcctctccgccagccactgcgccgcggccaagcctcctgcctcgcagcggtcccccgcgtcccggcctgcagcctccccgggcgccggcgcccccagcacgccccatcgggcaccccactctctccgaggtgtgggtgcggcgggctgatgaggtgatccctagcccgcctgggaggagcgcctggactcgcgggcggcggcgagcgcctttacaatggccctgaccctgtttgatacagatgaatatagacctcctgtttggaaatcttacttatatcagctacaacaggaagcccctcatcctcgaagaattacctgtacttgcgaggtggaaaacagaccaaagtattatggaagagagtttcatggcatgatctccagagaagcagccgaccagctcttgattgtggctgaggggagctacctcatccgggagagccagcggcagccagggacctacactttggctttaagatttggaagtcaaaccagaaacttcaggctctactacgatggcaagcactttgttggggagaaacgctttgagtccatccacgatctggtgactgatggcttgattactctctatattgaaaccaaggcagcagaatacattgccaagatgacgataaacccaatttatgagcacgtaggatacacaaccttaaacagagagccagcatacaaaaaacatatgccagtcctgaaagagacacatgatgagagagattctacaggccaggatggggtgtcagagaaaagggtgcatacattcagagggccacactggtgtgaatactgtgccaactttatgtggggtctcattgctcagggagtgaaatgtgcagattgtggtttgaatgttcataagcagtgttccaagatggtcccaaatgactgtaagccagacttgaagcatgtcaaaaaggtgtacagctgtgaccttacgacgctcgtgaaagcacataccactaagcggccaatggtggtagacatgtgcatcagggagattgagtctagaggtcttaattctgaaggactataccgagtatcaggatttagtgacctaattgaagatgtcaagatggctttcgacagagatggtgagaaggcagatatttctgtgaacatgtatgaagatatcaacattatcactggtgcacttaaactgtacttcagggatttgccaattccactcattacatatgatgcctaccctaagtttatagaatctgccaaaattatggatccggatgagcaattggaaacccttcatgaagcactgaaactactgccacctgctcactgcgaaaccctccggtacctcatggcacatctaaagagagtgaccctccacgaaaaggagaatcttatgaatgcagagaaccttggaatcgtctttggacccacccttatgagatctccagaactagacgccatggctgcattgaatgatatacggtatcagagactggtggtggagctgcttatcaaaaacgaagacattttattttaaatttttaatttgaggggaaaagaaatgttttacagatgaaggaatgttttatagtaatttaatttgctcctgtagctgcattatttcttgattagaggtttgggcatataaccagattaaagtgaaggaactttctgttgtttttgtagcaccgctcagctgtcttgtaaaacagtgaacacacgctttctggttctagtaatcctgggtgtttatcacgttcagagaaactcaagctattgcatgattagccccctatctggcaaggaaaccccatacagaagaaacaacaaacctgcgcctgcaccgcctctgcgtcctgggtagtctgtgcttgtaatccagcatgtttcacagagtaagcctgttgtgactttgcttttggggtctatgtcattggtttctgatgcttgtacaaacacgcacacacaaatggataaaacagcacctctggctgttacattaccataaaccatatcacatgcctacattttacaaatgatttctggtttctcttagttcttctctaacatagtactttctttccagcaaaagcaaaatgtgttttcagatttgttactttaataaaggttatccataccaataaaaagtgtacaacacagcattttctgttaaattattattggttttcagttgtaatttggtattttttctggcatgcgtttattaatttattaaattggcttttagaaataaaaaatattgatagcttacttttttctcataagaatattcgggaaaatgtgtttggccatttattaaatactgagtacttcttctg

SEQ ID NO: 949 - DNA, 1140 bp, Homo Sapiens
  NM_001025202
gcacaccggactgcgttttttttccgaacgcccgcagcagggtcagaagggaggtggtcgccctccgtcgtggtctggcgtgtattccgagcgttggtgtctggcggtttccgagcgttggtgtctggcggtttccgaccgttggtgtctggcggtttccgaccgttggtgtctggcacgcgccaccctctcttgctttggttgcgccatgccgatgtaccagacaagaagacaagaaaatgatttgaggacagcttcaatcgcggtgtgaagaagaaagcagcaaaacgaccactgaaaacaacgccggtggcaaaatatccaaagaaagggtcccaagcggtacatcgtcatagccggaaacagtcagagccaccagccaatgatattttcaatgctgcgaaagctgccaaaagtgacatgcagggatgtccttcctgagatccgtgctatctgcattgaggaaattgggtgttggatgcaaagctacagcacgtctttcctcaccgacagctatttaaaatatattggttggactctgcatgataagcaccgagaagtccgcgtgaagtgcgtgaaggctctgaaagggctgtacggtaaccgggacctgaccgcacgcctggagctcttcactggccgcttcaaggactggatggtttccatgatcgtggacagagagtacagtgtggcagtggaggccgtcagattactgatacttatccttaagaacatggaaggggtgctgatggacgtggactgtgagagcgtctaccccattgtgtaggcctctaattgaggcctggcctctgctgtgggtgaatttctgtactggaaacttttctaccctgagtgcgagataagaacgatgggtggaagagagcaacgccagagcccaggcgcccagaggactttcttccagcttctgctgtccttctttgtggagagcaaggtgacatacacagagagaactctggctgttgtgcataggacctacaagtgggctggggttggtggctcacgcctgtaagcccagcactttgggaggctgaggtgggaggatcctttgagcccaggagtttgagaccagcttgggcaacatagtgagaccctgtctctaccaaaaaaaaaaaaaaaaaa

SEQ ID NO: 950 - DNA, 1442 bp, Homo Sapiens
  NM_001025235
cgtgcggccagggtcccgtggccggaggtgtccgaccgggagcggctggagccggacgcgagcggggcgcgcgagttcgagcccagagccgacacgcagcaacaaagcttggggcttccttggtcgcacccaccacctgcctgcccactggtcagccttcagggaccctgagcaccgcctggtctctttcctgtggccagcccagaactgaagcgctgcggcatggcgcgcgcctgcctccaggccgtcaagtacctcatgttcgccttcaacctgctcttctggctgggaggctgtggcgtgctgggtgtcggcatctggctggccgccacacaggggagcttcgccacgctgtcctcttccttcccgtccctgtcggctgccaacttgctcatcatcaccggcgcctttgtcatggccatcggcttcgtgggctgcctgggtgccatcaaggagaacaagtgcctcctgctcactttcttcctgctgctgctgctggtgttcctgctggaggccaccatcgccatcctcttcttcgcctacacggacaagattgacaggtatgcccagcaagacctgaagaaaggcttgcacctgtacggcacgcagggcaacgtgggcctcaccaacgcctggagcatcatccagaccgacttccgctgctgtggcgtctccaactacactgactggttcgaggtgtacaacgccacgcgggtacctgactcctgctgcttggagttcagtgagagctgtgggctgcacgcccccggcacctggtggaaggcgccgtgctacgagacggtgaaggtgtggcttcaggagaacctgctggctgtgggcatctttgggctgtgcacggcgctggtgcagatcctgggcctgaccttcgccatgaccatgtactgccaagtggtcaaggcagacacctactgcgcgtaggccgcccaccgcccgcttctctgccaaaaggacgcccacggggagatggccgcacccacagctgcctttcccaccaccagcctcggtgctctgccccatgctgggaggagggagggagggacaggtgcctggagcccccggaaccctgtttctggaaggccctagctcaggtggcttcagggcctccggaccccccctgggaggggtggccacgtgctggctgcggaacccagggcaggggtgggaggggcctccagcactttttatatttacgtattctccaaagcagtgttcacacgggagccagcctgtggcccccagcctcctggaaaacaggttggcgctggaggagccgggtcttggcatcctggaggtggccccactggtcctggtgctccaggcggggccgtggacccctcacctacattccatagtgggcccgtggggctcctggtgcatcttaataaagtgtgagcagcaaccttgaaaaaaaaaaaaaaaaa

SEQ ID NO: 951 - DNA, 1329 bp, Homo Sapiens
  NM_001025238
aaagctgcggcggcggttcgcgtttctcgtgtccgcttgactgacagctgcgcggcgggagcgggcggcgcgagcgggaggcggcggcgcagaactgaagcgctgcggcatggcgcgcgcctgcctccaggccgtcaagtacctcatgttcgccttcaacctgctcttctggctgggaggctgtggcgtgctgggtgtcggcatctggctggccgccacacaggggagcttcgccacgctgtcctcttccttcccgtccctgtcggctgccaacttgctcatcatcaccggcgcctttgtcatggccatcggcttcgtgggctgcctgggtgccatcaaggagaacaagtgcctcctgctcactttcttcctgctgctgctgctggtgttcctgctggaggccaccatcgccatcctcttcttcgcctacacggacaagattgacaggtatgcccagcaagacctgaagaaaggcttgcacctgtacggcacgcagggcaacgtgggcctcaccaacgcctggagcatcatccagaccgacttccgctgctgtggcgtctccaactacactgactggttcgaggtgtacaacgccacgcgggtacctgactcctgctgcttggagttcagtgagagctgtgggctgcacgcccccggcacctggtggaaggcgccgtgctacgagacggtgaaggtgtggcttcaggagaacctgctggctgtgggcatctttgggctgtgcacggcgctggtgcagatcctgggcctgaccttcgccatgaccatgtactgccaagtggtcaaggcagacacctactgcgcgtaggccgcccaccgcccgcttctctgccaaaaggacgcccacggggagatggccgcacccacagctgcctttcccaccaccagcctcggtgctctgccccatgctgggaggagggagggagggacaggtgcctggagcccccggaaccctgtttctggaaggccctagctcaggtggcttcagggcctccggaccccccctgggaggggtggccacgtgctggctgcggaacccagggcaggggtgggaggggcctccagcactttttatatttacgtattctccaaagcagtgttcacacgggagccagcctgtggcccccagcctcctggaaaacaggttggcgctggaggagccgggtcttggcatcctggaggtggccccactggtcctggtgctccaggcggggccgtggacccctcacctacattccatagtgggcccgtggggctcctggtgcatcttaataaagtgtgagcagcaaccttgaaaaaaaaaaaaaaaaa

SEQ ID NO: 952 - DNA, 3352 bp, Homo Sapiens
  NM_001025243
cgcggacccggccggcccaggcccgcgcccgccgcggccctgagaggccccggcaggtcccggcccggcggcggcagccatggccggggggccgggcccgggggagcccgcagcccccggcgcccagcacttcttgtacgaggtgccgccctgggtcatgtgccgcttctacaaagtgatggacgccctggagcccgccgactggtgccagttcgccgccctgatcgtgcgcgaccagaccgagctgcggctgtgcgagcgctccgggcagcgcacggccagcgtcctgtggccctggatcaaccgcaacgcccgtgtggccgacctcgtgcacatcctcacgcacctgcagctgctccgtgcgcgggacatcatcacagcctggcaccctcccgccccgcttccgtccccaggcaccactgccccgaggcccagcagcatccctgcacccgccgaggccgaggcctggagcccccggaagttgccatcctcagcctccaccttcctctccccagcttttccaggctcccagacccattcagggcctgagctcggcctggtcccaagccctgcttccctgtggcctccaccgccatctccagccccttcttctaccaagccaggcccagagagctcagtgtccctcctgcagggagcccgcccctttccgttttgctggcccctctgtgagatttcccggggcacccacaacttctcggaggagctcaagatcggggagggtggctttgggtgcgtgtaccgggcggtgatgaggaacacggtgtatgctgtgaagaggctgaaggagaacgctgacctggagtggactgcagtgaagcagagcttcctgaccgaggtggagcagctgtccaggtttcgtcacccaaacattgtggactttgctggctactgtgctcagaacggcttctactgcctggtgtacggcttcctgcccaacggctccctggaggaccgtctccactgccagacccaggcctgcccacctctctcctggcctcagcgactggacatccttctgggtacagcccgggcaattcagtttctacatcaggacagccccagcctcatccatggagacatcaagagttccaacgtccttctggatgagaggctgacacccaagctgggagactttggcctggcccggttcagccgctttgccgggtccagccccagccagagcagcatggtggcccggacacagacagtgcggggcaccctggcctacctgcccgaggagtacatcaagacgggaaggctggctgtggacacggacaccttcagctttggggtggtagtgctagagaccttggctggtcagagggctgtgaagacgcacggtgccaggaccaagtatctggtgtacgagaggctagagaagctgcaggcagtggtggcgggggtgcccgggcattcggaggccgccagctgcatccccccttccccgcaggagaactcctacgtgtccagcactggcagagcccacagtggggctgctccatggcagcccctggcagcgccatcaggagccagtgcccaggcagcagagcagctgcagagaggccccaaccagcccgtggagagtgacgagagcctaggcggcctctctgctgccctgcgctcctggcacttgactccaagctgccctctggacccagcacccctcagggaggccggctgtcctcagggggacacggcaggagaatcgagctgggggagtggcccaggatcccggcccacagccgtggaaggactggcccttggcagctctgcatcatcgtcgtcagagccaccgcagattatcatcaaccctgcccgacagaagatggtccagaagctggccctgtacgaggatggggccctggacagcctgcagctgctgtcgtccagctccctcccaggcttgggcctggaacaggacaggcaggggcccgaagaaagtgatgaatttcagagctgatgtgttcacctgggcagatcccccaaatccggaagtcaaagttctcatggtcagaagttctcatggtgcacgagtcctcagcactctgccggcagtgggggtgggggcccatgcccgcgggggagagaaggaggtggccctgctgttctaggctctgtgggcataggcaggcagagtggaaccctgcctccatgccagcatctgggggcaaggaaggctggcatcatccagtgaggaggctggcgcatgttgggaggctgctggctgcacagacccgtgaggggaggagaggggctgctgtgcaggggtgtggagtagggagctggctcccctgagagccatgcagggcgtctgcagcccaggcctctggcagcagctctttgcccatctctttggacagtggccaccctgcacaatggggccgacgaggcctagggccctcctacctgcttacaatttggaaaagtgtggccgggtgcggtggctcacgcctgtaatcccagcactttgggaggccaaggcaggaggatcgctggagcccagtaggtcaagaccagccagggcaacatgatgagaccctgtctctgccaaaaaattttttaaactattagcctggcgtggtagcgcacgcctgtggtcccagctgctggggaggctgaagtaggaggatcatttatgcttgggaggtcgaggctgcagtgagtcatgattgtatgactgcactccagcctgggtgacagagcaagaccctgtttcaaaaagaaaaaccctgggaaaagtgaagtatggctgtaagtctcatggttcagtcctagcaagaagcgagaattctgagatcctccagaaagtcgagcagcacccacctccaacctcgggccagtgtcttcaggctttactggggacctgcgagctggcctaatgtggtggcctgcaagccaggccatccctgggcgccacagacgagctccgagccaggtcaggcttcggaggccacaagctcagcctcaggcccaggcactgattgtggcagaggggccactacccaaggtctagctaggcccaagacctagttacccagacagtgagaagcccctggaaggcagaaaagttgggagcatggcagacagggaagggaaacattttcagggaaaagacatgtatcacatgtcttcagaagcaagtcaggtttcatgtaaccgagtgtcctcttgcgtgtccaaaagtagcccagggctgtagcacaggcttcacagtgattttgtgttcagccgtgagtcacactacatgcccccgtgaagctgggcattggtgacgtccaggttgtccttgagtaataaaaacgtatgttgcaataaaaaaaaaaaaaaaaaa

SEQ ID NO: 953 - DNA, 2146 bp, Homo Sapiens
  NM_001025248
gtcatgttcccaggacgggcgcgtcttcagggtggaagcctggcgcacgtccggaggtgccgaggacccaaccagcccaaactctgggggaaatgactcccctctgccctcgccccgcgctctgctaccatttccttacgtctctgcttcgctcagcgatgcaaaacgcgcgaggcgcacggcagagggccgaagccgcggtactctccgggccaggcccgcccctcggccgcgccgcgcagcacgggattccccggccgctgtccagcgctggccgcctgagccaaggctgccgcggagccagtacagtcggggccgctggctggaagggcgagcttcctaaggcggggggaagcccggcgccggggccggagacacccgccatttcacccagtaagcgggcccggcctgcggaggtgggcggcatgcagctccgctttgcccggctctccgagcacgccacggcccccacccggggctccgcgcgcgccgcgggctacgacctgtacagtgcctatgattacacaataccacctatggagaaagctgttgtgaaaacggacattcagatagcgctcccttctgggtgttatggaagagtggctccacggtcaggcttggctgcaaaacactttattgatgtaggagctggtgtcatagatgaagattatagaggaaatgttggtgttgtactgtttaattttggcaaagaaaagtttgaagtcaaaaaaggtgatcgaattgcacagctcatttgcgaacggattttttatccagaaatagaagaagttcaagccttggatgacaccgaaaggggttcaggaggttttggttccactggaaagaattaaaatttatgccaagaacagaaaacaagaagtcatacctttttcttaaaaaaaaaaaaaaagtttttgcttcaagtgttttggtgttttgcacttctgtaaacttactagctttaccttctaaaagtactgcattttttacttttttttatgatcaaggaaaagatcattaaaaaaaaacacaaagaagtttttctttgtgtttggatcaaaaagaaactttgtttttccgcaattgaaggttgtatgtaaatctgctttgtggtgacctgatgtaaacagtgtcttcttaaaatcaaatgtaaatcaattacagattaaaaaaaaaagcctgtatttaactcatatgatctcccttcagcaacttattttgctttaattgctttaaatcttaagcaatattttttattcagtaaacaaattctttcacaaggtacaaaatcttgcataagctgaactaaaataaaaatgaaaaggagagattaaaggtattccttgttcttcccttctcttcactagtctaaaaacttctttttaatcttaagattctttgtgatgagggtgagaaaaagaatcctcagtttatttttccactattaatctttcttttgataaatcctctattgactgggtagaggtatgtttgtgaaagacatgtaacttggggatttgttactttaggtttgttcccttgaatttcatctcatcaggcaaattgtactagttgtagttacgagttttccctcagtgaagtagcaataggctgtaatcaagaaaatatgccatttatagagataagataaatgaaataatacttcagccaccaggtttttctgtctcacatacataagcagcatttcattgcagatatgggactgattctgtggcttaccttgattaacatcttttggaagttttgctagtgtgctttcctttctttactatgtttctcagattcctttgtatcagggttttgggtgtcacttaggttttgtccatcagattctgtgagacaccaggcatcgttttgaggatgtgggttatacacatggagtgcttctggaactatcagcccacttgaccacccagtttgtggaagcacaggcaagagtgttcttttctggtgattctccaggccatttaataccctgcaatgtaattgtccctctgtggctcacatttcattagtgagccatgaaatcaactcagtgggacatagccagcatttttgcataccaggttgggctataaaatatttctgttgtcaataaattttaaatgttttcctgctaaactaa

SEQ ID NO: 954 - DNA, 2138 bp, Homo Sapiens
  NM_001025300
gctgccgctactgcggagtagctgcttcccttcctcctctcccggcggcggcggcggcagcggcggaggaggaggaggaggggacccgggcgcagagagccggccggcggcgcagttgcagcgcggagcccacgggccgccggggccgctccagcgggcggaagccgagcccggggccgaccccccgcgcgcggcggaggccgagggggcgccggggcccggggcgcgcagccggggggcgggcggcggcgggcggcgggccgagcgggagccgcatgcgtgtatggatccgggcgccgcgctgcagaggcgggccgggggcggcggcggtctgggcgcgggctccccggcgctgtcgggcggccagggccgccggaggaagcagccccccaggccggccgacttcaagttgcaggtcatcattatcggctcccgcggcgtgggcaagaccagcctgatggagcgcttcaccgacgacaccttctgcgaggcctgcaagtccaccgtgggtgttgacttcaaaatcaaaactgtagagctaagaggaaagaaaattagattacagatctgggacacagcaggtcaggagagattcaacagcattacctcagcttattacagaagtgccaaggggatcatattagtatatgatatcactaagaaggagacatttgatgatttgccgaaatggatgaagatgattgataagtatgcttcagaagatgcagagcttctcttagttggaaataagttggactgtgaaacggacagagaaatcaccaggcagcagggggaaaagtttgcacagcagatcactgggatgcggttctgtgaagcaagtgccaaggataacttcaatgtggacgagatatttttgaaacttgtcgatgacattctgaaaaagatgcctctggatattttaaggaatgagttgtccaatagtatcctgtcgttacaaccagagcctgagataccgccagaactgcctccaccaagaccacatgtccgatgctgttgatttcctactttggagacaaagtggaaatgattcctggaaaggggaaaaaacgttctattctgcactacaatcattttgacaatttcctttcgcactttgtaatccaagtcagagctatacactaacttgtaaatatgcatatatgcaatcctgggtaagttttggttataagttacctatttccctccaaattattatatttcattcattaccccagtgtctagtgtacatacactgggaaacctagtacttctaatatgaagaatgggagaaatgaaaggtataatgtttcttgaaataaataatataattgtccttattaattatattatgaggacagaagatattctgataagagagaacgtggtgctttgcttaccgttttaaagaaaatttgtaaaactaaagactttttgaaaaaaagctatcttaagtgctttttctttatttacaagacatttcccccagtggtagcatctgaagtattggagtgtttctgccacgaagcaaagctccattcatggccgtcatggaaggttatttattaatgttacataatggtagaatattactagttagagggttggatttgacttggtcctaaggccacagaatctctctcatggcttcctaagggatgtacctttatgcttttaagaactacaaagattcaataaagaaagaaatgtttttgaaactatagaaaaagattttaaaacacgctgctgtcctaaacaaatcctgtttaaaggaattttaaagagatgcattttactatatcaaagaacatacgtgtatttgcctaaacactctgtacctttgtaatgataaaacttcccccttctttacggtgaagcttattctgattaagcctagactgtgttctttttttttttttttttttttttttttttttttttttttttttttggtctgatgatgaatttgtgaactctatctttggtatatcttttattaaactgcactgttttgtttagtcaaggtaattaagtaattatgtatttgaataacttggtgtgtcttgagtgttgtggtatgaaaagcattgtggtctttctacactaatgaagtgcaaataaaattttgtatttatgaatga

SEQ ID NO: 955 - DNA, 1914 bp, Homo Sapiens
  NM_001025493
cttcggccttctatacctactgggcgggctcggatcccgtttccctggccccccacatctgtgattccctgctgaggcctctttaggctcagcagagacgttggaactgggctttccttgtggccccctttcctcgctccctgccctgggctgacgtcagttttatcttccttctccattcccttttgcctccttccccactcgctctcctcttaagatgtccaaattcttccttctcagccactttcaacccagagaaagcccgagtcccaaagcaacaggaagatgtgcgggggaccgcgagtgtggggacatcctgccgcctcgggcaactctgtcgtcccccacagggttcaggtgctcagaaaacagcagccactgagttcactgtttccgcaggccccgtattcccggccgtgctcagctgggcttgtggagtcgcgagcgggggcgctcctgcggcaccgcccctcctgggcagcccggcttccaggagagactcggcctcagtctccgaatggcaggggtctgggagaggatgtgatggcaaaggcctgcccctctcaggccgcctctagcaagttctctaccttgagagaagcgagtaggaggaggaaggaggccaggctgagccatctctgaggaatgtggctttggcaggacatccagtgctgccccgctcctccctcagtcccgcccagggccctggagccgggccgggctcctcctcctccaggggaagggctcggggcaggaatcccttccctttccccaccccagaagaagccccagagcgtagggatatgcgtacggcagaaagggagacagaaggcagggctagagaaagggaacaggagaaaagagcttcgacaagccaactgcccttcgctcaggccccagcggaaaggcgcagatacccggagacttcccagagagactcgacccaccaaaaagcgcaccgcggccgcgcagcccttccttcagctctggaacccagcgccccacacctcaaatgggagaactggtgacctctagtggcccatgaccagcctgcagggcctggggctggcggggattctctgacccaaactctcctgggctctaatgctgttcccctgcccaccctaccttctgccttcacactgctgaggggtccatagccgacaaggaagagctcatttctcatttgtcatgaccatctttaataaaaaataaattagttctgggtgggaaccatttcaggaggcagggagtggggctaggggctgggcggggtggtgggggagcggatgctcacatttctctttttcaccctctgcccagctgggccttgctctggagaggcagtctctttcctcctgccttcctgagtaaggcaggattggcagtggctgaccccagccctagctaattagggaggcaggggcagagatactaggcaaatgagaaggggtcagagacacagggcggcttagaagatgtgaggtctgaacatgagaaatgaggcttagggcacaaaactggagttggtggggagaccacactctaagtagctcagattagcaaggaactgcagacttgctttcctttccacctaggaaagtctcaaggaaacaggtcttgtccttctcagtctgtgtaacctctttttgaaaagtgatacacgtttgagcacacacatatccatgcagtcccaaaagcacacctgaggcatatgtgcacacacccatcacaccaccacatgggcctgaccacagccctgaaagtcactttgtgtcagtcaccttgccaccctctgtcacctggaggacatccctgctgagactgggacaggctggagagccagggggttcagagtgggccgatcaatgggtgaccgatggtggcacagaaaaccgtgaaggtgccccggac

SEQ ID NO: 956 - DNA, 5320 bp, Homo Sapiens
  NM_001025580
tgagccgcagcgtgctcgcccccgccgccagctcgcctcacttatgggtcggaaacgctgcgtgggggagactgttccaagatggcggcgggttgctgcggggtgaagaagcagaaactgtccagttcgcccccctctggctcgggtggcggtggtggcgcctcctcctcctcccactgcagcggagagagccagtgccgagctggggagctgggactaggaggcgccggtacgcggctcaacgggctgggaggtctaaccggaggaggtagcggcagcggctgtaccctctctcccccccagggctgcggcggcggcggcggggggatcgccctgtcgccacctccgagctgcggagtggggaccctactttctaccccggccgccgccacctcttcctcaccctcctcatcgtccgccgcctcgtcctcatcgccgggctcccggaagatggtggtgtcagcagagatgtgctgcttttgcttcgatgtgctctactgtcacctgtatggataccagcagccccggaccccccgattcaccaacgagccctatgcccttaaagatagccgttttcccccaatgacaagggatgagctgccacggcttttctgctcagtgtctctgctcactaactttgaagatgtctgtgattatttggactgggaggtgggtgtacatggcattagaatagaattcatcaatgaaaaaggatcaaaacgcaccgccacctacctaccggaggttgcaaaggagcaaggatgggaccatatacagaccatagactccttattgaggaaaggaggatacaaagctccgattactaatgaattcaggaaaaccataaaactgaccaggtatcgtagtgaaaagatgaccctgagctatgctgaataccttgctcatcgccagcatcatcatttccaaaatggcattgggcatccccttccgccatacaaccattattcctgacactgagccgcacaaccagtcactgggcctctctgcagacctcttcccaggagaccctacaccttcttggtctagctatctcttttactgtaccattttatgatgatagtttccgttgccatggtgaagcttcgacatcgtcaactaagatcatcatggtaacgggtagaaaaatggcatttgttaagatcctgttttattattttagatcgttgattttttttttgcagcatatataattttgggtttttttttccttataatattatgtagaattttgctttgctgtctcagtcaggtttctgtttttctgtcctccttgcctttcttcccgttttgcttcctgttttccttcttccttcccgttttccttcttccttccctgcctcccttcctttgactgtggatggaagaaagtgtgcagtttttagggattttacttaggttcgtctttagttttcctcagtaagatagttgttttttgatacctgagtttgggattaattcatatcaaattcaggtatttgtatattactcttgatttttgtctgaaattcactttgctatgacagcctagtagttgggtcttcactccttaagtatatgtttttcccatggtgaaaatacatgaactttagttctagtagtgagcattcaaaggtccgtgatagggcttgtcacagagagagagaaatcatttatccctattgtgctggttatcatagaagagactgcctcaccactttatagaaccaatttgcaaactaaaacactgtttggagaaggtacaaactacctttcaaaaaggctacaggaaacattttatgagcagcaaatattaggaagagagcagatacagaatttagtgcctttgagaagaatataattaagtggaattaagaggggttagaaaaaaggcaatttagaaaaatattcttgtaaaactttattgtttctatatgtgaaacagaagattagacaaattccttactcttaagtatttttttaagctgaaaaaaaattattttgagcaaataaccaataagagacatttgtctattttatattaatttaaatttgttagctctaggtttcaataagtcatgattggctagaatccattttagctaccatctaaagatatggtaaagataatttagtaaaacaaaagttcatatttgccatgatttcagatatgtttgtcatggggacaatattagagttttagagatactataaaatagcttgaatttctttctgcactacatacttttgatagaaacacatttactacattgataagatgttatgtcacacctgtgaaaatggagttggcattcagatatgctatagttagagcccagctcatctgcaagtatagtcttcccatgatgcatacaaagataacttactgatgtcgataggaggtccatacatatatccccaggaaaaatgacagattattctggaggaagatgaccttcattttatggttatgtgtgtgtgtctgtgtgtctttggaaaaatatatataattttttcaaataggaagccaacatatcaagtgatgaattaaagtatgctgcagaatatatattctaaaactacaaaaaagtcactgaatatcaaaatgatacagcttatacatatagttactgtgacaagtgacagactgctagttcagaattcaaaaatcctttcctagtttgtgagataatgggctaaattccttctgcctgccactggggcaaagcaaattgctttagtttttgatgagagttcttagaagtttgttggtattccttcatccacagcatccattgttgaaataaccattttcagttgtgatgccttaactaagaagccaattgttagcctgaaatgcaatcttggtagccagtttcaatgaagctagagattagtcagaaaaagttagctgttgggctttagaaagggattttgagtcctgtcatttctacttgggagcattttggagcagattagtctttcagtataaaaacaagtggctacctgatggaaacttttcttacccttatagggaaactgagcacaagctgaatgatattgtctgctgcaaaaaaaaacaaacaaaaaaaaaacaaaacaaaaaacaaaaaaaaggaaaaaaaggtaaataaaacaagcaaactgaagagagacaaaatagaccaatattatcgtgaaatccatcttatccatcatctcatcggttcaacaggctcctcgtcctgggtgagcttatggttagaagtttttttagcaaagatttattacatacatagatgtgtgtgtgtacatatacttacacatacatacatacatatatgtgtgtttatttaacggtgctaatcaatcttgagcaggtcacgtgactggtcatgcggactctaaaatcatatcagattttttaaaatccttgatatatgcagatgttatacagattttcttagcagtgtaataacgttaaactgaagaaataaccatcctgcaggcttcaaaggacgaggtcagcaatatttcccaacatggcttgggggaaaaggatagttttgtctccttttgtattcaagtaatgcaaagtgcatttttgtctctaagtagcttttgactaaaagactttgtagtgtaaagggtgttatacaaactgtaatggtgtgcttcaaacaaatgctagaccctttcacctttgtcgtatatacaaagctgttaattatgtggtatgaattaactttgaacatgttgaaatatgtagcatgtctttaactcagacgaagattctgattgcacaggttgtgttctagccagttgtgatttatttgttcagaaacacaaatgtgaattgcactcttatcatcagaatattgtatgagttcagtgatctttaaacagctcagaagtaatacttgaacttcatttgagtagcacaaagtttacatagccccttttaaatgttaattcgttccatttaagttttccattttcagatgcaactgggtatttttcctcttggaaatagtacgtactttgctttggtatgtagcaaaaggcttccatttctggaagggttttcttgttcttaaacaaggtcagccaggtaccagattctaaaagaacaaattgtcccccacccctcaagtggccttctgactgcacgagaatgtgctactaccctctgtagtctcccctaacacgagaggtcagtgaaattgatggaggaagtgcaaggcttgcttcccctcacccttaaagcttaaagcagttgtaagattttcagtccagcacatacagtcccagtgcccagcacaccggaagtttgtatactggcctcttatcttgtcttcaaatgtgcaggaaatttgaaactgtcatctggaataggttccatctcttatgtgtgttagatcaaaccaaagaagcccccagccatgcccaaatgctgcttcaaaagcctgccttccagtccttacaaaaaccttgcaggattaaatgtgttaacttttttatttttgtacagtttctaagtgatttttgctagtgatgttaaaatgaattaagtttatttgaggggtgtgagcacctcctccatttaaataaactggtgactttccttttattttttaaaagtggaaacccgttgtgtgcctctcgatttaagggtttctgatgacattattcttaagaccagcattgatcctttatatacaaatatatgttttccttgttttttattgctatttcagaagaaaatgaaccttttattttgctctacccagtaactgcgctggtacatagacgcactgagcaaacaaacttttgtaaccacctctgactacttttgtatatcaaagttgattacttttgaaatatttggatctagtttctaagttattttagtgttttatatgttccccaaaattactttgaatctgtcaccagcataatgagttcttggtgatacaatggtgagacttgtaatgagcaaaaagctacctggagtagctcctcttttccttctttcttagtaacctgttttttgattaccgtaagacatcacagattacctgaaaccccttccagtataactaggccctccttccttccacatttaattgcttaatagtttgaagaaactattggaaatgggcattttatatgacatgtatggctttacaatattaaatatgagcaaaaagaaaaaatatgagaaggtttatgtgggtctgtaaggtatggctgtggaaagatattgtagtagttttgacactattgttattacctttaaaatcatttacccaataaaatgttaaaaccgaaaaaaaaaaaaaaa

SEQ ID NO: 957 - DNA, 4425 bp, Homo Sapiens
  NM_001025598
gcaaagatgctctaacaggaagtgggttaaggagctgcactgcttcctgccccctaaagctgagcggggcgaggagggcgagtgccaggctgggccacgagacacaggacacaatttcttgccagggtcctggtagcttcctcttcaacagccacttccgtgtggccggggccccaggggcaggagctgctgcccgttgcccaggccaccctccacccccaattgggagccctgcccccctggggccgggccaagcccagcagctggctgggatcccatgggggactggtagggcacaggtcttgggggatagaggtgaccgggccagtgccctggggctctggccatgaagtctcggcagaaaggaaagaagaagggcagcgcaaaggagcgggtttttgggtgcgacttgcaggagcacctgcagcactcaggccaggaggtgccccaggtgctaaagagctgtgcagaatttgtggaggagtatggagtggtggatgggatctaccgcctctcaggggtctcctccaacatccagaagcttcggcaggaatttgagtcagagcggaagccagacctgcgtcgggatgtttacctccaagacattcactgcgtctcctccctgtgcaaggcctatttcagagaactgccggatcccctgctcacttaccggctctatgacaagtttgctgaggctgtaggagtgcaattggaacctgagcgcttggtcaagatcctagaggtgcttcgggaactccctgtcccaaactacaggaccctggagttcctcatgaggcacttggtacacatggcctcattcagtgcccagaccaacatgcatgctcgcaacctggccatcgtgtgggctcccaacctgctgaggtctaaggacatagaggcctcaggcttcaatgggacagcggccttcatggaggtgcgggtacaatccatcgtcgtggagttcatcctcacacacgtggaccagctctttgggggtgctgccctctctggtggtgaggtggagagtgggtggcgatcgcttccagggacccgggcatcaggcagccccgaggaccttatgcccaggccactgccttatcacctgcctagcatactgcaggctggcgatggacccccacagatgcggccctaccatactatcatcgagattgcagagcacaagaggaaggggtctttgaaggtcaggaagtggaggtctatcttcaatttaggtcgctctggccatgagactaagcgtaaacttccacggggggctgaggacagggaggataaatccaacaaggggacactgcggccagccaaaagcatggactcactgagtgctgcagctggggccagtgatgagccagaggggctggtggggcccagcagcccccggccaagcccattgctgcctgagagcttggagaacgattctatagaggcagcagagggtgaacaggagcctgaggcagaagcactgggtggcacaaactctgaaccaggcacaccacgagctgggcggtcagccatccgggctgggggcagcagccgtgcagaacgctgtgctggtgtccacatctcagacccctacaatgtcaacctcccgctacacatcacctctatcctcagtgtgcccccgaacatcatctctaacgtttccttggccaggctcacccgtggccttgagtgccctgctctacagcaccggccaagccctgcctctggccctggccctggccctggccttggccctggccccccagatgaaaagttggaagcaagtccagcctcaagtcccctggcagactcaggcccagacgacttggctcctgccctggaggactcgctgtcccaggaggtgcaggactccttctccttcctagaggactcaagcagctcagaacctgagtgggtgggggcagaggatggggaggtggcccaggcagaagcagcaggagcagccttctcccctggggaggacgaccctgggatgggctacctggaggagctcctgggagttgggcctcaggtggaggagttctctgtggagccacccctggatgacctgtctctggatgaggcacagtttgtcttggcccccagctgctgttccctggactccgctggccccaggcctgaagttgaggaggaaaatggggaggaagttttcctgagtgcctatgatgacctaagtccccttctgggacctaaacccccaatctggaagggttcagggagtctggagggagaggcagcaggatgtggaaggcaggctctgggacagggtggggaagagcaggcatgctgggaagttggggaggacaagcaggctgagcctggaggcaggctagacatcagggaagaggcagagggaagtccagagaccaaggtggaggctggaaaggccagtgaggatagaggggaggctgggggaagccaagagacaaaagtcagattgagagaagggagtagggaagagacagaggccaaggaagagaagtccaaaggtcagaagaaggctgacagtatggaggctaaaggtgtggaggaaccaggaggagatgagtatacagatgagaaggaaaaagaaattgagagagaagaggatgaacaaagagaggaagcccaggtagaagctggaagggacctagagcaaggggcccaggaagatcaagttgctgaggagaaatgggaagttgtacagaaacaagaggctgagggagtcagagaggatgaggacaaaggacagagggagaaggggtaccatgaagcaagaaaagaccaaggagatggtgaagacagcagaagcccagaagcagcaactgaaggaggagcaggggaggtcagcaaggaacgggagagtggggatggagaggctgagggagaccagagggctggagggtactatttagaagaggacaccctctctgaaggttcaggtgtagcgtccctggaggttgactgtgccaaagagggcaatcctcactcttctgagatggaagaggtagccccacagccacctcagccagaggagatggagcctgaggggcagcccagtccagacggctgtctatgcccctgttctcttggcctgggtggcgtgggcatgcgtctagcttccactctggttcaggtccaacaggtccgctctgtgcctgtggtgccccccaagccacagtttgccaagatgcccagtgcaatgtgtagcaagattcatgtggcacctgcaaatccatgcccgaggcctggccggcttgatgggactcctggagaaagggcttgggggtcccgagcttctcgatcctcttggaggaatgggggtagtctttcctttgatgctgctgtggccctagcccgggaccgccaaaggactgaggctcaaggagttcggcgaacccagacctgtactgagggtggggattactgcctcatccccagaacctccccttgtagcatgatctctgcccattctcctcggccccttagctgcctggagctcccatctgaaggtgcagaagggtctggatcccggagtcgtcttagtctgccccccagagaaccccaggttcctgaccccctgttgtcctctcagcgcaggtcatatgcatttgaaacacaggctaaccctgggaaaggtgaaggactgtgattaggaccacagccctgggcaaaggggaccagcaagttgtcttgaatctccagggttcctgactagctgtctcctctgcagcatgagcagctgtagtgcccaactctataggctttggccctccagcttctctctttgactgtgggaggcactgccttggttggtttacctgaacttgtctccgacacaaagcacttatctcttaggagattcccaagaaagtcaacaagatcttgttcccagggagtgggtcattggccaaagggaacataaggtaggcagaaaacttaaaagagtttgttaaagtgaagactggagaaattcctcccttcctctgagctgtgaatctctcttcatgaaagccaaaggtagagacagggaggacagggccaggttagggccttccacacacaaacacttctagagttgcccattcctgttatgttcttggaccctaagatacctcctgtcccttttaaatccagattaagagaaacgtccaggaagagctctttgaagccctcaatatttgttggagggactggactcctctccagctccccaccctctgcctccagtcaccatgtgcaagagaggtcctgtacagatctctctgggctctcctttctcctttggaataacttgttcctatttcaggaaagggaaatggtgtcactcaggccctgggactgcttctccagccaggctggggccacaggtcccactctagtgaaggtcaatgtctcagaataaaagctgtatttttacacata

SEQ ID NO: 958 - DNA, 3611 bp, Homo Sapiens
  NM_001025603
attcagaaaaaggaaaataaagcaacgcacgagccggctgggccaggaccttggggctgggctggagtgaaggtggctacgagttttccagatttaggagacttcagaaaggtggggcagatagaatggagatggcaaagatctctttgggcatatatgggcctggcgaagtaatggaataatttctaattttcggagaagccctcatgccgggatggcagaagatgagcctgatgctaagagccccaagactgggggaagggcccccccaggtggtgctgaggctggggaacctaccacccttcttcagaggctccgaggtaccatttccaaggccgtgcagaacaaagtagaggggatcctgcaagatgtacagaaattttctgacaatgacaagctgtatctctaccttcagctcccctcaggacccaccactggagacaaaagctcagagccaagtacactgagcaatgaggagtacatgtatgcctataggtggatccgcaaccacctggaagagcacactgacacctgtctgccaaagcaaagtgtttatgatgcctatcggaagtactgtgagagtcttgcctgttgccgcccactcagcacagccaactttggcaagatcatcagagagatcttccctgacatcaaagctcgaaggcttggtggccggggccagtccaaatattgctacagtggcataaggaggaagaccttggtgtctatgccacccctgcctggacttgacctaaagggttctgagagtccagaaatgggcccagaagtaaccccagcacctcgagatgaactggtggaggcagcgtgtgccctgacctgtgactgggcagagcggatcctgaaacggtccttcagttccatcgttgaggtcgcccgcttcctgctacagcagcatctcatctctgcccgatctgcacatgcccatgtgcttaaggccatggggcttgctgaagaggacgaacatgcacctcgggaacggtcatctaaaccaaagaatggtttagagaacccagagggtggagcccacaagaagccagagagactggcccagcctcctaaggatctggaagcccgaactggggccggtcctctcgcacgtggagagcggaagaagagtgtagttgagagctcggccccaggagccaataacctgcaggttaatgccctagtggctcggctgcctctgctccttccccgggcccctcgctcactaattccgccaatcccagtctctccacctattctggcccccaggctttcttcaggtgccctgaaagtggctacactgcctctgtctagtagggccggggcacccccagcagctgtgcccatcattaacatgatcttaccaactgttcctgctttgcctggacctggacctgggcctgggcgagctccacctgggggactcactcagccccggggcacagagaacagagaggtaggcataggtggtgaccaaggaccacatgacaagggtgtcaagaggacagctgaagtacctgtgagtgaggccagtgggcaggctccaccagctaaagcagcaaagcaggatatagaggatacagcaagtgatgccaaaaggaaacgggggcgccctcgaaaaaagtcaggtggaagtggggaaaggaattctacccctctcaagtcagcagctgccatggaatctgcccagtcctcaaggttaccatgggagacatggggctcaggaggggaaggcaactcagctggaggggcagagaggccagggccaatgggagaggctgaaaagggggcagtacttgcccagggtcagggagatggtactgtttccaaaggaggaaggggccccggttcccagcataccaaagaagcagaagataaaattcccttggtcccctcaaaagtgagtgtcatcaagggcagcagaagccaaaaggaggcttttcctttggcaaagggagaggtagacactgcaccacagggtaataaagacttaaaggagcatgtgcttcaaagttccttatcccaggagcataaagacccaaaagcaacacccccatgatacaggtctgtggggaagagtgtttatatccctacgttaactttgcctagtagaggcccttctttgcacttgcttctcatttggctattcttttcctaaggaagtccattctcctctgtacagacagctgagtcacccagtctacttagtacctggttgctgcctctgaccttttcagcttgataccctgggctttagtgtaaccaataaatctgtagtgaccttacctgtattccctgtgctatcctgtgggaaggtaggaatgggctaagtatgatgaatatataggttagggatcttttggttttaaatcacagaaaacctaattcaaactggcttaaaataaaaaggatttattggttcatgtaactagaaagtccataggtagtgctggctccaggtgaagacttgacccagtagttcagtatgtctctaaataccggactgacttttttctcactgttgcatcttctgtaggaccatttaagtctgggccacttaatggctgccagcattcctaagattacacttttccccatttatgtccaatcagaaaaagaaggcatctttgtaccagaaatctcagcaaaagccctaatattcacactgattaggcctgggtcacatgtccaccctgaccaatcactgtggccaggaggatgatacatgctaatttgcttattctatatcatggacaacacctttggggaaaagggtgggggtcagcctccccaaaatcacatggattccccaagtggaaactaggagcagggagttgcttgggtggccgctaacaccaggctactcttattttagcttgctaagttgagatcagctagacctgctttcttttctcctcagtcttgcatttccctcaatacaagctgtagcctctttcctcgtttctagtctcagaaggaaggagagggaagccattctcctctagggactcttcagtctcatttagatgatagtccctttttttctacctccatattagagatggagctccttccttttcctgtttcttaatttttgtcttctcattcctgcttccctctcaccctattgccagttccaccaactagagtgaaagacttcctagccatttcattaaatctattctgtatccaccaggtggcagcatcttgtcatacgtgtcaggacttaggactgcggggtttaggttagatgtcacggaaaaagctagttctgtggtcaggcggcaccaatgagaaaggaatgcagaccctccagatgtatccttgggaaaagcagtaaaccaactaatatttattgaagacctactttgtcctctacatagggtagcttctgtcagggaatcttggttcttcccaagaaacactgattttctttcagggagacttcatgtgttcatttatttccaccacagcagattttaagaaattataatatgtaatatttgatatctataaagagtatatctaacgtgaataaattatgaagcatactaatgagtacctatgacccataacacatatacattaaaacattttaaatacca

SEQ ID NO: 959 - DNA, 649 bp, Homo Sapiens
  NM_001026
aggcatcggcgcggtcagcctcgtggcgcgcccacgcccccacgccggctcttcccggggtccttccgtgcgcgttgatatgattggccggcgaatcgtggttctcttttcctccttggctgtctgaagatagatcgccatcatgaacgacaccgtaactatccgcactagaaagttcatgaccaaccgactacttcagaggaaacaaatggtcattgatgtccttcaccccgggaaggcgacagtgcctaagacagaaattcgggaaaaactagccaaaatgtacaagaccacaccggatgtcatctttgtatttggattcagaactcattttggtggtggcaagacaactggctttggcatgatttatgattccctggattatgcaaagaaaaatgaacccaaacatagacttgcaagacatggcctgtatgagaagaaaaagacctcaagaaagcaacgaaaggaacgcaagaacagaatgaagaaagtcagggggactgcaaaggccaatgttggtgctggcaaaaagccgaaggagtaaaggtgctgcaatgatgttagctgtggccactgtggatttttcgcaagaacattaataaactaaaaacttcatgtgtctggttgtttgaaaaaaaaaaaaaaaaaa

SEQ ID NO: 960 - DNA, 1892 bp, Homo Sapiens
  NM_001029835
agtcatgtttttttcagagggagggctaacatctggccatatttttcaacaaattcagaagtgagtagagaatgcatagtagctgtcggcagaggaggaaccagaatctctccaaagaaattcctcaaacagaatttcacacagggtattccatggagaatgagcctggaattgtctcgccatttaaacgagtattcctaaaaggtgaaaagagtagagataagaaagcccatgagaaggtgacagagaggcgccctctgcacactgtggtgttgtcattgcctgagcgcgtcgagccagacagactgctgagcgactatattgagaaggaggtaaagtatttaggtcagttaacgtccataccaggatacctgaatccctccagtaggactgaaatcctgcatttcatagacaatgcaaagagagcccaccagcttccgggacacttgactcaggagcacgatgctgtgctcagcctgtctgcgtacaacgtcaagctggcctggagggacggggaggatatcatcctcagggtgcccatccatgacatcgccgccgtctcctatgttcgggatgacgctgcacacctggtggtcctgaagacagcccaggacccagggatctcccccagccagagtctgtgtgcggaaagttccagaggcctcagtgcaggctccctgtcggagagtgcagttgggcccgtggaggcatgctgcctggtcatcctggctgcagagagcaaggtcgctgcggaggagctttgctgtctgctaggccaggtcttccaggttgtttacacggagtccaccatcgactttctggacagagcgatatttgatggggcctctaccccgacccaccacctgtccctgcacagcgatgactcttctacaaaagtggacattaaggagacctacgaggtggaagccagcactttctgcttccctgaatctgtggatgtgggtggtgcatcaccccacagcaagaccatcagtgagagcgagctgagcgccagcgccactgagctgctgcaggactacatgctgacgctgcgcaccaagctgtcatcacaggagatccagcagtttgcagcactgctgcacgagtaccgcaatggggcctctatccacgagttctgcatcaacctgcggcagctctacggggacagccgcaagttcctgctgcttggtctgaggcccttcatccctgagaaggacagccagcacttcgagaacttcctggagaccattggcgtgaaggatggccgcggcatcatcactgacagctttggcaggcaccggcgggccctgagcaccacatccagttccaccaccaatgggaacagggccacgggcagctctgatgaccggtcggcaccctcagagggggatgagtgggaccgcatgatctcggacatcagcagcgacattgaggcgctgggctgcagcatggaccaggactcagcatgatggacagtggatgggggggcacccacaccttccgcgcagtcgtcataggccttcccagaaggagctgcccagacctgcgtgtcagcccttggtggtggccagggagaggcgcccggtgcagatggccccgggcggcccaggtcctctactgtgaaggagcagggagctgccgagggacacgagcctcagtgcggggtggaaggctctttgccttgtccaccagggctcagccaagccctgcagtgtgtccccgctcggggagggcccggccgagcgggcagggagagccagtcctgtcggctgggcccttggacggctgtcagttttgcacatgatgttcctattgtaactctcagagaccttaaaaagaagtttactgcaatgtgaataatttaatctctggttgccaagcaaaaaaaaaaa

SEQ ID NO: 961 - DNA, 2021 bp, Homo Sapiens
  NM_001029840
ctcctccagcagtccctttccccttcttccccaagatccagcgcgtgctcggttgcccttctccgttccttgcaggcccttgggtcaggacccaccacctgccggaccatcattttccgagtccctccggcctagtcggagtgctcgctcgcgcctcctaaagctctcagccgagcgcgccgagacccctcagggcggccgcaattaatggatgcctcgaagttgacgtacatatatattcagaaatgttttgccacctgagacctatgaggaggttatgtctagagaagatatttccacactggtttcccttttcaagagctttatcgggagctgaagcagtcaatgccttgaggcctttctattttgcagtacatccagatttctttggacagcaccccgtagaaagggatgatacatggaagagttttcaatgccctagtgatttttccttatgatgcatgctgctggaccactcccctacaacatcagttaatgtgtgctccaggaatacaaactgatatgaaaaatgacttatggtagatgtagttaagacagtcaatatattttaacattagaaaatacagtcagtccttcatatccatgggttttacatccatggattcaaccaacctcagactgaaaatattaggggaaaaaaatacatctgtactacacatgaacaaacttctctttcttgtcattattccctgaacaacacaggataacaactacttacatagcacttacattatattagatattataagtaatctagaaatgacttaaagtatatgggaggatacacataggttatttgcaaatactacactattttatatgagagacttgagcattcgcagatttcggtatccacgggaggtcctggaaccaatcccctatggataccaagggactgctatgtattacaaagccacatgctttggaattacttcagtgttccttctattttcattaacactgatatctagtttaatatgaaaaggaacttgaaatcttgaaaattagaacatcgttatttttttctacttgcaatggaaaatctattttgcttttttgcttctaggaaaatattctgattatgatatgtgatatgttggctactcaaagtcagaacttttcaaagtaatcagtaaattgaatcaacagaaaaatattcattaactcggggatgcattaataaagtttttaaattcaaaatgtatagaaaaatcaagcttagtaatactttaatattattctaccaatgtattttttttaattaagacttctgtatgcagcagggcatggtggcacacctgtagtcccagctactagggaggctgaggcaggaggattacttgagcccaggaattcaagcctgggcaacatagtgagtcctcatctcctaaatttaaaaaacaaacaacaaaaacttctacgtgtggtaaagggttaactcagcaagcttgggttgcttaaaccttgcacattccaaagaaaggtctgaccccagtgctgacctttgactggctactgggaaatgagctctgagcccctggataggaatgtttctgtttgcctgaggcctttgaccatgccagatagtttatgctaacaatgtgatttatagtgaatacctgttttcctgtgtctaagaccctgggctgcactgtattaatttgaccttgggtatttggggagctgagactgagtagctgaagtgagtcacataagcactaaatgcttacctgactgacccccagtaaaactctggacatccagacttggatgagcttccttgggtggcaacacttttacgtattgtcacacaccattgctggggggattaagcactgtctgtaaaactccactgtgaaatgacaactggaaacttgcacgtggtctctcctgattctgctctattcaccttttccctttgctgattttaatctccattcttttgttgtaataaaccataatggtgaataaaacaaaaaaaaaaaaaaaaaaaaaaaaaa

SEQ ID NO: 962 - DNA, 6512 bp, Homo Sapiens
  NM_001029882
tgatcgaggtgggggggcgccgcgggagcggggggccgtgtccagcggagttagcggcggagaatgtgagccgaggcgcgagccatgctgtcagcgacggcgggcggctcagggctcctccacgactcctctcctcagcagccgggcgcccgcgtcgctgccaccgccggaagacagacgtcccccaaaacccctcgcctggctcggacccacggagccggcagcccagcactccgatgggagcttgcctgattgtcaacccatcggcctggaccccagagcccacccagttgagcgtgtgcagagggccccgagtgcggggcgacgctcaggccgttgcagagaccaccctggagatgctgatgaagacaggcctttcctgctgagcccagcctatcttcgcagcctgctcagaaaggggaactgaggctcatggatatacagtgagtcctacctcctagcctgaggactcttccctgcgccttgatgacctgagagaactgggaggagaaaggggttgtgacaatgaccaggactcagggcagaggtggaaaccagagtgcctgatgtgtgcagctgctgacccccccaggacacctctctaccggagtctgtggaagcagagaactgggaggccaaggattggtatgaagaattaaatgaaacgatgcctggacagcttccagcccagtacctggcgcgcagtaggtgctcactaaacctgagctgcgatggtcctttccaggcgctgtccacgccccgaggcctgggctcaggccgaagttgctccacagcacccccagctgacagccagcgactggcagagcccccaggcacgggggccctctctcttccagagatctccagtgtgacagcccaggcggcagagccgagggtcctggtcccggcttctcgcaccctcatgtcagccccggccccgcccggcggcctgcggaggacaaggtcaggatgcgtgtgaagccccagggcctggtggtgacttccagtgccgtgtgcagctctcctgactacctccgggaacccaagtactaccccggcggcccccccaccccccggcccctgcttcccacccggccccctgccagcccacctgacaaggccttctccacccacgccttctccgagaacccacgcccacccccacgccgggaccccagcacccggcgcccaccagtccttgccaagggggacgacccgctgcccccacgggcagcccgtcctgtctcacaggcccgctgccccacaccggtcggagacggcagcagctcccgacgctgctgggacaacgggcgggtgaacctgcgaccagtggtgcagctgattgacatcatgaaggacctgacacgcctctcccaggacctgcagcacagtggtgtacacctggactgtggtgggctccgactgagccgcccgcctgcaccgccacccggcgacctacagtacagcttcttctcctcacccagtttggccaacagcatccgtagccctgaggagcgggccaccccacacgccaagtcggagcggcccagccatcccctctacgagcctgagcctgagcctagggacagtccccagcctggccaaggccatagtcccggagccacggctgcggccacgggtctgcccccagagcctgagccagacagcactgattactcagaacttgctgacgccgacatccttagtgagctggcctccctcacttgcccagaggcccagctgctagaggcccaggccctcgagccaccatcgcccgagccggagcctcagctcctggacccccagccccgcttcctggacccgcaggcactagagccgctcggggaagctctggagctgccacccctgcaacctcttgctgatcctctggggctgccgggcctggctctccaggccctggacaccctgcctgactccttggagtcgcagctgcttgacccccaggcactcgaccccctgcccaagctgcttgacgtcccaggtcgccgtctggagccccagcagcccctggggcactgcccactggccgagcccttgcgcctggacttgtgctcaccgcacggcccccccgggcctgagggtcaccccaagtacgccttgcggcgcactgataggccaaagatcctgtgtcgccggcggaaagccggacggggacgcaaggcagacgccggacccgagggccgcctactgcccctgcctatgcccacggggctggtggctgccctggccgaacccccaccaccaccgcctcctccaccccctgccctgccaggcccaggcccggtctcagtcccagagttgaagccggaatcttcccagaccccagtggtctctacccgcaaaggcaagtgccggggcgtgcggcgcatggtggtgaagatggccaagatccccgtatcgctggggcggcggaacaagaccacatacaaagtgtcttccttgagcagcagcctgagcgtggagggcaaggagctgggcctgcgcgtgtcggctgagcccaccccgctgctgaagatgaagaacaatgggcggaacgtggtagtggtcttcccacccggtgagatgcccattattctcaaacgtaagcgcggccgccctcctaagaacctgctgctgggtcccggcaagcccaaggagccagctgtggtggcggccgaggcagccactgtggcagcggccaccatggccatgccagaggtaaaaaaacgacggcggcggaagcagaagctggcatctccccagccatcctatgcagcagacgccaacgacagcaaggccgagtactcagacgtcctggccaagctggccttcctgaaccgccagagccagtgcgctggacggtgctcaccgccccgctgctggacacccagtgagccggagtcggtgcaccaggcccccgacacccagagcatctcccacttcctgcatcgtgtgcagggcttccggcggcgtgggggcaaagcaggcggttttggtggccggggtgggggccatgcggccaagtcagcccgatgctccttcagtgacttctttgagggcatcggcaagaaaaagaaggtggtggccgtggcagccgctggggtcgggggcccgggccttactgagttggggcacccacgcaaacggggccggggggaggtagacgctgtgactgggaagccaaagcgcaagagacggtcccggaagaatgggactctgttcccagagcaggtgcccagtggcccaggctttggggaggcaggtgctgagtgggccggggataagggtggtggctgggcccctcaccatgggcacccaggcggacaagctggccgaaactgtgggtttcaggggaccgaggcccgggcctttgcctccactgggctggagagtggagcctcaggccgtggcagctactacagcacgggtgcaccctcaggccagaccgagctcagccaggagcgccaaaacctcttcaccggctactttcgctcgctgctcgattcggatgactcctccgatctcttggactttgccctctcagcctctcgcccagagtcccggaaggcatcgggcacctatgcagggccacccaccagtgccctgcctgcccagcggggcctggccaccttccctagccggggagccaaggccagcccagtggcagtgggtagcagcggggctggggcggacccctcctttcagcctgtcctgtccgcgcgccagaccttcccaccaggacgagcagcaagctatgggctaactccagccgcttcagactgccgggcagccgagaccttccccaagctggtgcccccgccctcagccatggcccgctcacctaccacccacccgcctgccaacacctacctgccccagtacggcggctatggggccggacaaagcgtattcgccccaactaagccctttacaggccaggactgcgctaacagcaaggactgcagcttcgcctatggcagtggcaacagcctccctgcctcacccagcagcgcccacagcgccggctatgccccaccgcctaccgggggcccctgcctgccaccaagcaaggcctccttcttcagcagctctgagggggcccccttctctggttcagcccccacgcccctgcgctgtgacagccgggccagcacagtctcgcccggtggctacatggtacccaagggcaccacagcctctgccacctctgcagcctctgccgcctcctcctcctcctcctccttccagccctcgcccgagaactgtcggcagtttgcgggggcttctcagtggcctttccggcagggctatggaggcctggactgggcctcagaggcctttagtcagctctacaatcccagttttgactgccacgtcagcgagcccaacgtgatcctggacatctccaactacacaccgcagaaggtgaagcagcagacggctgtgtcggagaccttctctgagtcatcctccgacagcacccagttcaatcagccggttggtggcggggggtttcggcgtgccaacagcgaggcctcaagtagtgagggccagtcgagcctgtccagcctggagaaactgatgatggactggaacgaggcatcatctgcccccggctacaactggaaccagagtgtcctctttcagagtagctccaagccgggccgtggacggcggaagaaggtggacctgttcgaggcctcacatctgggcttcccgacatccgcctctgccgctgcctcaggctacccatccaaacggagcactgggccccggcagccgcgaggtggacggggcggtggggcctgctcagccaagaaggagcggggtggcgcagcggccaaagccaagttcatccccaagccacagccagtcaacccactgttccaggacagtcctgacctcggcctggactactatagcggggacagcagcatgtcaccactgccctcacagtcgagggccttcggcgtgggagagcgagacccctgtgacttcataggaccctactccatgaacccgtccacgccttccgatggcacctttggccaaggcttccactgcgactcgcccagcctgggtgctcccgagcttgatggcaagcatttcccaccgctggcccacccacccacggtgtttgacgccggcctgcagaaggcatactcgcccacctgctcgcctacactgggcttcaaggaagagctgcggccaccgcccacaaagctggctgcctgcgagcccctcaagcatggactccagggggccagcctgggccacgcagctgcagcccaggcccacctgagctgccgggacctgccgctgggccagccccactacgattcccccagctgcaagggcacagcctattggtaccctccaggctcagctgcccgcagcccgccctatgaaggcaaggtgggtacagggctgctggctgacttcctgggcaggacggaggccgcgtgcctcagtgcccctcacctggctagcccaccagccacgcccaaggccgacaaggagccactggaaatggcccggccccctggcccaccccgtggccctgctgcagccgctgctggctatggctgcccactccttagtgacttgaccctgtcccccgtgccgagggactcgctgctgcccctgcaggacaccgcctacaggtacccaggctttatgccccaggcgcatcctggcctgggtgggggccccaagagcggcttcctggggcccatggcggaacctcaccccgaggacacattcaccgtcacatccctgtagtgccaactgaagtgccgactggaccgcgaggttttgttcctggctttcagaaaaccaacgccaagatccctcccagcgtccacatcgtcctctggcaggagctcctgcccctctgcctcccaccctgccccctacaccccctgcagacccatctccctccaccccctcccacccatctcctccacgcagaagccgaaggtgagccctttctgcacaaaaccagcaattgtaaatactttttaaaaatgtacaaaacttaaaaacaaaacacagttttagaaaaagacaaaaaaaaaaaagagagagagagagcgagagagcgagcgtgtgcaagaggttgcgagcggggccccgaggtgtccagagcccctgcaagtatgcactgagaaatttatctacaggtcgtttgacaaaaatgaacaatatcctatttattgtatatactgttttattataaatcgtggattgtatattgcattctgtaaacctgctgtggtcccgtggtgtgcaaattcgcatggtgggggggagggagaagaacctcttgcgggagctttttttttctttcttatttttcactcttttgggttttctcttctgttgttgttgttgttgttttctgttggcaggacacacccaaagatccaagtttgtattaaaaagaaatgaaaaaaagcaaaaaaaaaacaaaaaaaaaacaaaaaaaaaaaaccaaaaaaaaaaaaaaaaaa

SEQ ID NO: 963 - DNA, 7237 bp, Homo Sapiens
  NM_001029884
gaggaagaggaagtcggagcccgagcctgagcccgagcccgagcccgacggcggctgcagggcgctccggcagcccgagccggcgcagcgcagcccgcaccctccccgcccgacctgcgagcgccgcccgggcatgcgaagccgtccctccccgggtgaagactgatgagaagagtctgtgggtgaagacattgaaaaggtttcaactataaaaatgggcaccagttgcgtcttgaagtgccatcagctgtaaccaaagttccacatcccaagacgacagccaggcgttcctgccctcaagaactgaagacaatggagctctctgatagtgaccgacccgtcagcttcggttccacatcatcctcggcctcttcccgcgacagccatggttccttcggcagcagaatgaccttagtttcaaatagccacatgggcttgtttaaccaggataaggaggtaggggccataaaactggagctgattcctgccaggccgttttccagcagcgagctgcagagggacaaccccgccacggggcaacagaacgcggatgagggcagcgaaaggccacccagagcgcagtggagagtggactcaaacggggcacccaagacgatcgcagactcggccacgagccccaagctcctctatgtggatagagttgttcaggaaattctggaaaccgaaaggacttatgtacaagatttaaaaagcatcgtagaggattaccttgactgcatcagggaccaaacaaaacttcccctggggaccgaagaaagatcagccctttttggaaacatacaggatatctaccacttcaatagtgaacttctgcaagatttggaaaactgtgaaaatgatcctgtggccatagcagagtgttttgtgtccaagagtgaagagttccacatttatacccagtattgcactaactatccaaggtccgtggctgtgctaacagagtgtatgaggaacaagatactggccaaattcttcagggagcgtcaggaaactctgaaacactcgctgcctctggggtcctatctcttgaaaccagttcagcggattctcaagtatcatctccttctgcatgaaatagaaaaccaccttgataaggacacagaaggctatgatgtggtgcttgatgctatagacacaatgcagcgagtcgcctggcatatcaatgacatgaagcggaaacacgagcacgcggtccggttacaggagatacagagtttgctcactaactggaaggggccagacctgaccagctacggggaactggtgcttgagggaaccttccgcatccagcgagccaagaatgagcggacgctcttcctcttcgacaagctgctgctcatcacgaagaagagagatgacacgtttacatacaaagctcacatcctgtgtggcaacctcatgcttgtggaggtgattccaaaagagccgctcagcttcagcgtcttccactacaagaatcccaagctgcagcacacagtccaggccaaatcccagcaagacaaacgcctctgggttctgcacctaaagagactgattctggagaaccatgcagccaagattccagctaaggccaagcaagcaatccttgaaatggatgccattcatcatccaggcttctgttacagtcctgagggagggacgaaagcactgttcggctctaaagaaggttctgctccatatcggctgagaagaaaatctgaaccttcctcacggtcacataaagttttgaagaccagtgaaacagcacaagacatccaaaaggtttctagagaggaaggatctccccagctgtcttcagcaaggccgtctcctgcccagagaaatagtcagcctagcagttctaccatgatcagcgtgcttcgagcgggtggagctctcagaaacatctggaccgatcaccagatcaggcaagccttgtttcccagccgacggtccccgcaggagaatgaggatgatgaagatgattatcagatgttcgtgccgtcattttcctcctcagatctgaactctaccagactatgtgaagatagcacttctagtcgcccttgcagctggcatatgggacagatggagtccacagagacctccagctctggtcacaggattgtcaggcgggccagcagtgctggggagagcaacacatgccctcctgaaataggaactagtgacagaactagggaactgcagaacagccccaaaacagaagggcaggaggagatgactccctttgggtcatccatagagttgactattgatgacatagaccatgtctatgataacatcagttatgaggacttaaaactaatggttgctaagcgggaagaagctgaatccactccctctaaatcagccagggactccgttcgccccaagagcaccccagagttagccttcacaaagaggcaagctggccacagtaagggctctctttacgcacaaacagatggcaccctctcaggtggagaggcatccagccaaagcacgcatgaactccaagcggttgaggagaacatctatgacaccatagggctcccagatcctccgtcgctgggttttaagtgcagcagcctaaagcgtgcaaagcggagcacctttttgggtctggaggccgacttcgtgtgctgtgacagcctgaggccatttgtttcccaagacagcctccagctcagtgaggacgaagccccttaccatcaggccactcccgatcatggttatctgagtttgctgtatgactctcccagtggtaacttgtctatgcctcataagcctgtatctgataaactgtccgaagaagtagatgaaatctggaatgacctggaaaattacatcaagaaaaatgaagacaaggccagagaccgtctcctggcagcgtttcctgtgagcaaggatgatgtgccagacaggctgcacgcagagagcacccctgagctgagccgggacgtggggcgctctgtgtccacgctgtccctgcctgagagccaggctctcctcacgcccgtgaagagcagggctggcagagccagccgcgccaactgcccctttgaggaagacctgatttctaaagaaggctcctttatgagccttaaccggctttctctggctagtgaaatgcccctcatggacaatccctacgacctggccaacagtggcctgtctcaaacagacccagaaaaccctgacctggggatggaggccacagataagacaaaaagcagggtgtttatgatggctcggcagtacagtcagaagattaagaaggcgaatcaacttttaaaagtgaaaagtctggagctggagcagccgccggccagtcagcatcagaaatccatgcacaaagacctggctgccatcttggaagagaagaagcaaggagggcccgccattggtgccaggattgctgagtattcccagttgtatgaccagattgtattcagagagtctcccttgaaaattcagaaggatggctgggccagccctcaagaatcctccctcctgaggtctgtgtcaccttcccaggtccaccatggtagtggagactggcttctgcattcaacctatagtaatggagagttagcagatttctgtctcccaccagagcaagacttgaggtcaagatatcccacgtttgagatcaatacaaaaagtactcccaggcaattgtccgcagcttgctctgtgccttctcttcaaacctctgaccctctgccaggctctgtgcagagatgcagcgtggtagtaagtcagcccaacaaagagaactggtgtcaggaccatctttacaactccttgggtcggaaagggatcagcgctaaatctcagccttatcacaggtcccagtcatcttcctccgtcttgatcaacaaatcaatggattccatcaactaccctagtgatgtgggaaagcagcagctgctgtctttacacagaagttcaaggtgtgagagtcaccaggacttgctgccagatattgctgactcgcatcaacagggcactgaaaaactctcagatctcacactccaagactcacagaaagttgtggtggtcaatagaaatttacccttaaatgcccaaattgcaacacagaattatttttccaatttcaaagagactgatggagatgaagatgactatgtggaaatcaagtcagaagaagatgagtcggagttggagctatctcacaatcgtagaaggaaatctgactcaaagtttgtggatgctgacttttctgataatgtctgcagcggcaacacattgcattctttgaatagtccgcgcactccaaaaaagccggttaacagcaaacttggcctttcaccatatctgacaccatataatgattctgacaaactgaatgactatctttggagggggccatctcccaatcaacaaaatattgtccagtctctaagggaaaaatttcagtgtctcagttcaagcagctttgcttaaggttcttcataataactgcttgaatcaacttcttattttgctcataaaacgttacagatactgatgaggtgttttatgtataccagattaaaacaattttgtaagaaccagaggtgtaaaatatactttcttttacagcacaacttttggaaatggctgacgatgcagcccggattgtactgtagcacatgttggcatcaacagtatattttctcatgctgagtgtcttcatgtttcatgtaagtcaatcttacttgaaagtttttagacttttaacacgatggccataacctgacaatagtgcccacaccttaagaaatgcaataatcctttcctgttatccagaaggcccaggtagttttatcctgtgactcaaaggcagcaaggagactttttcacattttaaaaggcaacgaaagctgttgaaagaattatgcttatatctcacattttggttatatttgtggtaacaccttaggataacgtaagccagagatctgtaaattggactgcagtctgaggtgcccattttagggtttttgtgctagtattcttttatgtcattttgatgcagaaattgtgtgactgttgaaaattaaaatgtagcgggacccattttctgtacgcagaaccctttacctgtattcctggacaaggcctagagaacgagctgctcatcatgtttctaatataatttctggggtgaaatgaatgatttccttactggcttagagaaaaccaaggtcaataaaatgcagattgacttaactattagaaaagatgggatgacttctgggaaccacttaactcttcaaatgactgttgaaagagaaaaagcaaaactgaaatcccaccagaccattttgtgtgcctgtttctaatcgatacaaagttaagcatgagctaaaatcagacaaagcactttaaatttatcctttccagagcgctttgcacatgcaccctcctgagtttgggattctgccaaatgaccaacttgatcctggccctgaggagtcattggctgcaggaatagggcaagaatctatttcctaaactacacataacatgggagcctttttttcgttgttttcaggtatattaaagaatgaaatctttggttactaggtgctgactaataaataacaccttttatattctgaccatttgtcacatttcattgtgatactgtatactgatctaactccttatgaaaggcaacaaacaaaaataagacattgaataaaaagcaaaatcaaagaagctaaagagaaaaatgaaggcagatatattgcaactttataacatattctattttattgaagactgcaattaatgcagcaagaatgctttctcaagcggtggcctttgtattctcattttaatcaggtgtacattctatggcctctcccccatgctgttagtttctattttaaaagatacaataatatatgtagggaaaggggcctgggctcttcatttaaaggtaagcagtaatattgagtaagtgacataattctttttctctttgttaagtcctatgcctctttttcttaactgtaaaacatagaatatgagcgtttttatcttacaaataggtacctaaggcatgtgattttatttttaaataacaaaaaataacccaagtttcttgcttctccaaagtattcttctcatagcttataaaagaaagtccacattgaatagcatggtctgggaacattccttctttattgtgtttatttgaacatgatatgagtttccaagatgaaatgatcaaaaaagataagtaccacaagaaagtttttttgtttggttggtttttttgtttgtttgtttttttcttgagactgagtctctccctgttgcccaagttggagtgcaatcttggctcactgcagcctccacctccccggttccagcgattctcctgcctcagcctcttgaatagctgggattacaggcgcccgccaccacacctggctaatttttgtgttgttagtagaggcggggtttcatcatgttggccaggctggtctcgaactcctgatctcatgatccgtctgcctcggcctcccagagtgctgggattacaggcatgagccactgcgcccggccaagaaagtatgtttttagaggtgtgtgtaagtgcatttgtattacctatgaacaaaattacctgactcttgtcccaggaaagctgtttcgcattttcgctttttgattggtattatccagttctatgtagttcatattattgttctgtctgactctcagaaattacttcttcacgccagtgtcttgttgcatgactttgatgtcacctataggaatacacctcactgcacgtaagtgggtatcttactgtataaaaggtctacatggctttaggttttaggacaaatgtgtagatttatagaccatttctgttggccaggacacagattttgagagctgtgtgtatatatatataatcatgtttgtatttttttcctgaaagttatcaattgcttttgtttaaaacagtttgttttagaggtggggtggggatgtatataacgaggaaaagttatatgtactttaaagtatgtcaagttcttactagtttcctgtactgaaggttcaattttttttatataagtttacttttcacctgctctattctttgtggggaaaaaatgcatctagaaaaacatagtttaaatactgtatataagataatgaaagttagtaacgtccattatttaataaagtttgtaaagtacaaggt

SEQ ID NO: 964 - DNA, 1678 bp, Homo Sapiens
  NM_001029891
atggccgcctacaaactggtgctgatccggcacggcgagagcacatggaacctggagaaccgcttcagctgctggtacgacgccgatctgagcccggcgggccacgaggaggcgaagcgcggcgggcaggcgctacgagatgctggctatgagtttgacatctgcctcacctcagtgcagaagagagtgatccggaccctctggacagtgctagatgccattgatcagatgtggctgccagtggtgaggacttggcgcctcaatgagcggcactatgggggtctaaccggtctcaataaagcagaaactgctgcaaagcatggtgaggcccaggtgaagatctggaggcgctcctatgatgtcccaccacctccgatggagcccgaccatcctttctacagcaacatcagtaaggatcgcaggtatgcagacctcacagaagatcagctaccctcctatgagagtccgaaggatactattgccagagctctgcccttctggaatgaagaaatagttccccagatcaaggaggggaaacgtgtactgattgcagcccatggcaacagcctccagggcattgccaagcatgtggagggtctctctgaagaggctatcatggagctgaacctgccgactggtattcccatcgtctatgaattggacaagaacttgaagcctatcaagcccatgcagtttctgggggatgaagagacggtgtgcaaagccatagaagctgtggctgcccagggcaaggccaagaagtgaaggccagcggggaggatactgtccccaggagcaccctccctgctggtcttgtccctctgcccctcccacctgcacatgtcacactgaccacatctgtagacatcttgagttgtagctgcagatggggaccagtggctcccattttcattttagccattttgtcgcctgcacccactcccttcatacaatctagtcagaatagcagttctagagcacaggttctcagtctaagctgtggaaaagctccccttatccaacagagtttaaaagtagtgacttgggtttttgtgagtgctttgtttactaaggactttggggaggaacatgctaagccacgaccaatgaggagaagcaacagagcctgtctgtccccatgagcagagtctgtcctctgctcttctgcagtcaggccactgcctgggggctctagtcattccagtggaagatgaatgtaatctgcatggtgatgtgacaactgtttcctccttgaccccagaggatctggctctaggttgggatcaatcctgaatttcgttatgtgttatatttacttttattaaaaaagtatagtatatattaataatacaaaacaataacccttctggggtttcttgtggcggttgaaatagtcccacatgtggtcatcagaaaataagccattcctcataccaatataggatcagctccttgacctctgaggggcaggagtgcttcctggtgtgtgtattagaatcccttcctgccttgtttcatggcagtgaaatgcctcttggtcctgtccaagtgtgtctttcactgatttctgaatcatgttctagttgcttgaccctgccacatgggcccagtgttcatctgagcataactgtactaaatccttttaccagatcagtataataaaggagtgatgtgcaat

SEQ ID NO: 965 - DNA, 1345 bp, Homo Sapiens
  NM_001029989
gagagaccttggagcgcgcgggaaagagaccaatataaactgtggcgggatagttttcgggtccttgtccagtgaaacaccctcggctgggaagtcagttcgttctctcctctcctctcttcttgtttgaacatggtgcggactaaagcagacagtgttccaggcacttacagaaaagtggtggctgctcgagcccccagaaaggtgcttggttcttccacctctgccactaattcgacatcagtttcatcgaggaaagagcatgtcctttgcaacctgatcacacaaatgatgaaaaagaatagaactttctcattcatctttgaataacgtctccttgtttaccctggtattctagaatgtaaatttacataaatgtgtttgttccaattagctttgttgaacaggcatttaattaaaaaatttaggtttaaatttagatgttcaaaagtagttgtgaaatttgagaatttgtaagactaattatggtaacttagcttagtattcaatataatgcattgtttggtttcttttaccaaattaagtgtctagttcttgctaaaatcaagtcattgcattgtgttctaattacaagtatgttgtatttgagatttgcttagattgttgtactgctgccatttttattggtgtttgattattggaatggtgccatattgtcactccttctacttgctttaaaaagcagagttagatttttgcacattaaaaaattcagtattaattaaacattacttattctaccctcttttttggcaaggaggacaaatacgcaatgttggaaaaccttggatggatatcttctctttaaaaaaatgtaaagataatttggtcttgagggtttaaacggttgataatgcctctacaacaacaagaaaaaagataaaatactaggatagaatcatggtgggcacagtggcttctcaggaggctgaggagggaggtttgcttgagtccaggagttggagaccagcccaggcaacatagcgtaaaccctatctctaaaacaatttttagccaggtgcggtggctcacgcctgtaatcccagcactctgggaggccgaggcgggtggatcatgaggtcaggagatcgagaccatcctgcctaacaaggtgaaaccccgtctctactaaaaatacaaaaaattagccgggcgcggtggcgggcgcctgtagtcccagctactcgggaggctgaggcaggagaatggcgtgaacccgggaagtggagcttgcagtgagccgagattgcgccactgcagtcggcagtccggcttgggcgacagagcgagactccgtctcaaaaaaaaaaaaaaaaaaaaaaaa

SEQ ID NO: 966 - DNA, 1802 bp, Homo Sapiens
  NM_001029991
agccttcaagtcggcccaaacacggtttctgcctcaaggattatttatataaccattgcttattggctgctggcaaacactcgctcttctcgttggctgaaactgtcgggagaagttctgcgaaggctgctccttgcggcgttgggactgagggtcacaggcacctgtatttccgtttccggttcgcctccggagccatggcggcggcactgaagtgtctactgacattaggaagatggtgccccggccttggagtggctccccaggcccgggcgctcgccgccttagtacccggagtgacccaggtagataacaagtccggtttcctgcagaagaggcctcatcgccagcaccctggcatcctaaagctgccgcacgtgcggctgccacaggcactggctaacggtgcccagttattgctacttgggagcgctgggcccactatggagaatcaggtgcaaacactgaccagttatctctggagcagacatttgcctgtagagccagaggagttgcaaagacgggctaggcatcttgagaaaaaattcctggaaaacccagacttatctcagacagaggagaaacttcgtggagcagtgctacacgcactacgtaaaactacctaccattggcaagaactgagctacactgagggactgagcctggtgtatatggcagcaagactggatggtggctttgcagcagtctccagagcattccatgagatccgggctcgaaatccagcatttcagccacaaactttgatggactttggctcaggtactggttctgtcacctgggctgctcacagtatttggggccagagcctacgtgaatatatgtgtgtggacagatcagctgccatgttggttttggcagaaaaactactgaaaggtggttcagaatctggggagccttatattccaggtgtctttttcagacagtttctacctgtatcacccaaggtgcagtttgatgtagtagtgtcagctttttccttaagtgaactgcccagcaaggctgaccgcactgaggtagttcaaaccttatggcgtaagacaggtcatttcctggtactggtggagaatggaacaaaagctgggcacagccttctcatggatgccagggatctggtccttaagggaaaagagaagtcacctttggaccctcgacctggttttgtctttgccccgtgtccccatgaactcccttgtccccagttgaccaacctggcctgtagcttctcacaggcgtaccatcccatccccttcagctggaacaagaaaccaaaggaagaaaagttctctatggtgatccttgctcgggggtctccagaggaggctcatcgctggccccgtatcactcagcctgtccttaaacggcctcgccatgtgcattgtcacttgtgctgtccagatgggcacatgcagcatgctgtgctcacagcccgccggcacggcaggtatggggggtgtgaccaaaatcagtgggatgtggcaggaagctgcagcccacgccagcatctgtttccacagggatttgtatcgttgtgcccgtgtcagctcctggggagatcttttacctgtgcttactccgtctgcgtttcctccatctacggctcaggatccctctgagagttgatgaggatgtgtaacaagtattttcttctatcgtgcctgccagggctgaagctgcctggtatccaggaggggaatgctggtatccccatatgtctgtgtttgtttgagatttttaataataaataataaatttttgaagaatggaaaaaaaaaaaaaaaaaa

SEQ ID NO: 967 - DNA, 828 bp, Homo Sapiens
  NM_001029999
tttgcgaggctcactcggtctgagaggtcggaggctgcgagtgtcgctgctgaaggctgtggtggactgggctggatcgcggattttggattagataatagatttgggatcgcggattgggggttggatcgcggatttggggttggatcggggatttggggttggataggggatttggggctgggtcggcgggggcgtggggggaggtgaaaaggtaacagggagctgccccctctcaagagccggtagttgggagtctgagaagtcaccaccatgaagttgttcggcttcaggagccgcaggggccagacggtcctgggctccatagaccacctctacacgggttccgggtaccgaatccggtactcggaactgcagaagatccacaaggcagctgtcaagggcgacgctgcggagatggagcgctgtctggcgcgcaggagcggagaccttgacgccctggacaagcagcacagaactgctctacatttggcctgtgccagtggccatgtgaaagtggtcactctcctggttaacagaaaatgccagattgatatctatgacaaagaaaatagaacgcctttgatacaggctgtccattgccaggaagaggcttgtgccgttattctgctggaacatggtgccaatccaaaccttaaggatatctacggcaacactgctctccattatgctgtgtatagtgagagcacctcactggcagaaaaactgcttttccatggtgaaaatattgaagcactggacaaggtatagatcaatcaactttctttccaaaatatttgttttaacattgacataggtaagggtcaa

SEQ ID NO: 968 - DNA, 6915 bp, Homo Sapiens
  NM_001030288
cctctgagcccagccctccctagcatcaccacttccatcccattcctcagccaagagccaggaatcctgattccagatcccacgcttccctgcctccctcaggtcccagctcttgctcctgcctgtttgcctggaaatggccacgcttctccttctccttggggtgctggtggtaagcccagacgctctggggagcacaacagcagtgcagacacccacctccggagagcctttggtctctactagcgagcccctgagctcaaagatgtacaccacttcaataacaagtgaccctaaggccgacagcactggggaccagacctcagccctacctccctcaacttccatcaatgagggatcccctctttggacttccattggtgccagcactggttcccctttacctgagccaacaacctaccaggaagtttccatcaagatgtcatcagtgccccaggaaacccctcatgcaaccagtcatcctgctgttcccataacagcaaactctctaggatcccacaccgtgacaggtggaaccataacaacgaactctccagaaacctccagtaggaccagtggagcccctgttaccacggcagctagctctctggagacctccagaggcacctctggaccccctcttaccatggcaactgtctctctggagacttccaaaggcacctctggaccccctgttaccatggcaactgactctctggagacctccactgggaccactggaccccctgttaccatgacaactggctctctggagccctccagcggggccagtggaccccaggtctctagcgtaaaactatctacaatgatgtctccaacgacctccaccaacgcaagcactgtgcccttccggaacccagatgagaactcacgaggcatgctgccagtggctgtgcttgtggccctgctggcggtcatagtcctcgtggctctgctcctgctgtggcgccggcggcagaagcggcggactggggccctcgtgctgagcagaggcggcaagcgtaacggggtggtggacgcctgggctgggccagcccaggtccctgaggagggggccgtgacagtgaccgtgggagggtccgggggcgacaagggctctgggttccccgatggggaggggtctagccgtcggcccacgctcaccactttctttggcagacggaagtctcgccagggctccctggcgatggaggagctgaagtctgggtcaggccccagcctcaaaggggaggaggagccactggtggccagtgaggatggggctgtggacgccccagctcctgatgagcccgaagggggagacggggctgccccttaagtgtcggtgaatagtgaggctggaggccggaatctcagccagcctccagcaccttccctctcaccatcccactgccccctcgctcccatgtttccacccggcaccctgatcctcacccgaatctcctttttttttttcttttgagacagagtttcgctttgtcgcccaggctggagtgcaatgcacgatctcagttcactgcaacctctgcctcctaagttcaggcgattctcctgcctcagcttcccgagtaactgagattacaggcacccaccaccatgcccagctgcttttttgtatttttggtagagatggggtttcaccatgttggctaggctggtctcaaactcctgacctcaggtgatctacctgcctcagcctcccaaagtgctgagattacagacatgagcctccgcgccttgcctcctcacccacctcttcactctgaatcctcatgaggcttctcagccctggatttcctgctgccatcctcacccagcacccacaactagcgcctgggcagggcagggctggcacctctcaacgtctgtggactgaatgaataaaccctcctcatccacccctatttatctccatcaccatttccccctctttcttgttcctggaaacggctgctgagtctccatcggccaaacttatctgccctgtgatttctttgacaattctccttttcccccagaacccaccctgggttgaccagagtctgggaagaaggacaagagaacccggcaaactccctcctaggattaactttgtaaagcacccttgccctgtagctgcaagggctgtggaacctgggcagcccgcaaccacctttagctctgggccccccaggccagcctggagcatggctgggtggggccaccagcccatgctctcaggcgggcctgtgatctttcccagggcacatggactgtaggctggccctggcccacaccaccacactctccccagccatggacagaggcagccagaggcctcacggtttctcctccgagtttctggctgggtgtagttctcagaaaccccagtgcctgcgtgtgtccactcgtgggtgtggtttgtgtgcaagagctgaggatttggcgatgcttgggaggggtagttgtgggtacagacggtgtgggggtgggaagtggtgcagagactgaagagggtcaacctgggcatgggggacacagggactgctgagaacgtgcgtgtcatctttgctctgatggggtggacatagcagaaaatctaactctgtctgtagccccatacagaatgccagggtgagcacagtggctggtgcctttaatcccagcactttggaaagttgaggcaggaggatcgcttgagcccaggagttcgagtctgaagtgagctgtgattgcaccactgcacttcagcctgggcaacagagtgagcccctgtctcaaaaaagaaaagaaaaagaaagccaggcttcatggaaagatcgtatgtgtgacccaaatatgagttcttcagctcagccatggtaatcccttccttgaagtctccatttctgcagtacacatgcatgtgcgctctctctctctctctctctctcacacacacacacacacacacacacacacgcgcgcgcgcgcgcgctctcctgcgaacagaggcagggggagaggggtttgccctggtctcggggactggtctggctggcgcttccccactgcacgtttccaggtttagtttgtctgtgtctcctcttccatcccaggggctgagccccttccatcctccaagaggaaccagtgagagtgagtgaaggaggggcctggagccagggacttcccctgtggggcctgggtggagaggggagaactcaatggtgctgcctttgagaccagcccaggctacagcccaggagcacacatgggccagggcagttggtatttcccgaggacaaagaggaaattttcaaagaggaagttgttgagttagagcttgcggtggctgagagcagacaggttgacctgcaaaaaaagacaggggaggcatgtgagtgtgacagccctgctctgtggcctgggcaggagatgggggaaagggtcaggtgggggatgggctcgtgcagtgggagaggagacggagggagggagcgggaaggggcttgcttagtgggtgggaagagctgagctcggatggaaccagcttctaccagccaggctgggcacccactgggctgcatctggtggccttttctgattgctatttggactcactgcagctgcagaatgacagaggccatgtccaaaatcccttagagacactgttgtcttagagttgttaaaataagagcccccatatcaggtttagaaaatactgtcaccgaacgaacgtcgctgtcctcagctccacctccctttcctttgacagatatggttgttttctaagccaggactggttttagtcaggtcctgggcgaatcctgaaaaaaagaggtagtacgggtaaggaaggcacccaacagggctttcacaatccagaaaatatcaaaatataagtgttaaaagagaggcacaggccgggtgcggtggctcacgcctgtaatctcagcactttgggaggccaaggtgggcagatcatgaggtcaggagtttgagaccagcctggccaatatgatgaaaccccgtttctactaaaaatacaaaagttagccaggcatggtggtgtgctcctgtaatcccagctacttaggaggctgaggccagagaattgcttgaaccctggagtcagaggttgcagtgagccgggatcatgccactgtactccaggctgggtgacaaagtgagactgtctcaaaaaataaaaataaataaaataaataaaagagaggcacaaacagtgttatgaatgcaccaaggaaaatggtgcattcataactctcaggtgaagcctaccaagccatgcgtgtgtgcacatatgtgtgtacgtgtgcatgtgcgtgcgtgcatgtgcgtgcgtgcatgtgcctgtgtgtgtatgtgtgcacatgtgtgtgcgcatgtgtgtgtgtgcgcgcatgtgtgtgtgcatgcatgttctcccatgcatgtgtactgtggcaagggagactttgaggaagagattccagtggctgagcagaagggctcgcattgccctggcgaaaggttggaaggcttcacctgagagtgtgtcgtggcctttgtcatatccactgcttgattcctttctttaaaaattatttttattgttttctacatatgagaaccaccacacctggctaatttttgtattttttgtagagatggggtttcaccatgttgtcccggctggtctcaaactcccgggcacaagagatccacctgcctcagcctcccaaaatgctgggactataggcatgagccactgcacccagccactgcttcattcctggtggctgctgtgcctggcatgttgcagatcctccatgaatatgcatttgaatgaatgaatgaatgaatgaatgaatgaatggagatgacgcctcagagattctttcttttgagatgaggtctcattctgtcacccagactagagggcagtggtgcaatcacagctcaccacagcctcaacctcctgggcctcccaagtagctgcgatcacaggtgtgcaccaacatgcccagctaatttttttttttaatttttaatttgtacagacagggtcttgctgtgttgcccaggctggtctcaaactcctgggctcaagtggtcctcccacctaagcttccccaaatactgggattataggtgtgagccactgtgcccaggcttgcctcagatatttgaaggctgggaaggattttgcaaagctgggaaaaggaaaaggcattcccagcagaggggatagcaggtggaaatacataattaaaaaaaaaaaacgtggagcagatccagcgcagtggctcatgcctgtaatcccagcactttgggaggcagagcagggaggattgcttgagtctaggagttcaagaccagcctgggtaacatagaaagaccctgtctctacaaaaacacaaaaaattagccaggcgtggtggtgcatgcctgtagtaccagctacttgagaagctgaggcaggaggactgcttgaagccaggagtttgagaccagcctgggcaacatagtgagaccccgtgtctacaaaaagtaaacatttatatatatattttttaaagtggagcagttcaatatagagtcttttttgaacaaacgtgaaatagatgtcttttttttttttttgagatggagttttcactcttgttacccaggctggagtgcaatggcgtgatcttggctcaccagaacctccgcctcctgggttcaaacaattctcctgcctcagcctcccaggtagctgggattacaggcatgcaccaccaaacccggataattttgtatttttagtagagatggggtttcaccatgttggtcaagctggtcttgaactcccgacctctgctgatccgtatgcctcggcctcccaaagtgctgggattacatgcgtgagccaccgtgcccgacaatagatgtcttttaattttctggaggaaaaagcaaagcaaaagaagcagtggatattttaagactaaaaaggaaaacaaaaaaaggagatagagcaggccagacgtggtggctcaacgtctgtaatcccagcactttgggaggccgaggcaggtggatcacctgaggtcaggagttcaagaccagcctgaccaacatggtgaaaccctgtttcaaaatacaaaaaattagctgggcgtggtggcgggcacctgtaatcccagctacttgggaggctgaggcaggagaatcccttgaacccaggaggtggaggttgcagtgagccgagatcacgccattgcactccagcctgggcgacaagtaaaaaactccatctcaaaaaaaaaaaaggagatagagcaaggaacagtaagaaaatagttgggtgcagtggctatgcggtggcactataggaggctgaggcgggcagatcacctgaggtcaggagttggagaccagcctgggcaacatagacccctatctctacaaaaaatttgaaatatgaaaaattagccaggtgtagtggtgtgcgcctgtggtaccagctactcaagaggcgaaggcagggaagattgcttgagcccaggagtttgaggctatagtgagctgtgatcatgccactgcactccagcctgggcaatagtgtgagactctgtctcaaaagaaagaacatggccaggcgtggtggctcacacctgtaatcccagcactttgggaggccgaggcagtcagatcatgaggccagtttgaaaccagcctggccaacatggtgaaaccctgtctctactaaaaatacaaaaattagccaggcgtggtggcatgcccccgtaatcccagctacttgggggtctgaggcagaagaattgcttgaaaccgggaggcagaggttgcagtgagccgagatcgtgtcattgcactctagtctgggcgacagagcaagactccgtcttggaaaaaaatttaaaaaaa

SEQ ID NO: 969 - DNA, 401 bp, Homo Sapiens
  NM_001031
ctctccgccagaccgccgccgcgccgccatcatggacaccagccgtgtgcagcctatcaagctggccagggtcaccaaggtcctgggcaggaccggttctcagggacagtgcacgcaggtgcgcgtggaattcatggacgacacgagccgatccatcatccgcaatgtaaaaggccccgtgcgcgagggcgacgtgctcacccttttggagtcagagcgagaagcccggaggttgcgctgagcttggctgctcgctgggtcttggatgtcgggttcgaccacttggccgatgggaatggtctgtcacagtctgctccttttttttgtccgccacacgtaactgagatgctcctttaaataaagcgtttgtgtttcaagttaaaaaaaaaaaaaaaaaaaaa

SEQ ID NO: 970 - DNA, 4896 bp, Homo Sapiens
  NM_001031617
gtgctcggcgctcccggggtgcctgctcggcgctccgccggccgccctgcgtacgctcgcaaggcgctcgcagactccggagtcgccaacatgtcgaccgccatgaatttcgggaccaagagcttccagccgcggcccccggacaagggcagcttcccgctggatcacttaggtgaatgtaaaagctttaaagagaaattcatgaagtgtcttcataacaataattttgaaaatgctttgtgcagaaaggaatcaaaagaatatttagaatgcaggatggagagaaaattgatgctacaagaaccattggagaaactgggatttggagacttgactagtggaaaatcagaggcaaaaaaatgaattttgatgagaagacccctgggccgtgttcagtggtctctcaggacggagggcatcatcctgcctcttaggttggctgaggcctgcgtgtggtgtccttagaaatgggcttcgaatagaagctccagccctgtgggggcgtctcctgggtagggagtggcgtcccgttttcccttaggagggtgtttctgcattgaacccctgagtgggacggcgttcccggcaaagctgggagggaggcgagcgtggggcaagacccttgtcttcgaggccggggccctcttgtatggggcggttttatgttgcagtcctctgatactttctgagttcaaagaggtaaatgtataaatttcagtcccttctgaacacagatatcatcagaaaattaccattccctagcaggatgttttcgtgtttgtattcgtatatgccagttcatttcctttgaaaaaaaaaaaaagtggaacacaaagtaggaagtgagaaccttctggctttggatggattgacttcttgattctttctggttttgcctgaacaccaagtagcttcataatcaaagggtcattttctggtttgtatcagaccgtatttataaagttgggtatttaatttcagtaactcctgtattttaacagaaaaagaacctgagtccatttgcagttaggctcgcaccagctgtcttctgtgccagccagctccgcccgagaccccggcacgtgttcgcagcacagcctggcaggggccctgagcggagttctcagcccgtctgtgccaaagttgcctgtgggtcacggaaacccggcccatgtccacccagtgcgtcaggccagccggggcccaaacctgtggatggaacgcaggtgcctgcacatctggggcctcagccagacctgtctccttcccaggcactgtcggaaaggggctggctcctgtctggtcagtggaggatggtggcaggagacggggtggggaggtccaggtcacgtcctctctggcgaccctggcagtggctgtctccaagccctggcaggtggggccaccaatctggccgacctcaggctctgggaaacaggctgccctcgtccctctgcctgtgggtggctgaggcttctcagcccatctccagttctctgcagcaaaggccctctgtttctgtcctgcagtggtggccctttcgtggttaaacatgtccctcccctcctcacagaactgagtacctattgcggctgggcccgcccaaccctgtgtccctgcacccatgggttctaccacctgattcggctgcagctgtcactgtcccgtgtctgctctctgtcaggcctctgagtgctgcagacgtattaacatatcaccgctagttgatggaaagtcttgtttcttattagaatattttgtgtaggcacagggttgccccagcactgtctatagcaaccccagtgtcctcacagtgcacgtgagccgtgacgcagccaccgtggagtcggcgctgacgcggtgtggccacgtgccatgagctcgccaacgcagtgcggctatatggcgtgagcttactgtgaagtggagacaggcagggacacaggaaactacaaacgagaaatccagaaggaggagctggaactgatgggcatagccggccgcgagcccctccgagcacccctgggggtggagttctggctgtcatggcagagggtttcacatgctcaaaaagtaaatgaaccaggatgtgaggggaacacaacagaccatgccgacggagctcccgggcccaggccggggcctcttcccatcgcactctgacccgccgtcgggagtgcccaggcccgggtcgggcctgcctctccgctcgcaccgcactctgacccatcaggagtgtggggaagaccgtcgaccaaaggtgggaaagacaggaaagatactgtactctaagtagtaaatttgttttttgcgtggacgattctgaagctgtattctgagatggaaaaaactagaaatacatcgtggatgatgagagccaggtgtattgagctcctgcttttctaacgtacaaaggtaactggatagagaaacggagtgatcgccctcacctggccagggtgtgctccgagaccccagcaggtgccgaagccgcggatagtcccgaatcctgtccaggcgctgttttttcctgtacgtacctgtgatcaagtctgagatgtgacagcaaaactgacagaacttcgtgcttccctcttcaaaatgtcacagatgggcactgtgttcttaccggagatcttagcaacctcggcatctggctgtttttcttataggtcaggagtttccaccttttcccttaaaggaagcgcttggcagcttctctggtgtgtctgagtcgccagcatcaccactgtcctgttctggggccattcttaagtaaaataaaagcttcttggacccaagcaccacatcaccgcgatggctggtctgatcaccgagatggctgctgagtgcctggcaggcagggtggcgtggatggcccgaaacgctggacggagggagggttgatgtcccagcaggacggctgctcagaacagcacagaatcaaaaactcatgaatggtttatttctggaattttccacttagtatttttggactgtggctgaccatgggtaactgaaaccgtgtgtaagggggactgttgtgaggggctgtgcacaaatgcttcccagctcttgagggcctggacgcagtgacccgtgcactcagggtcttggccctgataccattctgtaaccaaaaggaaccagggccaggccagagaaggtatcagatgagctagagagtgaagaattgctgggatgaggagacttgttgaaataacacggggggatgggaaggagcatacggtggccagcctggggcagtgtgagcgtgaaaataaacaggctgggcgcagcggctcacgcctgcaatcccagcactttaggaggccaaggtgggaggatcacttgaggctaggagttcaagaccagcctgggcaacatgggtgaaaccctgtctctacaaaacaagaaaagtcagccgtgcgtggtgtcacccgcctgtagtcccagatactcaggaagctgaggcaggaggatcacttgagccagaggttaagtctgcagtgagctgtgattgtaccactgctctccagcctgagcaacagagccggaccctgtctcaccaaaggaaaaaaaaaaaaaaaaaagaaagaaaattaattattgtaatgggctgtagccctcagaataaattgatatccagtagtctatacaacataagtaattgcgtaaacatgtcagtggggggagggccaggtctgtcttattaattctaatatagaagaaattttgggaacaggaaactgctgttgcagaaaccacactggtgacaggtgcagattacaaccctcagcgggccgggcgccagtggctcacgcctataatcccaacactttgggaggccgaggcaggcagatcacttgaggccaggagttcaaggccagcctggccaacatggagaaaccctgtctctactaaaaatacaaaaattagctggggctggtggcgtgtgtctgtaatccagctattcgggaggccgaggtgggagaattgcctaaaccaggaggcagaggttgcagtgagcagggattgtgccaccacactccagcctgggcgacagaaccgtctcaaaaaaaaaccctcagttgccatgaagtgagtggtgacgtgtggtgtgaagcaggtgtctgctgtcttgagaaacctccccttgagatgcatagtgacctccgaggagacagtcatgtcacagcagaacggcagaggcccccttaacccagcagccaccgccgggagcgagccgcacaggccgcaccgacctgggggcgtccctgagggcacggtatcacctctggttctcttgcccaactgcatggcctgaatgtaatcccaaggagacaacagacacagacccaaaccgaggagccttctgcgaagtgactggcagcgctggcccagtgttatgtaagatgttatttggggaactgggtatacacactgtcctatttttggaactttttggaagtctgaaattattttgaaatgaggaaaaaaaaatatgctttgtatgaaactatagtggaatagattgagtcgattctcgtttcaaaataacttcaaagagtttccaataggcatgatgccggcatgaatggtttcagcaggtcacaggcagagaagccggaatcccaaaatagcgccattgtgtggacaacctgactccttacaaacgtgcagtggcttcccaacgctgcctttgagtttctgggtctggctgctgaatgtgttgtgcttaagaatccagacaccctgctgttcctgccagagcttctcacgagatatttcgggtagttcatcatctgtcatgtgcagaatgcattttatttctcatagacgcttgtcatgataagctggccacattattaaaaggctcccaaagacaattaaaaa

SEQ ID NO: 971 - DNA, 5241 bp, Homo Sapiens
  NM_001031623
ggaagcccgggagtgagagaaagcggctccgggggcatagcgggccagtaagggccgctcctcctttgaagaggttttgcgtctctttccgccggtggcgtcggcgctcacgcaggggcgggtcccggtagcgccaggcggtgcagggcgggaaggggattcgtggcgacggcggcggcagggacagcaggagcagtggtgctgtcagcgcggccgtcggagacatgggagacccggggtcggagataatagaatctgtccctccagctggccctgaggcatctgagtcaacaacggatgaaaatgaagacgacattcagtttgtcagtgaaggaccattacgacctgttcttgaatacattgatctggtcagcagtgatgatgaagagcctagcacctcttatactgatgagaatattaaacgtaaagaccatattgattatcagaaggataaagttgctttaactctggctcgtctagcccgccatgttgaagtggagaaacagcagaaagaagagaagaatagagcattcagagaaaaaattgattttcagcatgctcatgggttacaagaattggaatttattcgaggacattctgatacagaagcagcaagactgtgtgtggaccagtggctaaaaatgccaggactcaaaacaggcacaattaattgtggaacaaaaagttcattccgaagaggaggccacacgtgggtgtctgggaaaccaattttatgtcctataatgcactgtaacaaggagtttgacaatgggcaccttctcttaggacatttgaaaaggttcgatcactctccatgtgatccaacaattacactacatggacctttcttcagctcctttgcttgtgtagtatgttataaaaaatttgttactcaacaacaatatagagatcacctttttgataaggaagccacagatgatggacataacaacaaccttcttcctcagattattcagtgttttgcatgtccaaattgcttccttctttttagcagaaaggaggagtgttcaaagcatatgtctggaaagaatcatttccatcagagtttcaaactgggtgataacaaaggaattgcacatccaatatctttcccatcttttgcaaagaaacttttgatctctctgtgcaaagatgttccctttcaagttaagtgtgtggcctgccacaagacactgcgttcccacatggagctcactgcccatttcagagttcattgtcgaaatgctggacctgtagctgtagctgagaagagcattacccaggttgcagagaaattcatattaagaggttattgtccagattgcaatcaagtctttgtggatgaaaccagcacccaaaatcataagcagaattcaggacacaaagtccgagtcattaactcagtggaagaatcagtcttactctattgccacagcagcgaagggaacaaggatccttcttctgacttgcatttattgttggatcaatcaaaattttcatcacttaaaagaaccatgtctattaaagaatctagctcactggagtgcattgccattccaaaaaagaagatgaatttaaaagataaaagccatgaaggtgttgcttgtgtccagaaagaaaaatcagtagttaaaacctggttctgtgaatgcaatcagcgattcccaagtgaagatgcagtagaaaagcatgttttctcagcaaacacaatgggttataaatgtgtggtctgtggaaaggtatgtgatgattcaggggtcattcgtttacacatgagccggattcacggaggggcacatttaaataactttcttttctggtgtcggacatgcaaaaaggagttaacaaggaaagatactatcatggcacatgtgactgaatttcataatggacacagatatttttatgagatggatgaggtagaaggtgaaactttgccatcatcctctacaacattggataatttgactgctaacaagccttcatcagctattactgttattgatcattccccggcaaatagttctccgaggggtaaatggcaatgccggatttgtgaagatatgtttgattcccaggaatatgtaaaacagcactgcatgtctttggcaagccacaagtttcatagatacagctgtgctcactgcagaaagccttttcataagatagaaacattgtaccgacattgccaagatgagcatgacaatgagataaagattaaatacttctgtgggctttgtgatcttatctttaatgtggaagaagcatttctgagtcattatgaggagcaccacagcatagattatgtatttgtgtcagaaaaaactgaaacttcaattaaaaccgaagatgattttccagtaatagagaccagtaaccagttaacttgtggttgccgtgagagttacatctgtaaagtcaacagaaaagaagattatagcagatgtctccaaatcatgctggataaaggaaaactgtggtttcgctgcagtttatgttcggcaacagcacagaatttaaccgacatgaacactcatatccatcaagtgcacaaagaaaagagtgatgaggaggagcagcagtatgtaatcaagtgtggcacctgcaccaaagcatttcatgatcctgagagtgcacagcagcatttccatagaaaacattgcttcttacagaaacccagtgtggctcattttggatctgaaaaatcaaacctgtacaagtttactgctagtgcctcacatacagagagaaaactgaaacaggcaataaactattcaaaaagtttagacatggagaaaggagttgagaatgacctaagctatcagaatatagaggaagaaattgttgagcttccagatttggattacctgcgaaccatgactcatatagtctttgtagattttgataactggtcaaacttttttggtcatctaccagggcatctaaaccaaggaacatttatttggggctttcaaggaggaaacaccaattggaagcctccgctcaactgtaagatttataactacctgaacaggattggatgcttcttccttcatcctcgctgtagtaaaagaaaagatgctgctgattttgccatatgtatgcatgctggccgtctagatgaacaactacccaagcaaattcctttcaccatcctctcaggagatcaaggttttctggagctagagaatcaatttaagaagactcagaggccagctcatatactaaaccctcaccacttagagggagatatgatgtgtgccttgttaaatagcatatctgataccaccaaagaatgtgacagtgatgataacatgggtgccaaaaatacttcaataggagaagaatttatatccacagaagatgtggaattagaagaagctattagaagaagtcttgaggaaatgtaattaaagatattaccacacaacatcaagtggccttgaagagactgagataacgaattcttgagtttgttttctaaaggagaccagaaatccactattacaaatgtatttgaaaacatgtttttgctttcatatgttcaaaatctgatctttgttttgtatttttgtgctaatgtgcaaacatgtacagaagaaatagaatacatgttcatgcaaatataaattatgtattctaatataggtgtaacagtttcccagttaactttgaatttatatatttagatttaaaggattaaaaaaaaggaaagctcttgacagttgtttcccaaatagcattagttctttaattttatttgtactgtacaaatgatgctagtttatttttttagcagtgaaaatgaatataaaaaaggtgacataggtcaagttttccataaattctacttctcatgtggcactattatataatacctttgagatctttgtttatgtttattagaagagggtaatggaaactgatcatggaaacatttaaaattttatcagcaatgttctttgtgggtgccatgcatatgtaaattattgctttaattagagcagcacattgctaaaataaaaaatacaccttaatttttaagaaataatttaaatgaaacaatttccattccttttacctgcttagacttttatgtgacttgtatggtctcctggttaaagggaatggtgtcagaatatttgcataaaattatttttcataacagtccttttttatatattggtgtaaacataatattcttcaagaaataatgttgaaagcctactcaggaataatcttccttaactctttaaatttttatttcatgtgaagtgttttcagtttagttattcactgaattgtcagtttccttcatttggtattacatatttaattcttaaatattgaggccccattgtgagtaataaaaaatacgacataagtagaagactaagaagggcttgtcatattatctttgtgtatatgcttcatgttatttaaccagaaatgtcttatctctaaaaatttttagtagtaattatttaccaaacttaaaaacatttctataaatataaagcttttctttatatttaagacaaaatataaaggctagaatttggttccttctctgtaacactaaatattttagtgtgaaattgaatttttttattactatagtcttttcaatctataatttgtgtttttaatttcttgatatgtcacttctgttcctccctgcttgcattttttaaaaactagacattgtggcttgagaatttatcaatcatctttccgaaatgaccacattgtgcttttagtttgtatgtttaagtggtcaagcaaggctctaggaggtagtcactgagctggaccttaaacacatctgcaggagctcacaaaatgggagcaaaagaggcattccagaaagaagagtagttaagcagatgtgggggcagggcaagaggagacagcaccttgttgccagagattctacacaaaggtgtgatggacactgatgctctattaagaagcttttgtggtgtgtgtggtagagaataattaaggcttctgataagacaggaaagggatatttcatcatgactgttaagaaaaggtaactgggttgtttaatgttttaattgataattgtcactgatcgtatttctacttgttaaataattaaaaatcatcttaaaattcatactttgactttaatttagacacaaggagatgtaatcgctgtgtaacatcagagaaagctatatggattatcgtcagaagtaaatgtttctaacattg

SEQ ID NO: 972 - DNA, 1087 bp, Homo Sapiens
  NM_001031628
ggcctctgcgccaaccccgcgcgccacccgcggcttcctccgctcggggtcctcgttcggcctctgctggcctccgcgactccgcggtgcccgcccccgttgagttcaaaaggacgcgcggagcggcgccggcccttcaccagcagcccgtccgactggaaagatctgcctcttctccaagaaactcaaccactagtgacaatgaccagcctcctgactactccttctccaagagaagaactgatgaccaccccaattttacagcccactgaggccctgtccccagaagatggagccagcacagcactcattgcagttgttatcaccgttgtcttcctcaccctgctctcggtcgtgatcttgatcttcttttacctgtacaagaacaaaggcagctacgtcacctatgaacctacagaaggtgagcccagtgccatcgtccagatggagagtgacttggccaagggcagcgagaaagaggaatatttcatctaatgactcccaggccccaaggagcttattcctggctccatcgctaacacgttgactgcttattatgggaaagttttctctgaagccagggagaagcattgattgatgtgggcaaatccaagctccagccaggtcgcagtcccaaatgccgacatcactgactccagggaccagggacatggagaaagctgtttatgatatctttaaccaggccctcttactagagctggtgtttgtgactggccaacaagatgtggctatgccaggggacatctgagtatgtgcccagtcatcttttttcacaggttgaagggagagaaaagattttgagttaaggtcattggctgctctactctgtcccctacctggtcacctagtgatagccccagtggagatactgtccatacaaggtcttcccagaggctggataccacagtaaaaggccaggccaggaggggtaggagactatggagatcttacctcctgataaatgtgctacaccccctaatctgagcccttcctttccgtgttccccaacaacctcatgcttacgtgatttttattcaaattaaaaattttcattgctacagaaatc

SEQ ID NO: 973 - DNA, 2760 bp, Homo Sapiens
  NM_001031665
aggtcccgcttctgtcctgcgccgattggcacagacccggaagcggatggcgtggactgaaagttgcacggcggcgtgtgcgtttcctagttgtctggtgctgctatataggggacgtggggtccccacagacctgcaggttccggcccctcttttctcaacccagagcaaattgaaacgtccgggtaacacaccgctgtgccacggttttggcgagggctgacaattgtgagctgtagaagtaccagcctaacaactgttcaagtgactcctgacctagatgggtggtttcatgcacctccagtacaactgtggctcctagcagctgtggcacaggatttccaaagactcatgttacgtgaggaagccaccaagaagagcaaagaaaaggagccagggatggctcttcctcagggacgcttgactttcagggatgtggctatagagttctctttggaggagtggaaatgcctgaaccctgcacagagggctttatacagggctgtgatgttggagaactacaggaacctggagtttgtggatagctctttaaaatccatgatggagttctcatcaaccaggcacagtattacaggagaagtgatccacacagggacgttgcaaagacataaaagtcatcacattggagatttttgcttcccagaaatgaagaaagatattcatcactttgagtttcagtggcaagaagttgaaagaaatggccatgaagcacccatgacaaaaatcaaaaagttgactggtagtacagaccgaagtgatcacaggcatgctggaaacaagcctattaaagatcagcttggattaagctttcattcgcatctgcctgaactccacatgtttcagactaaagggaaaattagtaaccaattggacaagtctatcggtgcttcctcagcttcagaatcccaaagaatttcttgtaggctcaaaactcatatttctaataagtatgggaagaatttcctccattcttcattcacacaaatacaggaaatatgcatgagagaaaaaccttgccaaagtaatgagtgtggcaaagcctttaattatagctcactcttaaggagacaccacataacccattcaagagagagagaatataaatgtgatgtatgtggcaagatctttaatcagaagcaatacattgtatatcatcatagatgtcacactggtgagaaaacttacaagtgtaatgagtgtgggaagaccttcactcagatgtcatcccttgtatgccatcgtagacttcatactggagagaaaccttacaagtgtaatgagtgtggcaagaccttcagtgagaagtcatcccttagatgccatcgtagacttcatactggagagaaaccttacaagtgtaatgagtgtggcaagacttttggtcgaaattcagcccttgtaattcataaggcaattcatactggagagaaaccttacaagtgtaatgagtgtggcaagaccttcagtcagaaatcatcccttcaatgccatcatatacttcacactggagagaaaccttacaaatgtgaagaatgtgacaatgtttacattcgcagatcacaccttgaaagacataggaagattcatactggagagggatcatacaaatgtaaggtttgtgacaaggttttccggagtgattcataccttgcagaacatcagagagttcatactggagagaaaccatacaagtgtaataaatgtggcaggagtttcagtcggaagtcatcccttcaataccatcatacacttcacactggagagaaaccttacacatgtaatgaatgtggcaaggtttttagtcgaagagaaaaccttgcacgtcatcatagacttcatgctggagagaaaccttacaaatgtgaagaatgtgacaaagttttcagtcgcagatcacaccttgaaagacataggagaattcatactggggaaaaaccatacaaatgtaaggtttgtgacaaggctttccggagtgattcatgccttgcaaaccatacgagagttcatactggagagaaaccttacaagtgtaataaatgtgcgaaggtttttaatcaaaaaggaatccttgcacaacatcagagagttcatactggagagaaaccttacaagtgtaatgaatgtggcaaggtttttaatcaaaaagcaagccttgcaaaacatcagagagttcatactgcagagaaaccttacaagtgtaatgagtgtggcaaagcctttactggacagtcaacacttattcaccatcaagcaatccatgggtgtagggaaactttacaaatgtaatgattgtcacaaagtcttcagtaatgctacaaccattgcaaatcattacagaatccatattgaagagagatctacaagtgtaataaatgtggcaaatttttcagacgtcattcataacttgtagttcatcagtgaactcatactggagagaaaccttacaaatatcatgactgtgacaaggtcttcagtcaagcttcatcctatgcaaaacatagaattcatacaggagagaaacctcacaagtgtgatgattgtggcaaagcctttacttcatgttcacacctcattagacatcagagaattcatactggacagatgccttacaaatgtaagggtggcaaggtcttcactctgtggtcattccatgcagaacatcagaaaattcatttttgagataattgttccaaataaaatgaatataaaaaatcataaaactttaaaaaaaaaaaaaaa

SEQ ID NO: 974 - DNA, 1612 bp, Homo Sapiens
  NM_001031677
accttgcggccccgccccctcgccctctagccccctcccgcgggagtcgcggcgctgcgggtaggagccgggttgcgggagaccccaggttcggttgggattcccagccagaacggagcttaagccgggcaggcgagcgaatgacggagtagcgagctgcacggcggcgtgctgcgctgttgaggacgctgtcccgcgcgctcccaggccgccccgaggcttggggtcttcgaaggataatcggcgcccggggccgaacagcgggggcacacggggcgctgccgaagtgcaaggccacggccagagctcgagcccgacgcgctgtctggagtcgtaggttggcgccgtttggggtcggggtctgaggcttgggcgctgcctgggccgagcggagatcggggtttgcctcccgtccccgctcaggaccctgacgtggctgaagcggccccgggagcatgagcgggcagcgcgtggacgtcaaggtggtgatgctgggcaaggagtacgtgggcaagactagcctggtggagcgctacgtgcacgaccgctttctggtggggccttatcagaacaccatcggggccgccttcgtggccaaggtgatgtcggtcggagaccggactgtgacattaggtatttgggacacagcaggctctgagcgctatgaggccatgagtagaatctactatcggggtgccaaggctgccatcgtctgctatgacctcacagacagcagcagctttgagcgagcaaagttctgggtgaaggaactgcgcagcctagaggagggctgccaaatctacttatgtggcaccaagagtgacctgctggaagaagaccggaggcgtcgacgtgtggacttccacgacgtccaggactatgcagacaatatcaaagctcagctctttgaaacatccagcaagacaggccagagtgtggacgagctcttccagaaagtggcagaggattacgtcagtgtggctgccttccaggtgatgacagaggacaagggcgtggatctgggccagaagccaaacccctacttctacagctgttgtcatcactgagtcagcactcacctggcctgggggaattaaaggaattccccgtaagggctggacccagctcctttctgggcttgggtagtcaaatgtctgagctaccccaggtcctcatgtcagcagagtggcgcctgcctgtgctggcccatggaacggagacagcattgggctgactgtgggcatgaggagggataaggctgatttggaccccaggcttctgccctggacagcacttgtgtctgcagattatttaagtggcttttgatctgtaaataaaatcagtgcactgtgcatcacacccagcccctttccctgctgtgtggattaggtgtcaagacacctagttcttcctggggccacccggctggcctcactgcttatattaaggctcctcccaactctcattttcctttggaaaacaagacttttttccccatggttaccgctgagatactggggctgtagtagtataaaagctcacagttccttctgagtgctgaaaagagtgcatgagttgcttcgaaataaaagggtcaagcattcctacctga

SEQ ID NO: 975 - DNA, 2489 bp, Homo Sapiens
  NM_001031684
agtctcttcagttccttccgcgtcgtttcttggctgtttccgcccagctcctttgtgccgcgcagaacaacgagatgacgcatgcgcaaagcgcagcggccgcatatataaacgcgaacccgggctcttcctcgtagtgccgccgggactcttggcgggtgaaggtgtgtgtcagcttttgcgtcactcgagccctgggcgctgcttgctaaagagccgagcacgcgggtctgtcatcatgtcgcgttacgggcggtacggaggagaaaccaaggtgtatgttggtaacctgggaactggcgctggcaaaggagagttagaaagggctttcagttattatggtcctttaagaactgtatggattgcgagaaatcctccaggatttgcctttgtggaattcgaagatcctagagatgcagaagatgcagtacgaggactggatggaaaggtgatttgtggctcccgagtgagggttgaactatcgacaggcatgcctcggagatcacgttttgatagaccacctgcccgacgtccctttgatccaaatgatagatgctatgagtgtggcgaaaagggacattatgcttatgattgtcatcgttacagccggcgaagaagaagcaggtcacggtctagatcacattctcgatccagaggaaggcgatactctcgctcacgcagcaggagcaggggacgaaggtcaaggtcagcatctcctcgacgatcaagatctatctctcttcgtagatcaagatcagcttcactcagaagatctaggtctggttctataaaaggatcgaggtatttccaatccccgtcgaggtcaagatcaagatccaggtctatttcacgaccaagaagcagccgatcaaagtccagatctccatctccaaaaagaagtcgttccccatcaggaagtcctcgcagaagtgcaagtcctgaaagaatggactgaagctctcaagttcaccctttagggaaaagttattttgtttacattattataagggatttgtgatgtctgtaaagtgtaacctaggaaagataattcaaccatctaatcaaaatggatctggattactatgtaaattcacagcagtaagataatataaattttgttgaatgtattaacatcatatggtctgaaaatgtgggtttttatttggcacatttaaataaaatgtttctaactagatttttgatttgtgttcaatattaacacttcttaatttgatatatttgagagtcagacattataattgttaaccttattcatacatacctacattcagaattgaaaggtgttggttaagtcttgaacatcactattctatgcataaaacttggccaggatcttaagggactttgaaaattccatcttacccttgtagctctgggtaagatgacctgagtcccttatgatacagcctgaatgcatcatgacagatccttaagttagctaatccgtttgaagttggtgttagtaggtattgtatgatcagtggtgaagcaagtaggaccactgatgtgtctaaatgagcatgacaggaactaaacgaaactgattaaatgtatgagaaatagaaacatttctggatgatctttatactaattgcagctttcaggctactaggtggcatagtgttaattaggactccccaagatatggggagttctactctcaatggtcttgtttctttgctttctacattagttaaccagttttataccaaaaaatgcatgtttgaggaattgtctgaaattgggacaaaacaccttcatgtaaaccagctttgcaaaattttccagcccagatactcttcatctattcaaatggattgtcttattctgagcaaagacctgttgttaatcttcaagctaggttttgcagttcccaaccacaacattcttctattttgccaggctggtgcaaagtaattaaagatgtcaatcagaaatgtcaatgagactaaagtggttttgtaaatctcagctatatttagcaacactccatgtagctaatattttttggtagcatctggtagaccttagaatgttacatagccagtaggttctttattcaaattttaagtatcttaagaatagtagggcagtaacagttacttttgagagttttctggtcaagcttttaccaggcattctctagccttggtacaaaaaaaaaaaaacctgctggttgcgcagatacctaggcttgtccattttatgcatttcagcaaagtcattggatactattgcaacttgggaatactggtctgcatcaagtttattcggtagtttgaccgctagtatgttggaagttatttggattgtttttggaattttgactggctgaattatggttggtataaagttatgtgtataactggcaggcttatttatctgttgcacttggttagctttaattgttctgtattatttaaagataagtttactcaacaataaatctgcagagattgaacaaataa

SEQ ID NO: 976 - DNA, 4670 bp, Homo Sapiens
  NM_001031685
gctggggcccgacccgggattagttggtttcggagcggaggagggagccccgaccgtcacgagcgtcgaagagacaaagccgcgtcagggggcccggccggggcgggggagcccggggcttgttggtgccccagcccgcgcggagggcccttcggacccgcgcgccgccgctgccgccgccgccgcctcgcaacaggtccgggcggcctcgctctccgctcccctcccccgcatccgcgaccctccggggcacctcagctcggccggggccgcagtctggccacccgcttccatgcggttcgggtccaagatgatgccgatgtttcttaccgtgtatctcagtaacaatgagcagcacttcacagaagttccagttactccagaaacaatatgcagagacgtggtggatctgtgcaaagaacccggcgagagtgattgccatttggctgaagtgtggtgtggctctgaacgtccagttgcggataatgagcgaatgtttgatgttcttcaacgatttggaagtcagaggaacgaagttcgcttcttccttcgtcatgaacgcccccctggcagggacattgtgagtggaccaagatctcaggatccaagtttaaaaagaaatggtgtaaaagttcctggtgaatatcgaagaaaggagaacggtgttaatagtcctaggatggatctgactcttgctgaacttcaggaaatggcatctcgccagcagcaacagattgaagcccagcaacaattgctggcaactaaggaacagcgcttaaagtttttgaaacaacaagatcagcgacaacagcaacaagttgctgagcaggagaaacttaaaaggctaaaagaaatagctgagaatcaggaagctaagctaaaaaaagtgagagcacttaaaggccacgtggaacagaagagactaagcaatgggaaacttgtggaggaaattgaacagatgaataatttgttccagcaaaaacagagggagctcgtcctggctgtgtcaaaagtagaagaactgaccaggcagctagagatgctcaagaacggcaggatcgacagccaccatgacaatcagtctgcagtggctgagcttgatcgcctctataaggagctgcagctaagaaacaaattgaatcaagagcagaatgccaagctacaacaacagagggagtgtttgaataagcgtaattcagaagtggcagtcatggataagcgtgttaatgagctgagggaccggctgtggaagaagaaggcagctctacagcaaaaagaaaatctaccagtttcatctgatggaaatcttccccagcaagccgcgtcagccccaagccgtgtggctgcagtaggtccctatatccagtcgtctactatgcctcggatgccctcaaggcctgaattgctggtgaagccagccctgccggatggttccttggtcattcaggcttcagaggggccgatgaaaatacagacactgcccaacatgagatctggggctgcttcacaaactaaaggctctaaaatccatccagttggccctgattggagtccttcaaatgcagatcttttcccaagccaaggctctgcttctgtacctcaaagcactgggaatgctctggatcaagttgatgatggagaggttccgctgagggagaaagagaagaaagtgcgtccgttctcaatgtttgatgcagtagaccagtccaatgccccaccttcctttggtactctgaggaagaaccagagcagtgaagatatcttgcgggatgctcaggttgcaaataaaaatgtggctaaagtaccacctcctgttcctacaaaaccaaaacagattaatttgccttattttggacaaactaatcagccaccttcagacattaagccagacggaagttctcagcagttgtcaacagttgttccgtccatgggaactaaaccaaaaccagcagggcagcagccgagagtgctgctatctcccagcataccttcggttggccaagaccagaccctttctccaggttctaagcaagaaagtccacctgctgctgccgtccggccctttactccccagccttccaaagacaccttacttccacccttcagaaaaccccagaccgtggcagcaagttcaatatattccatgtatacgcaacagcaggcgccaggaaaaaacttccagcaggctgtgcagagcgcgttgaccaagactcataccagagggccacacttttcaagtgtatatggtaagcctgtaattgctgctgcccagaatcaacagcagcacccagagaacatttattccaatagccagggcaagcctggcagtccagaacctgaaacagagcctgtttcttcagttcaggagaaccatgaaaacgaaagaattcctcggccactcagcccaactaaattactgcctttcttatctaatccttaccgaaaccagagtgatgctgacctagaagccttacgaaagaaactgtctaacgcaccaaggcctctaaagaaacgtagttctattacagagccagagggtcctaatgggccaaatattcagaagcttttatatcagaggaccaccatagcggccatggagaccatctctgtcccatcatacccatccaagtcagcttctgtgactgccagctcagaaagcccagtagaaatccagaatccatatttacatgtggagcccgaaaaggaggtggtctctctggttcctgaatcattgtccccagaggatgtggggaatgccagtacagagaacagtgacatgccagctccttctccaggccttgattatgagcctgagggagtcccagacaacagcccaaatctccagaataacccagaagaaccaaatccagaggctccacatgtgcttgatgtgtacctggaggagtaccctccatacccacccccaccatacccatctggggagcctgaagggcccggagaagactcggtgagcatgcgcccgcctgaaatcaccgggcaggtctctctgcctcctggtaaaaggacaaacttgcgtaaaactggctcagagcgtatcgctcatggaatgagggtgaaattcaacccccttgctttactgctagattcgtctttggagggagaatttgaccttgtacagagaattatttatgaggttgatgacccaagcctccccaatgatgaaggcatcacggctcttcacaatgctgtgtgtgcaggccacacagaaatcgttaagttcctggtacagtttggtgtaaatgtaaatgctgctgatagtgatggatggactccattacattgtgctgcctcatgtaacaacgtccaagtgtgtaagtttttggtggagtcaggagccgctgtgtttgccatgacctacagtgacatgcagactgctgcagataagtgcgaggaaatggaggaaggctacactcagtgctcccaatttctttatggagttcaggagaagatgggcataatgaataaaggagtcatttatgcgctttgggattatgaacctcagaatgatgatgagctgcccatgaaagaaggagactgcatgacaatcatccacagggaagacgaagatgaaatcgaatggtggtgggcgcgccttaatgataaggagggatatgttccacgtaacttgctgggactgtacccaagaattaaaccaagacaaaggagcttggcctgaaacttccacacagaattttagtcaatgaagaattaatctctgttaagaagaagtaatacgattatttttggcaaaaatttcacaagacttattttaatgacaatgtagcttgaaagcgatgaagaatgtctctagaagagaatgaaggattgaagaattcaccattagaggacatttagcgtgatgaaataaagcatctacgtcagcaggccatactgtgttggggcaaaggtgtcccgtgtagcactcagataagtatacagcgacaatcctgttttctacaagaatcctgtctagtaaataggatcatttattgggcagttgggaaatcagctctctgtcctgttgagtgttttcagcagctgctcctaaaccagtcctcctgccagaaaggaccagtgccgtcacatcgctgtctctgattgtccccggcaccagcaggcccttggggggctcacctgaaggctcgaaggcactgcacacttgtatattgtcagtgaagaactgttagttggttgtcagtgaacaataactttattatatgagtttttgtagcatcttaagaattatacatatgtttgaaatattgaaactaagctacggtaccagtaattagatgtagaatcttgtttgtaggctgaattttaatctgtatttattgtcttttgtatctcagaaattagaaacttgctacagacttacccgtaatatttgtcaagatcatagctgactttaaaaacagttgtaataaactttttgatgctagctgtttactggtttttgtttttgatgtcataaatagaccttgtttaatagtcacaagccgttgggatatcatacccagctgaaaaagaacaaactgcttaacataagtatatgtatcgtaataagagttttttaccagctaagtgattcaatgtaagtggtttttaaaataaaatactgtagagatcatggtgaaaaaaaaaaaaaa

SEQ ID NO: 977 - DNA, 3358 bp, Homo Sapiens
  NM_001031694
tgatagactggagtgatgttagaaaacacaaatatggtcacctatcagagtctgcatcccaatatcaagaagctgctgacatcctggatctagggttgtaaagaagattacatgagctaatggatgtgaaaacatcttaaaaactctcaaatacttttcaactttggaggattattatgattttcattctgttcagcggctatactcagactttactctaaaagtcaaatcttctgacattctttgaagtgaagcattctatgaatgtgagctgaagaaatgaatgaaatgaaataatgcagcatctagtgctttttgcatggcccaaaggggctctgtgctgctccactacagaggaaacttcaagaaatgctggtttgctacagtgttttagcttgtgagattctctgggaccttccctgctccatcatggggtcacctctaggtcattttacctgggacaaatacctaaaagaaacatgttcagtcccagcgcctgtccattgcttcaagcagtcctacacacctccaagcaacgagttcaagatcagtatgaaattggaagcacaggaccccaggaacaccacatccacctgtattgccacagtagttggactgacaggtgcccgccttcgcctgcgccttgatgggagcgacaacaaaaatgacttctggcggctggttgactcagctgaaatccagcctattgggaactgtgaaaagaatgggggtatgctacagccacctcttggatttcggctgaatgcgtcttcttggcccatgttccttttgaagacgctaaatggagcagagatggctcccatcaggattttccacaaggagccaccatcgccttcccacaacttcttcaaaatgggaatgaagctagaagctgtggacaggaagaaccctcatttcatttgcccagccactattggggaggttcggggctcagaggtgcttgtcacttttgatgggtggcgaggggcctttgactactggtgccgcttcgactcccgagacatcttccctgtgggctggtgttccttgactggagacaacctgcagcctcctggcaccaaagttgtgattccaaagaatccctatcctgcctccgatgtgaatactgagaagcccagcatccacagcagcaccaaaactgtcttggaacatcaaccagggcagagggggcgtaaaccaggaaagaagcggggccggacacccaagaccctaatttcccatcccatctctgccccatccaagacagctgaacctttgaaattcccaaagaagagaggtcccaaacctggcagcaagaggaaacctcggactttgctgaacccaccacctgcctcaccaacaaccagcactcctgaaccggataccagcactgtaccccaggatgctgccaccatccccagctcagccatgcaggccccaacagtttgtatctacttgaacaagaatggcagcacaggcccccacttagataagaagaaggtccagcaactccctgaccattttggaccagcccgtgcctctgtggtgttgcagcaggctgtccaggcctgtatcgactgtgcttatcaccagaaaaccgtcttcagcttcctcaagcaaggccatggtggtgaggttatctcagccgtgtttgaccgggaacagcataccctcaacctcccagcagtcaacagcatcacctacgtcctccgcttcctggagaaactctgccacaaccttcgtagtgacaatctgtttggcaaccagccctttacacagactcacttgtcactcactgccatagagtacagccacagccacgacaggtacctaccaggtgaaacctttgtcctggggaatagtctggcccgctccttggaaccacactcagactcaatggactctgcctcaaatcccaccaaccttgtcagcacctcccaaaggcaccggcccttgctttcatcctgtggcctcccaccaagcactgcctcagctgtgcgcaggctatgctccaggggagtgttaaaaggatcaaatgaaagaagggatatggaatcattttggaaactaaatcgttccccagggtcggaccgatacctggagagccgcgatgcctctcgactgagtggccgggacccctcctcatggacagtcgaggatgtgatgcagtttgtccgggaagctgatcctcagcttggaccccacgctgacctgtttcgcaaacacgagatcgatggcaaggccctgctgctgctgcgcagtgacatgatgatgaagtacatgggcctgaagctggggcctgcactcaagctctcctaccacattgaccggctgaagcagggcaagttctgaaccaggagaggcagcctagacaaccaagtggcagcaggtgggggcattcttctaggaatgaggggcatcagcccaccccaggcacctcagtggggttccgggccacctcaggactccaagaggctgtgtggagccaccactcctagccacagctgccatgataagtccttccatgaaggactgaggagggagagtgggggtccagggctggtgctgctcttccctcagctctgccggggctctaaggtccctctatttatttctcaaccctggctggcctctcaccaggagtttaggctgaatgccttccacgtgatggaggaaaaggccaactctgtcctggtcttgctgtggcaccccatcgccccacagctcgtaccttctcaccagattcccctgaatccaaactcgtggtgcaaacctctaccttttttacaaaaagatcttattgttaatttattgtttctggcacttgggcaaaccctgtagttaatactcctcccacactagacactgggtttcaggaggagggagactgccctgctttggtcccagagaggccctctgcagataggcgtggcccctcttcagaggacactaccctagggcactttctctttgaggtggagagacccataaagccttgaccacatcactccatatggggaggagaaggatccctgtcaccttctcctctcttcacggggcccttttgcagccctaggcctcatctgtgggaagggagtccctggcttatactgcccccaccacagctccttgccctggccagaactgctgtcgaagaaaatcaggccggaaggccaagaaggcgctaagggggatgggagggcaggttttccaggctggagtcggttccacccactcgcctgtccacaggcttccttgtaagcaagtcagcagcacagctactcacgctgccatctggacttattttatgtcaatctgtttataaataaaaaccaatatagataccaaaaaaaaaaaa

SEQ ID NO: 978 - DNA, 2200 bp, Homo Sapiens
  NM_001031696
gcatcctctcaccgccggaagctgaactgactcgtccgcggccgctctaccccaacaggccgccaccagcgagagtgcggccataaccatcacgtgaccgcccaccgacaccagcgagagtgcagtcgtaaccgtcacgtgaccgcccaccgtcggcccggcgctcccctccgcccgaagctagcaagcggcgcggccaatgagaaaggcgcatgcctggcccccgccggcctgcagtctagccgtagtgcgcctgcgcgcggctaggaggggccgtcaggcggggatacagcctggaaggtaatgcatgtccatggtacacaaattcacaagtttggagaccctgacacacccaccttctcacctgggctctgcgtatcccccagccttgagggaagatgaagcctaaactgatgtaccaggagctgaaggtgcctgcagaggagcccgccaatgagctgcccatgaatgagattgaggcgtggaaggctgcggaaaagaaagcccgctgggtcctgctggtcctcattctggcggttgtgggcttcggagccctgatgactcagctgtttctatgggaatacggcgacttgcatctctttgggcccaaccagcgcccagccccctgctatgacccttgcgaagcagtgctggtggaaagcattcctgagggcctggacttccccaatgcctccacggggaacccttccaccagccaggcctggctgggcctgctcgccggtgcgcacagcagcctggacatcgcctccttctactggaccctcaccaacaatgacacccacacgcaggagccctctgcccagcagggtgaggaggtcctccggcagctgcagaccctggcaccaaagggcgtgaacgtccgcatcgctgtgagcaagcccagcgggccccagccacaggcggacctgcaggctctgctgcagagcggtgcccaggtccgcatggtggacatgcagaagctgacccatggcgtcctgcataccaagttctgggtggtggaccagacccacttctacctgggcagtgccaacatggactggcgttcactgacccaggtcaaggagctgggcgtggtcatgtacaactgcagctgcctggctcgagacctgaccaagatctttgaggcctactggttcctgggccaggcaggcagctccatcccatcaacttggccccggttctatgacacccgctacaaccaagagacaccaatggagatctgcctcaatggaacccctgctctggcctacctggcgagtgcgcccccacccctgtgtccaagtggccgcactccagacctgaaggctctactcaacgtggtggacaatgcccggagtttcatctacgtcgctgtcatgaactacctgcccactctggagttctcccaccctcacaggttctggcctgccattgacgatgggctgcggcgggccacctacgagcgtggcgtcaaggtgcgcctgctcatcagctgctggggacactcggagccatccatgcgggccttcctgctctctctggctgccctgcgtgacaaccatacccactctgacatccaggtgaaactctttgtggtccccgcggatgaggcccaggctcgaatcccatatgcccgtgtcaaccacaacaagtacatggtgactgaacgcgccacctacatcggaacctccaactggtctggcaactacttcacggagacggcgggcacctcgctgctggtgacgcagaatgggaggggcggcctgcggagccagctggaggccattttcctgagggactgggactccccttacagccatgaccttgacacctcagctgacagcgtgggcaacgcctgccgcctgctctgaggcccgatccagtgggcaggccaaggcctgctgggcccccgcggacccaggtgctctgggtcacggtccctgtccccgcgcccccgcttctgtctgccccattgtggctcctcaggctctctcccctgctctcccacctctacctccacccccaccggcctgacgctgtggccccgggacccagcagagctgggggagggatcagcccccaaagaaatgggggtgcatgctgggcctggccccctggcccacccccactttccagggcaaaaagggcccagggttataataagtaaataacttgtctgtaaaaaaaaaaaaaaaaaaaa

SEQ ID NO: 979 - DNA, 1374 bp, Homo Sapiens
  NM_001031703
attgcgcatgcgcgcttccttgcgcgagccgggctgtcgggtgtgttttgctctccagcctccgtcgtctctgcagcactccgggttctcctccagagcgctagtcccaggagctcggaatgttcgtggaacttaataacctgcttaacaccacccccgacagggcggagcaggggaaactgactctactctgtgatgccaagacagatgggagtttccttgtacaccactttctctccttctatctcaaagctaattgtaaagtctgctttgtggcactcatccagtccttcagccactacagtatcgtgggacagaagctgggtgtcagcctgaccatggcgcgggagcgtgggcagcttgtgttccttgagggactcaagtctgcagtggacgtcgtcttccaggctcaaaaggagccacaccccctgcagtttctcagggaggctaatgctgggaacttgaaaccattgtttgagtttgtacgggaggccctgaagccagtagacagtggagaggctcggtggacgtacccggtgctgttggtggacgacctcagtgtgctcctgagcctgggcatgggggcggtggctgtgctagacttcattcactactgcagagccaccgtgtgctgggaactaaagggaaacatggtggtccttgtgcacgacagtggagatgcggaggatgaggagaatgacatcctgctgaatggcctcagtcatcagagccatctgatactgcgggctgagggcctggccactggcttctgcagggatgtgcacgggcagctgaggatcctgtggaggagaccatcgcagcccgcagtccaccgggatcagagcttcacttaccagtataagatacaggacaaaagcgtgtccttttttgccaaaggaatgtctcctgctgttctgtgacctgatttcggagcagctgaagctacataggactgtttttggacgtggaagatagagcaacatagcaagaatgggtctttctcctctgtagtaatatttcaggctggaccggcgactccactgtgaccagagggttgagtgctgcagtgatggcatgccttggctgccctgggccctgttcagaaaacacaagggaccacaatcctgcctttgctgagagagaggctggatgctagacccaagtgaaaggggtcctttggagcctttgtttaaatatgccttagccccagctgcccatttttggttgacaagcctttcagagccagagtgggtatagatgtgccagccaggagatggcaccggatggcaggtgtgcaaggtgacaactaggataatcatggctggaataaagtaagtttccacactggaaaaaaaaaaaaaaaaaaaaaaaaaa

SEQ ID NO: 980 - DNA, 1967 bp, Homo Sapiens
  NM_001031712
cgcctgcctcgcagagcttccgcttccggcccttcaggctctgtctctgtggagactgggctttgggagggagaaagagggacctagcgcgggccgcgcaggcgcacggtgggcagctgcaatggcgctgtcgtgtacccttaacaggtatctgctcctcatggcgcaggagcatctggagttccgcctgccggaaataaagtctttgcttttgctttttggaggtcagtttgccagcagtcaagaaacttatggaaagtcaccattttggattcttagcattccctctgaagatattgcaagaaatttgatgaaacggacagtgtgtgccaagtctatatttgaactatggggtcatggacaatctcctgaggagctgtacagttctcttaaaaactaccctgtggagaagatggttccatttctacattcggactctacatataaaataaagattcacacttttaataagacattgacacaagaagagaaaatcaagcgaatagatgcacttgaatttctgccatttgaaggaaaagtgaatttaaagaaaccgcaacatgtattttctgttttggaggattatggtttagacccaaactgcatccctgagaatccacataatatttattttggtagatggattgcagatggacagagagagcttattgagtcatacagtgtcaaaaagagacactttattggaaatacaagtatggatgctggtttgtcattcattatggctaaccatggaaaagtgaaagaaaatgatattgtctttgatccatttgttggaacaggtggcctgctgatagcatgtgctcattttggtgcatatgtgtatgggacagacatagactacaacacagttcatggcttgggaaaggctactaggaaaaaccagaagtggagaggaccagatgaaaacattagggccaatcttcgtcaatatggtttagagaagtattaccttgatgtcctggtttcagatgcatctaaaccttcctggaggaagggcacatattttgatgcaatcattactgatcctccatatggtatcagagaatctacaagaagaacaggttcacagaaggagataccaaaggggatagaaaaatgggaaaaatgtccagaaagccatgttcctgtttccttgagttatcatctgagtgatatgtttcttgacctgttaaacttcgcagctgagaccctcgttttaggtggaagactagtctattggttaccggtgtatacgccagaatacactgaagagatggtgccttggcacccttgcctggaactcgttagcaactgcgagcagaagctttccagtcacacatcaaggcgcttgatcacaatggaaaaggtgaagaaatttgagaatcgggaccagtattcacatctgctaagtgatcattttctgccataccaaggtcataattccttccgtgagaaatattttagtggggtaacaaaaagaattgccaaggaagaaaaatccacccaggaatgaaaattaagattttgacaatgaagaaagaataagaatttgatttaaaaagacatctggatgtgaactttcatgtatgatccagaaaataggtacggttttaaaatattttatatagaaaagctacaaagtaaattgagcaatgcttttaaagttatctttgttttatagacttttttgttgtatgtattacagtctttataatcttatttaatgtatatttgtactttcaagtactgatggagatagactcaaaacagttatttttttacaattaatctacaaagggaattaatattgttgacttttaaaacatctgctggatatattatatgcaattaatagtagttaagaatttattcatttggtagatatgtttatttggtttttggttgtcatcgatttacattgccactaataaaccatattgagaatttctaaaaaaaaaaaaaaaaaa

SEQ ID NO: 981 - DNA, 3866 bp, Homo Sapiens
  NM_001031716
cagtcgctgtttgggacgctgggtgtgcggtgttctgtctccgctcccgtttcgctgtcacagcccgttccttcccggagcccgggacaggctgggcgcgcgcccgtgtgagtgagcgggactcagggcagaagtgtcccctcactgcgtttttttttccttttatccaaagaacggggcagttagtacgcttgccttcctgtcgcccggttgggagcggggttggtgtgcggagtggttcgcctttttttctttagaacttgtgagccttttttttttttttttttttttttctttttttaggctcagtgctgtccgggctggtttgcccggtccctgactaacggctttctgccccttctctcgccacccctgcccaaggtcgcccctctgccttcgcccctgtcccgggagggtgggaagctttgaccccgccctgcccactcgcgtctccgcagccgtagccgcgcctgtcccaatatgaatagggtcaacgacccacttatttttataagagatattaagcccggactgaaaaacttaaatgtcgtctttattgtcctggagataggacgcgtgaccaaaaccaaagacggccatgaagtgagatcgtgcaaagtagcagataaaacgggcagcatcactatttccgtgtgggatgagatcggaggtcttatacagccaggggatattattcggttgaccagagggtatgcatccatgtggaaaggatgtctgacactttatactggaaggggtggtgaacttcaaaaaattggggaattttgtatggtttattcagaagtgccaaatttcagtgaacccaacccagattatcgaggacagcagaacaaaggggcacagagtgaacagaagaataattccatgaatagtaatatgggtacaggtacatttggaccagtgggaaatggtgttcacactggccctgaatcaagggaacaccagttttcacatgctggcagaagcaatggccggggacttataaatccacaactacaaggaacagctagtaatcaaacagtgatgaccacaataagtaatggcagggaccctcggagagcctttaaaagatgacctatgctaaatactcatgtgtagtttttatactacatgccctacttgaacacttattgcacttttatttattgttaactgtgaaaagtacgtcctttattgggtttccttttatattcttggtttgttaagaagaatggtttgtttttatagcaaaactgttaagctgctcgagtctcctgttgaagaatgggaacactgaaaagtaggggcatttatttttagagtaaaaagattattggatagcctttaaaaaacctgcacccatttcatgggtgagttacttaagacatcagctttatagcctctatgagtctatcttctgtataagttttgtaatatttaacataaggcttaatgggagatgttcttttgtcttgtattcagatattgccaactaaagcaataaccatcaaaaaacacaagaacttgtcaatgctagcagtaatttttgagtgtttgtggctctcggaatgattgacttcgttcagtgactactattaagattttccaaggactgactcatcccaaatttttgttgtattaccaaaaaaacagattccttatcagaatttggaatagaatgtgatctctattgcaacaagtaattttaaaagaaagctacatttattttagagtagtgctcctaacatgtattatcaactttgtggattacattggaggaaaatttaaaactggggccttgaatatttattttttgaaactaccatgttaaatactgaagtataatttgggggagttataaagttatgataaacattcatctgattattttaaacaatagttgtggtagataaacatactggaggtgagtcaaattgaattcatatagtaacatgcagtctgaagtcctagttacttaataggtactcagcctggagtgaaaatcctgggtactgactttgagaggagtgagtgtgcatgttgtcaaagtttctgaacacagttcacatagccttattagcaaaagttttaagaaatggctctatcaaagaagcaattgcagctttattcagaaatataaaagtggaatttatgtacatgtcataagtggtacccacttcccctttttactgtagggtggataactcttaggatttaactctttgaatattatctcttgaataaagcatgtgttaatgttaacaaacctacgtaatttttgccctttcaatgacttacagtggagagccagtacatcttaactactgttgtagtgatggtatcaacctcatggttacttagctctgcatttgttgctttgttttttttccacttcaaatcacaaaataagtagattttgttttctgaaaactccatagcatttgaatacaaaaagttgtgccagattgtttgccctaattcactgtgtttaacaaatatttcagtacacactatgtattaggcactgtgtggaaagtgttaaggggtagacaaaataccgaataatctccacaagtttatttgtggtctatagtacttttgtaactggggttacaaaaattatagaaatttttttcctttgttcatatgcatattcatgattataatttggctttgtttgtgattaatgttttcttaagattttcacattatagaatacctcaaaagaagttgtctaaggactgggatagagagtatgtttcataaaattgtagatgtttagaatttttaaaaaccctacaaattagtatatgattgttttatataagtaagataggagcaacactttaaattatttgtgggagaatacagcattaaaggtgattttaaaagaaaaaaatttggaattttagaaaatttaaatgctgtcaggtatggaatgctgggcttccaatcctggcctcattgtctcctcacctgtgatgttggatgagttattacacttgaaatgtctttaagccttaggttccacaagtatgaaaacaagtaagtaacagtatcctttctagacttgtttaagatttccatgtaagtaattataatgacttctgacacataataatgtcgtcttataccccaacagtaggaaaaaaatgcagaattcagtatgaaagtattgttaccctttaacacagtggtccccaacctttttggcaccagagaccagtctcctggaagacagtttttccgtgggatcgggggatggttttgggatgaaactgttccacctcaggtcatcagtcattagttagattctcataaggagcgtgcaacctcaatcccttgcatactcatttcacaatagggttcatgctcctatgagaatctaatgccaccactcatctgacaggaggtggagctcaggcagtaagtctccctcgcccgccactcacctgctgggcgttcctgttcctagcaggccagaattgatactgatctaggggttggggacccctgcttaacatgttgagattaaatggagaaagacttaagcttttacttttgtgattgacacttgcttcaataatgtaaccttgttctgtgtttttatcatttattaacaaatttcttttttcttaagggaagcctccaaaatcaaagaaaagtgagttacaatccataatgaatatttgccttaccagcctactggaacacattcatcaagaacttaagaggaagaaagttttctgccttcctccttcctagtgctctcagctatcaactttgaaataagtttaaacaacacctactgaaaacaaaaaccacttagtataaaaatatcccccaccaaaaaaaaaaaaaaaaaa

SEQ ID NO: 982 - DNA, 2406 bp, Homo Sapiens
  NM_001031717
ggcagcgacgcggtgaggagacggcccacggcgcccgcgggctggggcggtcgcttcttccttctccgtggcctacgagggtccccagcctgggtaaagatggccccatggcccccgaagggcctagtcccagctgtgctctggggcctcagcctcttcctcaacctcccaggacctatctggctccagccctctccacctccccagtcttctcccccgcctcagccccatccgtgtcatacctgccggggactggttgacagctttaacaagggcctggagagaaccatccgggacaactttggaggtggaaacactgcctgggaggaagagaatttgtccaaatacaaagacagtgagacccgcctggtagaggtgctggagggtgtgtgcagcaagtcagacttcgagtgccaccgcctgctggagctgagtgaggagctggtggagagctggtggtttcacaagcagcaggaggccccggacctcttccagtggctgtgctcagattccctgaagctctgctgccccgcaggcaccttcgggccctcctgccttccctgtcctgggggaacagagaggccctgcggtggctacgggcagtgtgaaggagaagggacacgagggggcagcgggcactgtgactgccaagccggctacgggggtgaggcctgtggccagtgtggccttggctactttgaggcagaacgcaacgccagccatctggtatgttcggcttgttttggcccctgtgcccgatgctcaggacctgaggaatcaaactgtttgcaatgcaagaagggctgggccctgcatcacctcaagtgtgtagacattgatgagtgtggcacagagggagccaactgtggagctgaccaattctgcgtgaacactgagggctcctatgagtgccgagactgtgccaaggcctgcctaggctgcatgggggcagggccaggtcgctgtaagaagtgtagccctggctatcagcaggtgggctccaagtgtctcgatgtggatgagtgtgagacagaggtgtgtccgggagagaacaagcagtgtgaaaacaccgagggcggttatcgctgcatctgtgccgagggctacaagcagatggaaggcatctgtgtgaaggagcagatcccaggtgcattccccatcttaactgatttaacccctgaaacaacccgacgctggaagttgggttctcatccccactctacatatgtaaaaatgaagatgcagagagatgaagctactttcccagggctatatggcaagcaagtcgcaaagctgggatcccaatccagacagtctgaccgtggaacgagactcatacacagtcagcaggcttcttctcagagatgacagaagacgagttggtggtgctgcagcagatgttctttggcatcatcatctgtgcactggccacgctggctgctaagggcgacttggtgttcaccgccatcttcattggggctgtggcggccatgactggctactggttgtcagagcgcagtgaccgtgtgctggagggcttcatcaagggcagataatcgcggccaccacctgtaggacctcctcccacccacgctgcccccagagcttgggctgccctcctgctggacactcaggacagcttggtttatttttgagagtggggtaagcacccctacctgccttacagagcagcccaggtacccaggcccgggcagacaaggcccctggggtaaaaagtagccctgaaggtggataccatgagctcttcacctggcggggactggcaggcttcacaatgtgtgaatttcaaaagtttttccttaatggtggctgctagagctttggcccctgcttaggattaggtggtcctcacaggggtggggccatcacagctccctcctgccagctgcatgctgccagttcctgttctgtgttcaccacatccccacaccccattgccacttatttattcatctcaggaaataaagaaaggtcttggaaagttaaaaggcatcagtcttactacctgtcccaccacccccaccttagggaaatgtcctagaatcctgggaaattgagggcttctttgatggtgagtggagaaaagatagaggagaaggttgcccctgaagtgctgttaggagaaggaggatagaggaatcagccttaggagggttccatgccagctgtcatttggcaaaggaccctggacagatgacttttgcctctgaacttcactcttctctttcctcaaatgggcttcataatgctttccactcaggcttaacatgagaattaaatgaggtgacaaatgtgaagacctggacagtacacaacagatattcaataaaagtgtggtcgccattatgaccagagcctccaagcctcaaaaaaaaaaaaaaaaaa

SEQ ID NO: 983 - DNA, 2783 bp, Homo Sapiens
  NM_001031723
gcccgggccgtcgcagccgctgccgcggtcccctgcgctcctccccgctgccgccgcacgcccccagccggtcccgcctcgcctcctccgcggcggcggcttccgcccttcttagctgcgctgccggaggaaacggaagaaggagcaagctatggaggggaacagggatgaggctgagaaatgtgtcgagatcgcccgggaggccctgaacgccggcaaccgcgagaaggcccagcgcttcctgcagaaggccgagaagctctacccactgccctcggcccgcgcactattggaaataattatgaaaaatggaagcacggctggaaatagccctcattgccgaaaaccatcaggtagtggcgatcaaagcaagcctaattgcacaaaggacagcacatctggtagtggtgaaggtggaaaaggctataccaaagaccaagtagatggagttctcagcataaacaaatgtaaaaattactatgaagtacttggagttacgaaagatgctggtgatgaagatttgaaaaaagcttatagaaagcttgctttgaagtttcatccagacaaaaaccatgcacctggagcaacagatgcttttaaaaagattggaaatgcttatgctgttttaagtaatccagaaaagcgaaaacagtatgacctcacgggcaatgaagaacaagcatgtaaccaccaaaacaatggcagatttaatttccatagaggttgtgaagctgatataactccagaagacttgtttaatatattttttgggggtggatttccttcaggtagtgtacattctttttcaaatggaagagctggttatagccaacaacatcagcatcgacatagtggacatgaaagagaagaggaaagaggagatggaggtttttctgtgtttatccagctgatgcccataattgtattgatcctcgtgtcattattaagccagttgatggtctctaatcctccttattccttatatcccagatctggaactgggcaaactattaaaatgcaaacagaaaacttgggtgttgtttattatgtcaacaaggacttcaaaaatgaatataaaggaatgttattacaaaaggtagaaaagagtgtggaggaagattatgtgactaatattcgaaataactgctggaaagaaagacaacaaaaaacagatatgcagtatgcagcaaaagtataccgtgatgatcgactccgaaggaaggcagatgccttgagcatggacaactgtaaagaattagagcggcttaccagtctttataaaggaggatgaactggaatttttatttataccttttagcgtactctttattttttctgtaagtaagtttggtttcatcatgagggatgaaggaaaagatttgatactgaaaactaaactgaatagttggttcctgaaatcttggactgtttatgacctactggctcctttaaatagtaactgaaaactaaaatggaatattttagttaacgcttctacaagtattttcattttaaaagcttacatgattcctaactaaagtgtcatgagaaaggattatcacacctgtagcaatttccagttttagtgattctccattttttcccttgtcatgtaaatatttatggaatgatcattttgtgtacatacaggttactgcttttttatttaaattcttttagtgtttagctccatgagacacttcagtttaaattgatggaataaatgttatatgacacatttacattttccttatcaaggtgtcaaatatgtggactttaaacaatgaaactttttcaaaaagaaaaaacaaaaactttaactttgtgtaaaatcttatagtattatcagcttagagggaattgatatttttaatattgccgttatattccaaaatatatattgagataaatgaactggtgtagaatatcagtttgctatttagttttatgaattactatacatatacatgcatagaaatgaaatgctatactgataaattttaaagaaaatatgaggaaatggctataaatattaaactaaaagggtcttcaacagtaaagtgcagttatgtcatttaaaattccaatactttaaaggccaccaaattttgatgtatatgtccttgaagggctgctaaaatttatgaagaggactcacattttcccccatagaaatttgcagtttcttggtgatcatttaagcaggatccaaagaagttcctttacaaataagtaataagaaaaatgagtactaaaatacagctttgtgccttttaaccctatgccaactcctaaacatataagtagattacagtatacttatctgatcagagcatgatctgtttggccacatgcaagtgtgagcagaaatagagcagcacgtagaatagtaacttaaagcaagtcatcctttaaaaattctgagctaaaatctatttaccattgagtaattgaattaatcccataggaataagctccttgtaagtaaatccatgatatgaattagaaaaaaaaaacagctggaaattgaagtttttgatgcctgtatactggatatgaaactatttgatttctagtcttctgtgtttagcagttgtaatattttaatgattttgcttcatactcggttaatggaacataaacatatctttgatacttctttgtgagtgagagaatgctagatagggtggctttgttctttgtttaagttttttttcctgaatgtagttaatttatggcatctgttgaataaaactgctaaaatgaaaaaaaaaaaaaaaaaa

SEQ ID NO: 984 - DNA, 2337 bp, Homo Sapiens
  NM_001031725
cgcggtggccccgcctccccgccgcccggaaagcgggctgcggccccctcccaaaacccggggaagtggattctactctacgctccgctccgctccgctccgcaccaccaaccccgggccgcagtcctgacgagcgggtcagggcttgtcgggcggaagcctggcctggagcctggaagggggagacggcccgagcgggagcgggagcggacgcggcctcagtcctgcgcggaatattgaaggatgtttgttccaagatctctaaaaatcaagaggaatgctaatgatgatggcaaaagttgtgtggctaagataattaaaccagacccagaagaccttcagttggacaaaagcagagatgttcccgttgatgctgtagctacagaagcagccacaatagacaggcacatcagcgaatcatgccctttccccagcccaggtggccagttggcagaggttcattcagtaagtcccgagcagggtgcgaaggacagccatccttctgaagagcccgttaagtcattttccaaaacacagcgctgggcagaaccaggggaacccatctgtgttgtctgtggtcgttatggagagtatatctgtgataagacagatgaagatgtgtgtagtttggagtgtaaagcgaaacatcttctacaagttaaggaaaaggaagagaaatcaaaactcagcaatccacagaaggctgattctgagccagagtctccactgaatgcttcctatgtctacaaagagcacccctttattttgaaccttcaggaagaccagattgaaaatcttaaacagcagctgggaattttagttcaagggcaagaagtcaccaggcccattattgactttgaacattgtagtctccctgaggtcttaaatcacaacttgaagaaatcaggctatgaggtgccaactcccattcaaatgcagatgattcctgtgggacttctgggaagagacattctggccagtgcagatactggctcaggaaaaacagctgcttttcttcttcctgttatcatgcgagctttattcgagagcaaaactccatctgcgctcattcttacaccaaccagagagttagccattcagatagagagacaagctaaagaattgatgagtggcctgccacgcatgaaaactgtgcttcttgtagggggcttacccttacccccacagctttatcgtctgcaacaacatgttaaggttatcatagcaacccctgggcgacttctggatataataaagcagagctctgtagaactctgtggtgtaaagattgtggtagtagatgaagctgataccatgttaaagatgggttttcaacaacaagtgcttgacattttggaaaacattcctaatgattgtcagaccattttggtttcagccacaattccaactagcatagaacagctagcaagccagcttctgcataatcctgtgagaattatcactggagaaaagaacctaccttgtgccaatgtacgtcagattattttgtgggtagaagacccagccaaaaagaaaaaattatttgaaattttaaatgataagaaactctttaagcctccagtgttagtatttgtggactgcaaactaggagcagatcttttgagtgaagccgttcagaaaatcacagggctgaaaagcatatctatacattcagagaagtcgcaaatagaaaggaaaaacatattgaagggattacttgaaggagactatgaagttgtagtgagcacaggagtcttgggacgaggcctagacttgatcagtgtcaggctggttgtcaattttgatatgccttcaagtatggatgagtatgtccatcagattggaagagtaggaagattaggtcaaaatggaacagcgattactttcatcaataataattcaaaaagactcttctgggatattgcaaaacgagtaaagcccacaggatccattcttccccctcagttattaaattccccataccttcatgaccagaagagaaaggaacaacagaaagataaacagacacagaatgatctggttacaggagctaatcttatggatattatcagaaaacatgataaaagtaattctcagaaatgattttctctgccacttgaatatttttttttattgtatatagtcagcaaaaaattatggtttgcataaatggaaatgtacatgaattttaaaaattttaagatatttttaatttaataaaatttatataactatattgtatttatttcccttaattcttataaattaaaaacatcagaaaatgaattattaaataaaagacagtgttttcttttctggaaaaaaaaaaaaaaaaaa

SEQ ID NO: 985 - DNA, 4431 bp, Homo Sapiens
  NM_001031726
caagagcaggcctggagacccgggagtgccttggggagagggtccccgccctgccgggagcccggccctcccggtgccggggtggacactgttagtgtagtcattgtccctatggagaaactgaggcatggagaggctgaagtcacacaagcccgccacgatgactatcatggtggaggacatcatgaagctgctgtgctccctttctggggagaggaagatgaaggcggctgtcaagcactctgggaagggtgccctggtcacaggggccatggccttcgtcgggggtttggtgggcggcccaccgggactcgccgttgggggggctgtcggggggctgttaggtgcctggatgacaagtggacagtttaagccggttcctcagatcctaatggagctgccccctgccgagcaacagaggctctttaacgaagccgcagccatcatcaggcacctggagtggacggacgccgtgcagctgaccgcgctggtcatgggcagcgaggccctgcagcagcagctgctggccatgctggtgaactacgtcaccaaggagctgcgggccgagatccagtatgatgactaggccgcacctccggggaggtggggggcccctttaaatgactctgtgattctgaagaggtggcttgggagttgggagaagcccagcggatgccccctggggaatctccacatcatcagtgtattactagtaatgtcccgctggagaggccaccgctgtgcagtgtcatgttccagaaattactgatgaagcagcatgtgttggtggcatgtgcactggcctgccatgacagccctctgactggccccccagtgaagagtaaaggcctgcctgccgcaggcttcggaggcgtctgctgagtcctctcacccgcatgggtctggggaagtgatcacgctcagccgacggtctgaccacacttcatcctccccccggggccttctcatcttgggagatgactcctcttcagagcacctgctgcaggactggatcccacccccctgcaggtcctggggtctcagggccttggagcagcccatgctggaatcatgtttacctcctagtgcaaccgtcccctacccagggactgtcgaatggccccacggaggggacgggcggcctgctgagtgaagccacaaataccgagtggacttgaccccggcccccactaggctgcacacctagactcgccctgccagggcctcgctcttcccatctgaaaagtcctggtagttcttgaggtttacttctcaaatgaaatatttttagtaaaaagtacaggtatatctcggagatattgtgggttcagttccagaccacctcggtaaagccaacatcacaataaagcaaggaagcgcattgttttagtttcccagtgcatctaagtcatgtttactgcatattgcagtccactaaatgtgcaatagcattatgtctaacaaatgtacaaaccttaatttaaaaatatttactgttcaaaatgctgacacagaaacgcaaagtgagcacatgctgttggaaaatggtgccaaatagacttgcctgatgccaggctgctacaaaccttcaatttaaaaaaaaaacacagtattcacaaagcatagtagaatgaggtatgcctgtattgctctttctgaagtggtgtgatataaaccatctctaagaaatgtttctaccctaaagatttccccagtacagtcagctctccgtaactgtggtctccacatttagatccaaccagccttggataggaaatatttgaaaaaagaaattgcattggtactgaacacgtacagacctttttttcttgccattattccctaaacaatatggtgtagcatatttacatagcatttatattgtatttggtattataagaaatctagagatgatttaaattatacaggaaggtgtgcgtaggttacgtgcaaacgctatgccattgcccatcagggacttgagcatcctcagatgtcggtgtctgagggttgaggttgcagtcctggaacccatcccccatggatactgaggcatagctgtactgtgtgttttcactttgctttcagaactacgacttgaatgtgatcgattacaataaatgtttttctaaaaagccattttcccacatattatgtgtaaaatatctctaatattcaaagtcttacaaatggaacaagagggaaggtaccagatttgtggctttaaagaatgcaagagtaggtcaggtgaggtggctcatgcttgtaatgtcggcacttttggaggccaaagtgggaggatcgcttgaggccaagagtttgaaactagcctgggcaatatagtgagacctccatctctacaaaaaatgttattccttggtccccaggtcctggggcagggcagggacttggggctctcctctcaggccctggaggctcggagggaggcacttctgctgaggccctgcttataggaaagctcagtatcctggcacctccatgtgtgtaaggacgtcagggtgaattataacccatggtgattaaggaagggccgagcctttctcttgcagagcgattgctcttctgctggcctcgtctagcacaaatcaggtgccctagcacaggccacactcctggagttaatgaagccactttaatcatttatatgccacttaagttgatgggggacagggcaggggtgggaaggaggggttgtctgtctgtgaaaactgagtgtggcttttcttgttgaactgatcattcctgctcttcctgcaaataagtcctgcatacggaccctggaactaaaaatggaaaatcagagcatgccccctcccaattttgtatagctttagtgggctctaaagttgcccgtttttagtgtgaaggaaaaaacgttgatttgcagatatcgtgagaatgaaacctcaacaaagatgtttggttcagtgcttcaaagttgggggacactttttccatgttgaacaaatgccaacttctccggttgcttacagcaaatccttctggaacaatcggggctgaaattgagttgcctttgttaggcgattgggccccattcattcttactcgtgcatcaggtcctggtctgtgtcaggcccaggggacacaggtggtcccagctcagaggcccagtgtccactgcagcccctcccacagcctgcccacccctactgcagggaaaaatgcccagggaggagatggtccaactcctgatcagttttgtgtccgatggagcaggccttgctgagtgaagacactggaactagctgggtcctggggtgacttggaggctttgggcctaaaagggcagcctgaacctggagtcttatctcccccaggagccgaaagcacttttcttgatttcccccaggaaatcaagcgctgcttctcagctcctgtggttttagtatttatatatctgtatcttctttgtagaaatttatttatttttgaataagtaatacctgcctggtacaaaatttaaaaggtacgggagggcgcaagctgcaagggaaggcctgctcctatgccgaccccagaggcagccactgttaccaatttcatgtgtattcctttaactctgttttaaagtaagtctctgaaaactgttcatttccttttgtcagtatttgttgctgaaaacctagaaaaacccagaaaatataatgaaataaaaactacaaatttcacaacccagaaaactgctggtaacagatttggtgtctttcctgcaattgttttaatgctatgtaggtacacatatatttttttctttttttcttttttttttttttgagatggagtctcgcactgtcgcccgggctggagtgcagtagcgcgatcttggttcactgcaagctctgcctcctgggttcaagccattctcctgcctcagcctcccgagtagctttgactacagtcgcccgccaccatgcccggctaatttttatttttttattttttttttatttttagtagagacggggtttcaccatgttagccaggatggtctcaatctccttacctcgtgatctgcccacctcagcctcccaaagtgctgggattacaggcgtgagccactgcgcccggcctatgtatgtatatttctaacgtacttgccttcttatcctatatgcccctttgaacacctgtatcaatgaatgttaaataatatttttgatgtaatttaaaattccttgtaaatatttgtaatggctgcataatattccactgtgcctaaccatgtgcctggtgtgaattccatttgtggatttttactactgtaatgctgaagtattacagtaatactgtgttaatattctctttattgaattctggtatatagtctttgggattcattcctcaaagtgaaattgctggatttaaaagtaaaaaaaaaaaaaaaaaaaa

SEQ ID NO: 986 - DNA, 3177 bp, Homo Sapiens
  NM_001031727
ccccgctcccaagtgcgcgcggacccctagctccctctgagttgcgctgggcttggctgctgcaccatgaccctggaggcgatccgctactcgcggggctccctgcagatcctagaccagctgctgctgcccaagcagagccgctacgaggcggtgggctcggtgcaccaggcctgggaggccatccgcgccatgaaggtgcggggcgccccggccatagccctggtgggctgtctcagcctcgccgtggagctgcaggcgggcgccgggggaccgggactcgccgcgctcgtggccttcgtgcgcgacaagctgagcttcctcgtcaccgcccggcccaccgctgtcaacatggcccgcgccgcccgcgacctggctgatgttgcagcccgggaggccgaacgggagggcgctacggaagaggcggtccgggagagagtgatctgctgcaccgaggacatgctggagaaagacctcagagacaaccgaagcattggggacctaggagcccgccacctcctggagcgggtggcccccagcggtggcaaggtgactgtgctgacccactgtaacactggtgctctggccaccgctggctatggtacagccctaggtgtgattcgctcactgcacagcctgggccgcctggagcatgccttctgcacagagacccggccctacaaccagggagcccggctgacggcctttgagctggtctatgagcagatccccgccacccttatcaccgacagcatggtggctgctgccatggcccataggggcgtgtcagctgtggtcgtgggagctgaccgcgtggttgccaacggcgacacagccaacaaggtgggcacctaccagctggccattgtcgccaagcaccatggcattcccttctacgtggctgcccccagctcttcatgtgacctccgtctggagaccggcaaggagatcattattgaagagcgaccgggccaggagctgaccgatgttaatggggtccggattgcagcacctgggattggagtttggaatcctgccttcgatgtcaccccccacgacctcatcactggtggcatcatcacagaactgggggtctttgcccctgaggagctccggacagccctaaccaccaccatctcttccagggatggaaccctagatggaccccagatgtaaccaactcagctctccctagcctgcctctctaggtttttcaatacatttcttgaatggctacccaaaagctgaccgtccagcccctgaccacacttgttcctagtgcagggagctcagacagggccttccatctagagcccagcacctagagccaggctgcccagattcaaatcctgactccgccacttttcccactgtatgatcttgggcaagtcacttcacctctctgtgccttggtttcctcatttataaaatgtggataacaggccgggcgcagtggctcacacctgtaatcccagcactttgggaggccgaggcaggtggatcacaagatcaggagattgagaccatcctggctaacatggtgaaaccccatctctactaaaaatacaaaaaattagccgggtgtggtggtgggcacctgcagtcccagctacttgggaggctgaggcaggagaatggcgtgaaactgggaggcagagcttgcagtgagccgagatagcgccactgcactccagcctgggcaacagagcgagactccgtctcaaaaataaatataattaattaattatttaattaaaaaaataaaaaataaatgtggataatactagtacctccctcttaaggtcagggctggagctagggtgacatctccagggcagaattttaagaggacaccaaaaaagctcagcaaccaagataaaaaatattttaaagcaatattttgttttgggttttttttttttgagatcaagtatcactcgttacccaggctggaatgtagaggcgagatctcagctcactgaaacctgtgcctccccggttcaagcgattctcctgccacagcctcctgagtagctgggattacaggcatgcgccaccatgcccagctaatttttctatttttagtagagacatgatttcaccatgttggccaggctggtctcgaactcctgactcaaatgatccccctgcctcagcctcccaaagtgctgggactacaggcatgagccactgtgcctgaccttacagcagtattttttaaaaatcaaaattaatgcaaaaatccatgatgaggccaggcttggtggctcatgcctgtaattccagcactttgggaggatcccttgagcccaggtgtttgagaccagtttgggtaacataggaagagcttgtctctacaaacaaaaatttaaaaacaatgagctgggcatggaactcacacctctagccccagctactcaggctgaagtgggaggatggcttgagcccaggagttcaaggatgcagtgtgctttgattgcactactgcacttcaccctaagcaacagagtgagaccccatctctttaaaaaaaaaaaaaaatccatgatgaacaaaacaagtatttgtttgagacggggtctcgctctgtcgcccaggctggagtacagtggtgccatctcagctcactgcaacctccgccttctgggttcaagcgactctcctgcctcagcctcccgagtagctgggattacaggagcctggcactatgcctggctaatttttgtatttttattggagacaccatgttagtcgtggctggtctccaactcctgacctcgggtgatccgcgccccgcggcctccgaaagtgctgggattacaagcgtgagccaccgtgcccggcctaaataaaattttgaagaggctagaaccccgcacttgtgccttgagcttactgacctcaacaccctggttccactaaaactttatttacaaaattatgctgccggtctgcaggatgtagtttaacaatttgattattttggatattaaaatattttttaagtcttgaaaatattgtttactattaccaaagtttttgaaccttcttaaattctgtaccagaggtgagtgccacaccctaacctagtctgagtttttatgtgtaaagatcataaaacgttgtaagttttctaaaacacataagctctcaataaacgttagcttatcattgtca

SEQ ID NO: 987 - DNA, 4514 bp, Homo Sapiens
  NM_001031733
ggggctgagggtggagagaggaagggaaggaagaaaaggggagccttcctggccagggtaaccggcactaagaggcctcactccaagcccccgaggagcctgtggtggggctggagacccggctcaggcccctccaccacccttaaagtcctcagaaggtgggaactgaactggcacaggatgggaaccggctgtgcgctggccacttgattttgccagctgccctgtaattcagctggtgaggaaactgaggcacagactgaggtagaatgattcgccagtcactcagcaagtcagcagacggggaggactgaatcccagcctgagagcaccgaagcttgtatccctgcaataccgagccccaagcctgcgagccccggtgcccatctctgagttaggccgtcttggaagggttcccttcctcctacaagatggtgtgtgaggagccttcaatacgacccggggtgtaaagtgtccaactctagtaggggcctgatggcatccccgccgagtcccaggagagagagagaagaccccttcctggagtccagggctcccgggaagaaacactggcatttgtccctttgcttcggcttctggaggcagagactctgagcccagggagagccttctgcagccccatttcctcaaaaatccaacctgcccaggtggcgggtcatgagctgtgctcaggaagctggaatctgaccctggtggcgtcgggcccagtctccatggcagccgagcatttattacccgggcctccacccagcttggcagactttagacttgaggctggaggaaagggaactgaacgcggttctgggagcagcaagcccacgggtagcagccgaggccccagaatggccaagtttctttcccaagaccaaattaatgacggaaatggagagctggatttctccacttttctgaccattatgcacatgcaaataaaacaagaagacccaaagaaagaaattcttctagccatgttgatggtggacaaggagaagaaaggttacgtcatggcgtccgacctgcggtcaaaactcacgagtctgggggagaagctcacccacaaggaagtggatgatctcttcagggaagcagatatcgaacccaatggcaaagtgaagtatgatgaatttatccacaagatcacccttcctggacgggactattgaaggaggagaatgggagagcctcccctgggcctgaaaacttggagcaattaattttttttaaaaagtgttcttttcacttgggagagatggcaaacacagtggcaagacaacattacccaactatagaagagaggctaactagcaacaataatagatgatttcagccatggtatgagtagatctttaataaaagatttgtattgattttattaactaccgtgagtccggccctttcaagcatggaaggagcctgcggtttggagtctggcctgggttccagtcctggctctgctgcttcccactgtgactttgggcaaatcatttcactcctcaaagcccccccacacaagctggattcccacttcttacctcatggagcctgttgaggaaggattgagctgatgacttaagggcaatctaccaagagacttattctgtatttgggggctagaaccatcttccatatttccaagattttccaagatgaagccagtgctagctgagaagcagcaatgaacagaaagctgtaacacttatgacaacaattcttgcagtgccagaggcccatttacaaattctcatttccatctcaacagatatagtgacatagctcaggctattcattcataaacacagagtgtagagtgaaaacactagagtgaaaacacatgctacaatgaggcagcatcagctgagagcaggaagagcgatctactttacaccccacaccaaaggaaaccagatgtgagctgctaaattgactggccttgcagagctcaagaagggggcttccaatgctgtgagaattccgagctgttccctgggctctgttaacaggcagagaggttccgggatggtctgctcaagtggcccacactggtcattgccttaagccacctccccaggacttacggagagaaataaggggatgtaaccagcaatggccagggtacaacagccctggaaaacagtagtaggagcactaggctttctgggagtccatccagctggagtggctttgagtgagttacacagctagaaggtgccaggttggtgctgccagagattcagaggtgccatacacttgtcaaatctggatcattcgtagtgccagcacagtcctaaaagggctggagtaccacaccaacacaggtaggggtgcagggcttcaagtacaaagatttgcatccatgtatgtatcaaaagtgggttctctgggctgtggctttgtctagtagtaccacagtggctaaagtagaagaaaaccaaatcaaatgggatgtgtcttttgggaggatgtacaagacacaaatctttcactaggcaccgggcacagggaaaactgcagggaacaagagttgtagtgttagtgcaactgtctcaacgatgctgtgtggcttcagacccaaacaaggccctgaggaaggagactctcatttccccaagcataactgcaaggagaggaggaattcctaggagccaaagagttttgtggggtgagggtaaataaatggcccaaatgccaactaggtgaagttgtgaccatctggctgggaagcccaggtccacacagtgtaggagcagatgttttgtggggtctgaggtttacgagatttggctgccttaagaatacaaaaacagaaatgcagaatttctggggctgctcctaggaccagaacaagtgaagggtcctggtgcttaaacttcattaccttcatggtaaatccaccagagggccggttagatgctggccccgccgagagaactgctgtcactttcaggcaaagctcaaaggtcctaggcccacagttcttttgagctccagtcatggacattaggaagtaaatcctgcacagccaacctggaataccaaagattagatgggagatagataccaatgatttagatggcacaggaagagcaagttctggatataataaatgagggtactttccgtcaaagcttttctatgtctatatttatcactgaatagtcccagtatggttttaaagcaagttttatgaatctcatttgcctaacaggaatctgaaatataacttgccaaaaacacacagttggtgtggaatggtcattagaacctggggctcctcttcacggactccctgctcattaagggattcagtggtccagagtctaagatcctattaagtgtttgattcaaacctctacccgaggaagggctgttaccttactcctggtcctggtttcaagctcattcctgaaattccagctggtttctctagcacctagtgttgtttacaagaaggccacggtgctcttagcattcaaactgcagatactaaacagatgctgtgatttattaaagagttagccatatttcaacaagaaagggaaatgatggctatattcattacttacctcaaagcatgctgcaagaaaattagttagttacttgtcatgctttgaaatctctggatgaaaggtgctttggaagcacaaaccattatcacttgtctcatagggattgtccccttgaacatccagcagtgttattttacagaagacaaattaactgaaggcttttcttttattacatctaaagagctctacataaacaggtaacattcaataggtaaacaatttttttccaatgcatgtaataaatattttcacttggtacttttatacaaactgacattgtctactatacatttttaaaagccattttactggtttggcatgcggtatggaaattctaagagagaaagttttaaggcaatgaatcacagatttaagttcatggaatttatggtaactttatctgtttatgtacattttcccctttgttaaacaattaacagcagcacactctgggaccaccagctattttccctctctttctgaaatctaagctttgtatttaattaaaaaacagaattcaacatctattgataaaacaaaattcttactaaaataatttcaaatgtgctttaaaaagtcctgaagatcttgaaagttttatgtgtttaaaattgaaattgtctaaaaaaatgctctttccacattaatttagttaggatatattttcactccatttcagacacttgactcaaaggaaaatctgccaaagaatccgatttttcagagcttacgtgaatctttcctcagtaaagatacagaattgtgatcatgtctaaataattagtaaagcaattttaatgctcaaaatagtcaaccaagtatggcatggttctggttcagattttttttttttaagatgtatccaataacactcacgaagtaattaaaagccactttaaccctgctaaaaaaaaaaaaaaaaaaaaa

SEQ ID NO: 988 - DNA, 852 bp, Homo Sapiens
  NM_001031734
gagtcacgtgatgcatgtcatggccgcctccatggcccggggaggcgtgagtgccagggttctactgcaggctgccaggggcacctggtggaacagacctgggggcacttccgggtcgggggagggggtggcgctggggacaaccagaaagtttcaagcgacaggctcgcgcccggctggagaggaggacgcgggcggcccggagcggcccggggacgtggtgaacgtggtgttcgtagaccgctcaggccagcggatcccagtgagtggcagagtcggggacaatgttcttcacctggcccagcgccacggggtggacctggaaggggcctgtgaagcctccctggcctgctccacctgccatgtgtatgtgagtgaagaccacctggatctcctgcctcctcccgaggagagggaagacgacatgctagacatggcccccctcctccaggagaactcgcggctgggctgccagattgtgctgacaccggagctggaaggagcggaattcaccctgcccaagatcaccaggaacttctacgtggatggccatgtccccaagccccactgacatgaacacctggaccattccacattgccatggccccagggcccagattgagggaatagccaggtgccagccctgcccagagtgcggacaggcccgggagagacgtggaagcccctgtgaaggacaacacccctgcttgggagagagtcccatgtccaggctctggtggggacagggcccctagtggggtggccttccccaggcccctgagaatcagggtttgagtaggagtggactcatattggagctgcaataaatcgataacacaggcaaaaaaaaaa

SEQ ID NO: 989 - DNA, 1556 bp, Homo Sapiens
  NM_001031738
taaacctttcagggctgctccgagggccgcagctagagtcggcgccacgagggggccgagcagggtgcggcggcggcggggcgctccggggaggccaggacagctgatggttgtggcagaaacatctcaaggtagctggtccgcccccacttccccatctacctcttgtcctccccccaacaccaccaccaccctggctcccctccctcatgaccgcctggatcctcctgcctgtcagcctgtcagcgttctccatcactggcatatggactgtgtatgccatggctgtgatgaaccaccatgtatgccctgtggagaactggtcctacaacgagtcctgccctcctgaccctgctgagcaagggggtcccaagacctgctgcaccctggacgatgtccccctcatcagcaagtgtggctcctatcccccagaaagctgcctcttcagcctcattggcaacatgggtgctttcatggtggccctgatctgcctcctgcgctacgggcagctcctggagcagagtcggcactcttgggttaacaccacggcactcatcacaggctgcaccaacgctgcgggcctcttggtggttggcaactttcaggtggatcatgccaggtctctgcactacgttggagctggcgtggccttccctgcggggctgctctttgtttgcctgcactgtgctctctcctaccaaggggccaccgccccgctggacctggctgtggcctatctgcgaagtgtgctggctgtcatcgcctttatcaccctggtcctcagtggagtcttctttgtccatgagagttctcagctgcaacatggggcagccctgtgtgagtgggtgtgtgtcatcgatatcctcattttctatggcaccttcagctacgagtttggggcagtctcctcagacacactggtggctgcactgcagcctacccctggccgggcctgcaagtcctccgggagcagcagcacctccacccacctcaactgtgcccccgagagcatcgctatgatctaaggtctggggagggtggctggcccggcctccacagcaccccaccccatatcttctttccatttatttcgtaccaaaaacaattttgagaaagtattctgttgggatctgggcttcctcacttctggagaagtggccatcccatgcccacctgtgccatggaggagtgggccctgccagctgccacagctgcatgacctgcttccccaccccacggtgtcgttttgtttttaaaggtcacctgtcctcactcacccagccagcccttcaggtgccttctactcccagtgccaaagccagaccactggggtttcctgctgcaggaattgggggctgggaacagcagaggggatagaagtctggtggaggtggagtgggcacgccttagcctacggaaaggcccatttctgggcccactgagctgcactgggattcttcactctgcccctcacttcctttagggcaaataacacagcagaaccacgtgggtattttagtacttttttttatattaaaagaattctaatttgcaaa

SEQ ID NO: 990 - DNA, 1418 bp, Homo Sapiens
  NM_001031744
gcggcccgaaatcgtaggacttccgaaagcagcggcggcgtttgcttcactgcttggaagtgtgagtgcgcgaagatgcgaaaggtggttttgattaccggggctagcagtggcattggcctggccctctgcaagcggctgctggcggaagatgatgagcttcatctgtgtttggcgtgcaggaatatgagcaaggcagaagctgtctgtgctgctctgctggcctctcaccccactgctgaggtcaccattgtccaggtggatgtcagcaacctgcagtcattcttccgggcctccaaggaacttaagcaaagttgcaggtttcagagattagaccgtatatatctaaatgctgggatcatgcctaatccacaactaaatatcaaagcacttctctttggcctcttttcaagaaaagtgattcatatgttctccacagctgaaggcctgctgacccagggtgataagatcactgctgatggacttcaggaggtgtttgagaccgatgtctttggccattttatcctgattcgggaactggagcctctcctctgtcacagtgacaatccatctcagctcatctggacatcatctcgcaatgcaaggaaatctaatttcagcctcgaggacttccagcacagcaaaggcaaggaaccctacagctcttccaaatatgccactgaccttttgagtgtggctttgaacaggaactttcaaccagcagcttcgcttttttgcaaatgcattcactttgacaccatataatggaacagaagctctggtatggcttttccaccaaaagcctgaatctgtcaatcctctgatcaaatatctgagtgccaccactggctttggaagaaattacattatgacccagaagatggacctagatgaagacactgctgaaaaattttatcaaaagttactggaactggaaaagcacattagggtcactattcaaaaaacagataatcaggccaggctcagtggctcatgcctataattccagcactttgggaggccaaggcagaaggatcacttgagaccaggagttcgagaccagcctgagaaacatagtgagcccttgtctctacaaaaagaaataaaaataatagctgggtgtggtggcatgcgcatgtagtcccaactactcaggaggatgaggtggggggatctcttgaggctgggaggcggaggttgcagtgagctgagattgtgccactgcactccagcctgggtgacagcgagaccctgtctcaaaacatatatatatttaatatatatgtaaagccagagctgacaatgacactctggaacattgcataccttctgtacattctggggtacatggatttctactgagttggataatatgcatttgtaataaactatgaactatgaaaaaaaaaaaaaaaaaa

SEQ ID NO: 991 - DNA, 2914 bp, Homo Sapiens
  NM_001031801
tgacagcagcgcttctttcttagctagtcaccggcccctgctcaagaatgccagtgtgtgtgtagcctccacagagaggtcgttttctcggagtccagaggggccgcctgagcttctgagaactagggaggagccatcccagccatgagcccctgtgggaatctgctgggggccaagtggcctggagtcctcaggctcccgcagctgctccggagggagaggtgagctcagggcagcctgcctgcagccagaggtgccgggagccccgggcctgtcatggtggccatctacagccggcctgaggcagtcacagacggatttgcagctgagcctgtctatctggtgtgggaagaagatggggagttacttgtcagtcccggcttacttcacctccagagacctgtttcggtgttcagaatgccaggattccctcaccaactggtactatgagaaggatgggaagctctactgccccaaggactactgggggaagtttggggagttctgtcatgggtgctccctgctgatgacagggccttttatggtggctggggagttcaagtaccacccagagtgctttgcctgtatgagctgcaaggtgatcattgaggatggggatgcatatgcactggtgcagcatgccaccctctactgtgggaagtgccacaatgaggtggtgctggcacccatgtttgagagactctccacagagtctgttcaggagcagctgccctactctgtcacgctcatctccatgccggccaccactgaaggcaggcggggcttctccgtgtccgtggagagtgcctgctccaactacgccaccactgtgcaagtgaaagaggtcaaccggatgcacatcagtcccaacaatcgaaacgccatccaccctggggaccgcatcctggagatcaatgggacccccgtccgcacacttcgagtggaggaggtggaggatgcaattagccagacgagccagacacttcagctgttgattgaacatgaccccgtctcccaacgcctggaccagctgcggctggaggcccggctcgctcctcacatgcagaatgccggacacccccacgccctcagcaccctggacaccaaggagaatctggaggggacactgaggagacgttccctaaggcgcagtaacagtatctccaagtcccctggccccagctccccaaaggagcccctgctgttcagccgtgacatcagccgctcagaatcccttcgttgttccagcagctattcacagcagatcttccggccctgtgacctaatccatggggaggtcctggggaagggcttctttgggcaggctatcaaggtgacacacaaagccacgggcaaagtgatggtcatgaaagagttaattcgatgtgatgaggagacccagaaaacttttctgactgaggtgaaagtgatgcgcagcctggaccaccccaatgtgctcaagttcattggtgtgctgtacaaggataagaagctgaacctcctgacagagtacattgaggggggcacactgaaggactttctgcgcagtatggatccgttcccctggcagcagaaggtcaggtttgccaaaggaatcgcctccggaatggcctatttgcactctatgtgcatcatccaccgggatctgaactcgcacaactgcctcatcaagttggacaagactgtggtggtggcagactttgggctgtcacggctcatagtggaagagaggaaaagggcccccatggagaaggccaccaccaagaaacgcaccttgcgcaagaacgaccgcaagaagcgctacacggtggtgggaaacccctactggatggcccctgagatgctgaacggaaagagctatgatgagacggtggatatcttctcctttgggatcgttctctgtgagatcattgggcaggtgtatgcagatcctgactgccttccccgaacactggactttggcctcaacgtgaagcttttctgggagaagtttgttcccacagattgtcccccggccttcttcccgctggccgccatctgctgcagactggagcctgagagcagagccccccccggggccgcaggagagggcccgggctgcgcggatgatgagggcccagtgaggcgccaagggaaggtcaccatcaagtatgaccccaaggagctacggaagcacctcaacctagaggagtggatcctggagcagctcacgcgcctctacgactgccaggaagaggagatctcagaactagagattgacgtggatgagctcctggacatggagagtgacgatgcctgggcttccagggtcaaggagctgctggttgactgttacaaacccacagaggccttcatctctggcctgctggacaagatccgggccatgcagaagctgagcacaccccagaagaagtgagggtccccgacccaggcgaacggtggctcccataggacaatcgctaccccccgacctcgtagcaacagcaataccgggggaccctgcggccaggcctggttccatgagcagggctcctcgtgcccctggcccaggggtctcttcccctgccccctcagttttccacttttggatttttttattgttattaaactgatgggactttgtgtttttatattgactctgcggcacgggccctttaataaagcgaggtagggtacgcctttggtgcagctcaaaaaaaaaaaaaaaaatgatttccagcggtccacattagagttgaaattttctggtgggagaatctataccttgttcctttataggccaaggaccgcagtccttcagtaacaccagtgtaaaagcttgaggagaaattgtgaagctacacagtatttgttttctaatacctcttgtcattctaaatatctttaatttattaaaaaatatatatatacagta

SEQ ID NO: 992 - DNA, 6887 bp, Homo Sapiens
  NM_001031804
gaggctttaaaatcttttttcatcttctagctgtagctcgggctgcttgtcggcttggcctccccctcccccctttgctctctgcctcgtctttccccaggacttcgctattttgcttttttaaaaaaaggcaagaaagaactaaactcccccctccctctcctccagtcgggctgcacctctgccttgcactttgcacagaggtagagagcgcgcgagggagagagaggaaagaaaaaaaataataaagagagccaagcagaagaggaggcgagaagcatgaagtgttaactcccccgtgccaaggcccgcgccgcccggacagacgcccgccgcgcctccagccccgagcggacgccgcgcgcgccctgcctgcagcccgggccggcgaggcgagcccttccttatgcaaagcgcgcagcggagcggcgagcgggggacgccgcgcaccgggccgggctcctccagcttcgccgccgcagccaccaccgccgccaccgcagctcgcggaggatcttcccgagcctgaagccgccggctcggcgcgcaaggaggcgagcgagcaaggaggggccggggcgagcgagggagcacattggcgtgagcaggggggagggagggcgggcgcggggggcgcgggcagggcgggggggtgtgtgtgtgagcgcgctcggaggtttcgggccagccaccgccgcgcaagctagaagcgccccagcccggcaagctggctcacccgctggccacccagcacagcccgctggcccctctcctgcagcccatctggcggagcggcggcggcggcggcggcggcggcaggagaatggcatcagaactggcaatgagcaactccgacctgcccaccagtcccctggccatggaatatgttaatgacttcgatctgatgaagtttgaagtgaaaaaggaaccggtggagaccgaccgcatcatcagccagtgcggccgtctcatcgccgggggctcgctgtcctccacccccatgagcacgccgtgcagctcggtgcccccttcccccagcttctcggcgcccagcccgggctcgggcagcgagcagaaggcgcacctggaagactactactggatgaccggctacccgcagcagctgaaccccgaggcgctgggcttcagccccgaggacgcggtcgaggcgctcatcagcaacagccaccagctccagggcggcttcgatggctacgcgcgcggggcgcagcagctggccgcggcggccggggccggtgccggcgcctccttgggcggcagcggcgaggagatgggccccgccgccgccgtggtgtccgccgtgatcgccgcggccgccgcgcagagcggcgcgggcccgcactaccaccaccaccaccaccacgccgccggccaccaccaccacccgacggccggcgcgcccggcgccgcgggcagcgcggccgcctcggccggtggcgctgggggcgcgggcggcggtggcccggccagcgctgggggcggcggcggcggcggcggcggcggaggcggcgggggcgcggcgggggcggggggcgccctgcacccgcaccacgccgccggcggcctgcacttcgacgaccgcttctccgacgagcagctggtgaccatgtctgtgcgcgagctgaaccggcagctgcgcggggtcagcaaggaggaggtgatccggctgaagcagaagaggcggaccctgaaaaaccgcggctatgcccagtcctgccgcttcaagagggtgcagcagagacacgtcctggagtcggagaagaaccagctgctgcagcaagtcgaccacctcaagcaggagatctccaggctggtgcgcgagagggacgcgtacaaggagaaatacgagaagttggtgagcagcggcttccgagaaaacggctcgagcagcgacaacccgtcctctcccgagtttttcatgtgagtctgacacgcgattccagctagccaccctgataagtgctccgcgggggtccggctcgggtgtgggcttgctagttctagagccatgctcgccaccacctcaccacccccacccccaccgagtttggcccccttggccccctacacacacacaaacccgcacgcacacaccacacacacacacacacacacacacacaccccacaccctgctcgagtttgtggtggtggtggctgttttaaactggggagggaatgggtgtctggctcatggattgccaatctgaaattctccataacttgctagcttgttttttttttttttttacacccccccgccccacccccggacttgcacaatgttcaatgatctcagcagagttcttcatgtgaaacgttgatcacctttgaagcctgcatcattcacatattttttcttcttcttccccttcagttcatgaactggtgttcattttctgtgtgtgtgtgtgttttattttgtttggatttttttttttaattttacttttagagcttgctgtgttgcccaccttttttccaacctccaccctcactccttctcaacccatctcttccgagatgaaagaaaaaaaaaagcaaagtttttttttcttctcctgagttcttcatgtgagattgagcttgcaaaggaaaaaaaaatgtgaaatgttatagacttgcagcgtgccgagttccatcgggttttttttttagcattgttatgctaaaatagagaaaaaaatcctcatgaaccttccacaatcaagcctgcatcaaccttctgggtgtgacttgtgagttttggccttgtgatgccaaatctgagagtttagtctgccattaaaaaaactcattctcatctcatgcattattatgcttgctactttgtcttagcaacaatgaactataactgtttcaaagactttatggaaaagagacattatattaataaaaaaaaaaagcctgcatgctggacatgtatggtataattattttttcctttttttttccttttggcttggaaatggacgttcgaagacttatagcatggcattcatacttttgttttattgcctcatgacttttttgagtttagaacaaaacagtgcaaccgtagagccttcttcccatgaaattttgcatctgctccaaaactgctttgagttactcagaacttcaacctcccaatgcactgaaggcattccttgtcaaagataccagaatgggttacacatttaacctggcaaacattgaagaactcttaatgttttctttttaataagaatgacgccccactttggggactaaaattgtgctattgccgagaagcagtctaaaatttattttttaaaaagagaaactgccccattatttttggtttgttttatttttattttatattttttggcttttggtcattgtcaaatgtggaatgctctgggtttctagtatataatttaattctagtttttataatctgttagcccagttaaaatgtatgctacagataaaggaatgttatagataaatttgaaagagttaggtctgtttagctgtagattttttaaacgattgatgcactaaattgtttactattgtgatgttaaggggggtagagtttgcaaggggactgtttaaaaaaagtagcttatacagcatgtgcttgcaacttaaatataagttgggtatgtgtagtctttgctataccactgactgtattgaaaaccaaagtattaagaggggaaacgcccctgtttatatctgtaggggtattttacattcaaaaatgtatgtttttttttcttttcaaaattaaagtatttgggactgaattgcactaagatataacctgcaagcatataatacaaaaaaaaattgcaaaactgtttagaacgctaataaaatttatgcagttataaaaatggcattactgcacagttttaagatgatgcagatttttttacagttgtattgtggtgcagaactggattttctgtaacttaaaaaaaaatccacagttttaaaggcaataatcagtaaatgttattttcagggactgacatcctgtctttaaaaagaaatgaaaagtaaatcttaccacaataaatataaaaaaatcttgtcagttacttttcttttacatattttgctgtgcaaaattgttttatatcttgagttactaactaaccacgcgtgttgttcctatgtgcttttctttcattttcaattctggttatatcaagaaaagaataatctacaataataaacggcatttttttttgattctgtactcagtttcttagtgtacagtttaactgggcccaacaacctcgttaaaagtgtaaaatgcatccttttctccagtggaaggattcctggaggaatagggagacagtaattcagggtgaaattataggctgttttttgaagtgaggaggctggccccatatactgattagcaatatttaatatagatgtaaattatgacctcatttttttctccccaaagttttcagttttcaaatgagttgagccataattgcccttggtaggaaaaacaaaacaaaacagtggaactaggcttcctgagcatggccctacacttctgatcaggagcaaagccatccatagacagaggagccggacaaatatggcgcatcagaggtggcttgcgcacatatgcattgaacggtaaagagaaacagcgcttgccttttcactaaagttgactatttttccttcttctcttacacaccgagattttcttgttagcaaggcctgacaagatttaacataaacatgacaaatcatagttgtttgttttgttttgcttttctctttaacactgaagatcatttgtcttaaataggaaaaagaaaatccactccttacttccatatttccaagtacatatctggtttaaactatgttatcaaatcatatttcaccgtgaatattcagtggagaacttctctacctggatgagctagtaatgatttcagatcatgctatccccagaaataaaagcaaaaaataatacctgtgtggaatataggctgtgctttgatttactggtatttaccccaaaataggctgtgtatgggggctgacttaaagatcccttggaaagactcaaaactaccttcactagtaggactcctaagcgctgacctatttttaaatgacacaaattcatgaaactaatgttacaaattcatgcagtttgcactcttagtcatcttcccctagcacaccaatagaatgttagacaaagccagcactgttttgaaaatacagccaaacacgatgacttttgttttgttttctgccgttcttaaaagaaaaaaagataatattgcaactctgactgaaagacttatttttaagaaaacaggttgtgtttggtgctgctaagttctggccagtttatcatctggccttcctgcctattttttacaaaacacgaagacagtgtgtaacctcgacattttgaccttcctttatgtgctagtttagacaggctcctgaatccacacttaattttgcttaacaaaagtcttaatagtaaacctcccctcatgagcttgaagtcaagtgttcttgacttcagatatttctttcctttttttttttttttcctcatcacaactaagagatacacaaactctgaagaagcagaaatggagagaatgcttttaacaaaaaagcatctgatgaaagattttaggcaaacattctcaaaataagagtgatattctggatgtagttattgcagttatctcatgacaaatgaggcctggattggaaggaaaatatagttgtgtagaattaagcattttgataggaatctacaaggtagttgaatataataagcaggtttgggcccccaaactttagaaaatcaaatgcaaaggtgctggcaaaaatgaggtttgagtggctggctgtaagagaaggttaactcctagtaaaaggcatttttagaaataacaattactgaaaactttgaagtatagtgggagtagcaaacaaatacatgttttttttttcttacaaagaactcctaaatcctgagtaagtgccattcattacaataagtctctaaatttaaaaaaaaaaaaatcatatgaggaaatctagctttcccctttacgctgcgtttgatctttgtctaaatagtgttaaaattcctttcattccaattacagaactgagcccactcgcaagttggagccatcagtgggatacgccacattttggaagccccagcatcgtgtacttaccagtgtgttcacaaaatgaaatttgtgtgagagctgtacattaaaaaaaatcatcattattattattatttgcagtcatggagaaccacctacccctgacttctgtttagtctcctttttaaataaaaattactgtgttagagaagaaggctattaaatgtagtagttaactatgcctcttgtctgggggtttcatagagaccggtaggaaagcgcactcctgcttttcgatttatggtgtgtgcaagtaaacaggtgcattgctttcaacctgccatactagttttaaaaattcactgaaattacaaagatacatatatatgcatatatataatggaaagtttcccggaatgcaacaattagcattttaaaatcatatataggcatgcacattctaaatagtactttttcatgcttcattgtttctctggcagataattttactaagaagaaaaatagatattcgactccccttccctaaacaaatccacgggcagaggctccagcggagccgagccccctggttttctcgtaggccctagacggtgttgcatttatcagtgatgtcaaacgtgctcatttgtcagacatagctgtaaatgaaaacaatgtgtggcaaaatacaaagttaaaaaaaaaa

SEQ ID NO: 993 - DNA, 3127 bp, Homo Sapiens
  NM_001031805
atctgggtctggggatgtggtaccggctgctggcggcggccggcagtagagcggtggccaggccgctggccttgctgtggcgatgtggtggcccaggaggcggcaggacggccaagaccagcgcgagggccctgggcaaggcccgacaggcgataagctcacacctcaccctgcttgctccagtggttatggccagtgagaatgtgcggtgttgcattgcagaagaagctaggaaagctcatctggcctcctgttccagtgcttccaggggatccacgttcagaagctgactctgcaggcaagaccgacgttattttcctggtggctgtgttcaaaaccacccaaagggtttgagaaatactttaagaggagtggaaggaacacaaactgagaaacatcaacagcaccaaaaaaagagactggtgaactagagaatgctgagtctggaggagacggaggcaggagaggagggaagcaggataacgttgcctggtggaggcggatgcagaaggggggacttcccctgggatgacgaggatttccgcagtctggcccttttgggggcaggcgttgccatgggatttttctacctctattttcgagatcctggaagagaaatcacgtggaagcactttgtacagtattacctggccagaggtctggtggaccggctggaagtcgtgaacaaacaatctgtgcgtgttattcctgcccctgggacctcttctgaaacgtagctgggtgcgaagaatcaaattggaaattatggaatttgtgaatttcctgaagaatcccaagcagtatcaggacttaggagcaaaaattccaaagggagccatgctcactggtcctcctggtaccggcaagacccttcttgccaaagcaactgcaggggaggccactgtgcccttcatcactgtgaacgggtctgagttcctggaaatgtttattggcgttgggccagcaaggggttcaactctgccaccaacgtcgtggtgttggctggcaccaaccgccctgacgtcctggacccggccctcatgcggcctggccggtttcatcgccagatttacactggtcccccttacattaaaggcaggtcctccatctttaaggtccacctgcgcccactgaagctggacaagagcctcaataaggacaccctggcgaggaagctggcagtgctcaccccaggcttccctgatgtctgtttacataccaaagttaaaaagctggaatgttaccaagactgctttcttctgcccatagacggggatgactcagcactacccctcaacagagatgactttgatgactctgcccctcagcagggcttactaagcactaccccttaacagggatgactccgcactgcccctcaacagggatgactcagcagagatgactcagcactgtcccttagcagggatgacacagcaaggatgactcagcactgcccctcagcaaggatgactcagcactgccgctcaacagacatgactcagggatggcttagtactgcccctcagcagggatgactcagcaccgcctctcaacagggatgactcagcagggatgactcagcaccgcccctcaacaggcatgactctgcagagatgactcagcactgtcccttagcagggatgacacagcaaggatgactcagcactgcccctcagcaaggatgactcagcactgccgctcaacagggatgactcagggatggcttagtactgcccctcaacagggatgactcagcagggatgactcagcaccgcccctcaacaggcatgactctgcagagatgacttagtactgcccctcagcagggatgactcagtactgcccctcagcagggatgactcagcactgcccctcaacagggatgactcagcagggatgactcagcactgtcccttagcagtgatgacacagcaaggatgactcagcactgcccctcagcaaggatgactcagcactgccgctcaacagacatgactcagggatggcttagtactgcccctcagcagggatgactcagcaccgcccctcaacagggatgactcagcactgcccctcaacagggatgactcagcagggatgactcagcagtgtcccttagcagcgatgacacagcaaggatgactcagcactgcccctcaccaaggatgactcagcactgccgctcaacagacatgactcagggatggcttagtactgcccctcagcagggatgactcagcagggatgactcagcaccacccctcaacagggatgactcagcagggatgactcagcactgcccctcaacagggatgactgcagggatgactcagcactgcccctcagcagggatgactcagcactgcccctcagcagggatgactcagcagggatgactcagcaccgcccctcaacaggcatgactctgcagagatgactcagcactgcccctcagcagggatggctcagcagggatgactcagcattgcccctcaacagggatgactcagcagactcagcagggatgactcagcactgcccctcaacagacatgactcagcagggatgactcagcaccgcccctcagcaaggatgactcagcagggatgattcagcagagataactcggggatgactctgattgtccttcagcagggatgagtctgttttgctccgatggaagcatctgtagtgtccatcagcaggtgaatggccaaagtggtatatactgtagtcacattcagctataaaaaggaataaagtatcgatgcatgccacaacatgggtgaacctagaaaatactgatctaaatgcaagaagccaggcacaaaaggccacatagtatatgttcccatttatgtgaaatgtgcagaataataataaaaatgtatagaatagcaaatctgtagggacagacatgaggtgagtggttgccagaagtggaaatgggagttaactataaattgcacagggtaccttacagagatgatggaaatgtcctaaaactagattatggcaatagttgcactacgtgatcagtttattaaaaatcgttgatgtgtgtgtgtaaaatgggtggattttatggtttataaattataccttaataaaggttaacaaaaaa

SEQ ID NO: 994 - DNA, 3823 bp, Homo Sapiens
  NM_001031806
agtcctcccccggcgcctccgactggcagtgggactcagcgggcgtggaggtcgcggctgagcgagcgagccctgggcgagtgaattgtggctgtgggttgacggtggagacaccccccggagggaggcggagggaagggaggcgaggcctgcacctgcatgcttcccgcctcccactccccagcgcccccggaccgtgcagttctctgcaggaccaggccatggagctcgaagtccggcgggtccgacaggcgttcctgtccggccggtcgcgacctctgcggtttcggctgcagcagctggaggccctgcggaggatggtgcaggagcgcgagaaggatatcctgacggccatcgccgccgacctgtgcaagagtgaattcaatgtgtacagtcaggaagtcattactgtccttggggaaattgattttatgcttgagaatcttcctgaatgggttactgctaaaccagttaagaagaacgtgctcaccatgctggatgaggcctatattcagccacagcctctgggagtggtgctgataatcggagcttggaattaccccttcgttctcaccattcagccactgataggagccatcgctgcaggaaatgctgtgattataaagccttctgaactgagtgaaaatacagccaagatcttggcaaagcttctccctcagtatttagaccaggatctctatattgttattaatggtggtgttgaggaaaccacggagctcctgaagcagcgatttgaccacattttctatacgggaaacactgcggttggcaaaattgtcatggaagctgctgccaagcatctgacccctgtgactcttgaactgggagggaaaagtccatgttatattgataaagattgtgacctggacattgtttgcagacgcataacctggggaaaatacatgaattgtggccaaacctgcattgcacccgactatattctctgtgaagcatccctccaaaatcaaattgtatggaagattaaggaaacagtgaaggaattttatggagaaaatataaaagagtctcctgattatgaaaggatcatcaatcttcgtcattttaagaggatactaagtttgcttgaaggacaaaagatagcttttggtggggagactgatgaggccacacgctacatagccccaacagtacttaccgatgttgatcctaaaaccaaggtgatgcaagaagaaatttttggaccaattcttccaatagtgcctgtgaaaaatgtagatgaggccataaatttcataaatgaacgtgaaaagcctctggctctttatgtattttcgcataaccataagctcatcaaacggatgattgatgagacatccagtggaggtgtcacaggcaatgacgtcattatgcacttcacgctcaactctttcccatttggaggagtgggttccagtgggatgggagcttatcacggaaaacatagttttgatactttttctcatcagcgtccctgtttattaaaaagtttaaagagagaaggtgctaacaaactcagatatcctcccaacagccagtcaaaggtggattggggaaaattttttctcttgaaacggttcaacaaagaaaaactcggtctcctgttgctcactttcctgggtattgtagccgctgtgcttgtcaagaaataccaagctgtgctgaggagaaaggccctgttgatttttctggtagttcacagactgcgttggtccagtaagcagagatgaacaccagatttcaaaacccagccctgtctgttaagagtgaggcagaatattactgaagaatgatcctgttcaacctcctagtgcctctactgaattattcctcttttaaatggttaatgaaccaataatttttaaatcataccaaaaatagtaagaaaatatgcaaacactctgtgatcaaacttaaaagtcattgccattcatcattaataaaagttgccatttcaactacgtcccaacattccctaatagggtattcagggaacctgtcttaaattgtgcttatctaaatcttggaactttgagctaggggaggagaatgtattagactaaatacaaactgcggggttgtaagggagtctcagaacctcactgaatccttcactccagttaatggcactgctcacttcctgcctctgctgccaccatcactgtgtgaagctttcaagagcttggtacttcccagggctaccggcagtcctctgtagtccagagaggtgagattagatcttcttggttccctgtgaggtttcaggcactaaaactctatgtggggaagggaggggttactcctcctccaatgggactcaaggacttgacctccaggagtaggcccctggtcagaagtgccatctcaccagtggtcttcattcttcctcattcattctttatcatcctgtgttctgtttagttgcaacaatctcttgtgactaatgtcactcaaagcatcttgtaaatcctagggcttcctggaagttagttgccaaagtcatgcaagcatcacctgtcattcttgtgttggagttatagaattctacatcttataaaacctaactggcatttaaaaaatactgtggccgggcgtggtggctcatgcctgtaatcccagcactttgggaggccgaggtgggaggattgcttgagtccaggaatttgagaccagcctggacaacacagtgagacctcatctctatcaaaaaataaaaattagctagatgtggtggcatgagcctgtgttcccagctgcttaggaggctgaagcaggaggattgattgagcctgcgaggccaaggctgcagcaggctgtgattgcaccactgcacttcagcttgggcaacagagcaagaccctgtctccgaaacaaataaaaaatactgtaataaaagtacttataaacatactaatcctctttcaggaccctaaagttgcaggttagtaggtcttcaaggacaaatctgtaagtttcttatttctgtagtgcaagtaaaatttcactttttgaaactatagagagatccctttctgattagcctacagaacttaaagtgagggaaccatttcctctcacagacaaagaggcctgggatattaggactttggggtttgagagcatcatggggcagacagatggtggatggtctggacaagaagcgagtaagccactgcggttggtcatactgaagggaattgatggcaagaggatcccctgagcaagtcagaagttactctcatcagtcgttcatggtcacaacctgaggtactctgctgagtgggcaaggctgaagaagaggcctgtggaatgcagcattacctgctggacagagcagggcaggcagttctatgccttggagctcctgactgcagggactctgtccccacactcaaaaagactcagctcactcaatgagagaatgtgatttactttatagaacgtataatcaactttgttgaataatttgttctattaaggctgtctaaagtatgtgatgtcttcatcatagtatgaagtgttgaaaattaataacgagcctagtttaggaaaaagctgcttaaaactgtggctctaagagagtaatcataaaataccttagataaaattgcactatggaattttcattgagtatgtttaaattattggcttgtctactaatacacatctgcttcaaaatgaacatatttcataaaattggcatcaattttaatgacgctcctggtatggaacctcagatataccctattggagacaatcctttgatcataaattctccccaactataaatcattttatgtcttta

SEQ ID NO: 995 - DNA, 2671 bp, Homo Sapiens
  NM_001031847
ggacccgcctcagccaatccgctgctgccggcgtcgggtgcgctcggcctcgcccgcggccctccttccccggctcccgctcgccgctcgttcactccaccgccgccgccgccgccgccgctgccgctgccgctgccgcacctccgtagctgactcggtactctctgaagatggcagaagctcaccaagctgtggcctttcagttcacggtcactccggacgggattgacctgcggctgagccatgaagctcttagacaaatctatctctctggacttcattcctggaaaaagaagttcatcagattcaagaacggcatcatcactggcgtgtacccggcaagcccctccagttggcttatcgtggtggtgggcgtgatgacaacgatgtacgccaagatcgacccctcgttaggaataattgcaaaaatcaatcggactctggaaacggccaactgcatgtccagccagacgaagaacgtggtcagcggcgtgctgtttggcaccggcctgtgggtggccctcatcgtcaccatgcgctactccctgaaagtgctgctctcctaccacgggtggatgttcactgagcacggcaagatgagtcgtgccaccaagatctggatgggtatggtcaagatcttttcaggccgaaaacccatgttgtacagcttccagacatcgctgcctcgcctgccggtcccggctgtcaaagacactgtgaacaggtatctacagtcggtgaggcctcttatgaaggaagaagacttcaaacggatgacagcacttgctcaagattttgctgtcggtcttggaccaagattacagtggtatttgaagttaaaatcctggtgggctacaaattacgtgagcgactggtgggaggagtacatctacctccgaggacgagggccgctcatggtgaacagcaactattatgccatggatctgctgtatatccttccaactcacattcaggcagcaagagccggcaacgccatccatgccatcctgctttacaggcgcaaactggaccgggaggaaatcaaaccaattcgtcttttgggatccacgattccactctgctccgctcagtgggagcggatgtttaatacttcccggatcccaggagaggagacagacaccatccagcacatgagagacagcaagcacatcgtcgtgtaccatcgaggacgctacttcaaggtctggctctaccatgatgggcggctgctgaagccccgggagatggagcagcagatgcagaggatcctggacaatacctcggagcctcagcccggggaggccaggctggcagccctcaccgcaggagacagagttccctgggccaggtgtcgtcaggcctattttggacgtgggaaaaataagcagtctcttgatgctgtggagaaagcagcgttcttcgtgacgttagatgaaactgaagaaggatacagaagtgaagacccggatacgtcaatggacagctacgccaaatctctactacacggccgatgttacgacaggtggtttgacaagtcgttcacgtttgttgtcttcaaaaacgggaagatgggcctcaacgctgaacactcctgggcagatgcgccgatcgtggcccacctttgggagtacgtcatgtccattgacagcctccagctgggctatgcggaggatgggcactgcaaaggcgacatcaatccgaacattccgtaccccaccaggctgcagtgggacatcccgggggaatgtcaagaggttatagagacctccctgaacaccgcaaatcttctggcaaacgacgtggatttccattccttcccattcgtagcctttggtaaaggaatcatcaagaaatgtcgcacgagcccagacgcctttgtgcagctggccctccagctggcgcactacaaggacatgggcaagttttgcctcacatacgaggcctccatgacccggctcttccgagaggggaggacggagaccgtgcgctcctgcaccactgagtcatgcgacttcgtgcgggccatggtggacccggcccagacggtggaacagaggctgaagttgttcaagttggcgtctgagaagcatcagcatatgtatcgcctcgccatgaccggctctgggatcgatcgtcacctcttctgcctttacgtggtgtctaaatatctcgctgtggagtcccctttccttaaggaagttttatctgagccttggagattatcaacaagccagacccctcagcagcaagtggagctgtttgacttggagaataacccagagtacgtgtccagcggagggggctttggaccggttgctgatgacggctatggtgtgtcgtacatccttgtgggagagaacctcatcaatttccacatttcttccaagttctcttgccctgagacggggattataagtcaaggaccaagttcagatacttgagacaaagtggaaagtctcagcatatggaaacaaggccttggaggagaccatggacatcaccaagttcatgtgctgggctggaaagaaaagcctgttgattttcacttgctgtgcatttattcatccattccattgcctcaatgctgagaacagtgcctgacacataaaagatgctcaataaatatgttaaaagtaaaaaaaaaaaaaaaaaaaaaaaaaaaaaaaaaaaa

SEQ ID NO: 996 - DNA, 2625 bp, Homo Sapiens
  NM_001031855
acgcctcgtctcctcccgtgtccctcttcccatggagtcagtacggatcgaacagatgctgagcttgcccgctgaggtcagcagcgacaacttggagtcggcggagcgaggggcatcagcggcccaagtagacatgggcccccacccaaaggtggctgcagagggccccgcacctctaccgacgcgggagccagagcaagagcagtctccggggacctcaacgccggagagcaaagtcctgctcacgcaggcagacgccttggcgtcccgggggcgaatccgtgaagccctcgaggtgtatagacagctctccgagcggcagcagctggtggctgagcagctggagcagctggtgcgctgcctggcggagaaagtcccgcaaggcgaggcgctggcgccggcgcccccggacgagggtagcactgcaagcggcaccgtggcggcggaagagacgggggccgccgcggctgcggcggccaccgaggtgtgggacggctttaagtgccggaaatgtcatgggtttctatcagaccccgtgtccttgtcgtgtggccacaccttttgtaaactgtgcctggaacgtgggcgggccgccgaccggcgctgtgcgctgtgcggggtcaagctctccgccttgatggtggccactgggcgggcgcgtggagcccggcgggctgggcagcagccgccgccgccgctgcgagtcaacgtggtgctcagcggcctcctcggcaagttgtttccaggcccagcgcgagcgtcgcaactccggcacgagggcaaccgactgtaccgcgagcgccaggtggaggcggcactgctcaagtacaacgaggcagttaagttggctccaaatgaccacttgctttatagcaatcggtctcagatttatttcaccttggagtctcatgagaatgcactgcatgatgcagaaatagcatgtaagctccgcccgatgggttttaaggcacatttcagaaaagcccaagccttagccaccctaggcaaggtggaggaggcactaagggagtttctctactgtgtatcccttgatggaaagaacaagagagcaagatgtgaagcccaaagagacaatctggagctcccacattgttctagtcaggaggaagcagcagccaggggagatggcagcagtctgatggacccagctaaagtgaagggggatggtcagcagcaccacatgaaagaccaggaagaagaggaggagaagtgggatgctacctctccaaaagctgcttccagcaagactggaaaatgccaggaaaagaaaaggaaacattgccagattgaatcccaagaagaaacggggatgcctaataaagcctccaagcaagatcctcccactgatcagggggacaaacctgctctcagtttaccacttgcatctttcgacgcatctgaccttgaatgcgctctatgtatgagattattctatgagccagtcacaacaccttgcgggcatactttttgcttaaaatgcctagaaagatgcctagatcacaacgcaaagtgtccattgtgcaaagacggtctttcacagtgcttggcatcaagaaaatacagcaaaaatgtaataatggaggagctcatagctaaattccttccagaagaactgaaggaacgaaggaagctttatgaagaggaaatggaagaactttctaaccttaataagaatgtgcctattttcgtgtgtactatggcctatcccaccgttccttgtcccctgcacatctttgagccttgttaccgcctgatgattcgtagatgcattgagacaggcacgagacagtttggcatgtgccttggagatcctgtcaaagggtttgcagaatatggctgcatcctagagatcagaaatgttcaattctttgctgatggccgctcagtggttgacagcataggcaagaggcgcttcagggtgctccatcagagccagcgggatggctacaacacagccgacattgaatacattgaagaccaaaaggttcagggagaggattgtgctgagctcatgggattacataactgtgtctatcagcaagcatcattgtggtttcattcgctcaaattatccctaaagaatcggatactcaatcactttggtcccatgccggagaaagacgccgatcctcagatgaacccgaatggcccagcctggtgctggtggatgttagcagttcttcccttggaaagccgagctcagctccccttcctagcaatgaggtccttaaaggacagactgaatggtattcgacgagtcctggccttcatatcccgaaaccaaaactagtgagtggattgccgaagaggagctcccaccttccccactgccgtcggggggagtcttcttgtaaatatatctaattgcaataatatcttaacagaagggggtgtcaaacagaggcatcagcctgctgttgatcacagagagaaattgagtagaaagaccaaaagaatgtgacctatttgaaactttctgtcttaagatgcttcttgacatgctgcataactacataaacagcagaggtgtttaagagcccagaaaaacataatttgattttaacattaaaatttccaaaagtttaaaaaaaaaaaaaaaaaaaa

SEQ ID NO: 997 - DNA, 1042 bp, Homo Sapiens
  NM_001032278
tccctcggtccccggggccggcggacccgcgggcaggcactgcccgggctggacgacgtctggccggctcccggcgaagggcagcggaggagcggcccagagcgcgcagctagggcactggcgaaaccccgggacagtccctctccgtgcgggggcggcgcagagcagtcccatccccggggtcccgggcgcggctgactgccggctggttccctgcgcgcagtagctccccgagccgggctgcaccggaggcggcgagatggtcgcgcgcgtcggcctcctgctgcgcgccctgcagctgctactgtggggccacctggacgcccagcccgcggagcgcggaggccaggagctgcgcaaggaggcggaggcattcctagagaagtacggatacctcaatgaacaggtccccaaagctcccacctccactcgattcagcgatgccatcagagcgtttcagtgggtgtcccagctacctgtcagcggcgtgttggaccgcgccaccctgcgccagatgactcgtccccgctgcggggttacagataccaacagttatgcggcctgggctgagaggatcagtgacttgtttgctagacaccggaccaaaatgaggcgtaagaaacgctttgcaaagcaaggtgagcactgttaaaatccggctaggccaagatttcccaatgtcttgaagccaatggctaggaaaacagctgagcctgggactggactttgtcagtaacctctcttccctagggcacgggaggagtgggtgaataggacctcttggcttgaggaccatgattgtgaatacagacatttaattcagaatgacacctacattgatgaattttcattgtacaagtgtttttccagatcaaacacaaaacccatgtaattccttgataaattttcaatgcagggcagataaactgttgctaacatttttcatttatatttactgaagttattttcatcagaattcattctttttcataagttattaaacaaatgtgtgatctattgaaaaaaaaaaaaaaaaaaaaaa

SEQ ID NO: 998 - DNA, 1485 bp, Homo Sapiens
  NM_001032279
tccctgggactgcgtcactggtgcgcgccgcgggtcagggcgcaatggcggcgctgggcggggatgggctgcgactgctgtcggtgtcgcggccggagcggccgcccgagtcggcggcgctgggcggcctgggccccgggctgtgctgctgggtgtcagtgttctcctgcctcagcctcgcctgctcctacgtgggcagcctctacgtctggaagagcgaactgcccagggaccatcccgcggtcatcaagcgacgcttcaccagcgtcctggtggtgtccagtctctcacccctgtgcgtgctgctctggagggaactcacaggcatccaggcacatccctgctcaccctgatgggcttcaggctggagggcattttcccagcggcgctgctgcccctgttgctgaccatgattcttttcctgggcccactgatgcagctctctatggattgcccttgtgacctggcagatgggctgaaggttgtcctggccccccgctcctgggcccgctgcctcacagacatgcgttggctgcggaaccaagtgatcgccccgctgacagaggagctggtgttccgggcctgtatgctgcccatgttagcaccgtgcatgggcctgggccctgctgtgttcacctgcccgctcttttttggagttgcccattttcaccatattattgagcagctgcgtttccgccagagcagcgtggggaacatcttcttgtctgctgcgttccagttctcctacacagctgtcttcggtgcctacactgctttcctcttcatccgcacaggacacctgattgggccggttctctgccattccttctgcaattacatgggtttcccagctgtttgcgcggccttggagcacccacagaggcggcccctgctggcaggctatgccctgggtgtgggactcttcctgcttctgctccagcccctcacggaccccaagctctacggcagccttcccctttgtgtgcttttggagcgggcaggggactcagaggctcccctgtgctcctgacctatgctcctggatacgctatgaactctcaccggctccccagccctccccaccaaggggtactgcaggggaagggctggctggggtccccgagatctcaggaatttttgtaggggattgaagccagagctagttgcgtcccagggaccaagagaaagaagcagatatccaaagggtgcagccccttttgaaaggggtgtttacgagcagctgtgagtgaggggacaaggggcaggtcccaggagccacacactcccttcctcactttggactgctgcttctcttagctcctctgcctctgaaaagctgctcggggttttttatttataaaacctctccccaccccccaccccccaacttcctgggttttctcattgtctttttgcatcagtactttgtattgggatattaaagagatttaacttgggtaacatggcaaaaaaaaaaaaaaaaaa

SEQ ID NO: 999 - DNA, 1903 bp, Homo Sapiens
  NM_001032287
gcttctccccgttgctaatgcgcaggcgctggcgggatagcgcgccgccgagccgagaaagaggtcacgaactctgaccccccagaaatacccaaacacagaaagctctctccgccgtgaatctcgatcccacatcccgtcggctttcttcaacctctcttcccggagcgccccccaatccacgagtggcagccgcgggactgtcgcgtcggcgcccgacgccggagtcagcagggcgcaaaagcgccggtagatcatggcaaccatagaagaaattgcacatcaaattattgaacaacagatgggagagattgttacagagcagcaaactgggcagaaaatccagattgtgacagcacttgatcataatacccaaggcaagcagttcattctgacaaatcacgacggctctactccaagcaaagtcattctggccaggcaagattccactccgggaaaagttttccttacaactccagatgcagcaggtgtcaaccagttattttttaccactcctgatctgtctgcacaacacctgcagctcctaacagataattctccagaccaaggaccaaataaggtttttgatctttgcgtagtatgtggagacaaagcatcaggacgtcattatggagcagtaacttgtgaaggctgcaaaggattttttaaaagaagcatccgaaaaaatttagtatattcatgtcgaggatcaaaggattgtattattaataagcaccaccgaaaccgctgtcaatactgcaggttacagagatgtattgcgtttggaatgaagcaagactctgtccaatgtgaaagaaaacccattgaagtatcacgagaaaaatcttccaactgtgccgcttcaacagaaaaaatctatatccgaaaggaccttcgtagcccattaactgcaactccaacttttgtaacagatagtgaaagtacaaggtcaacaggactgttagattcaggaatgttcatgaatattcatccatctggagtaaaaactgagtcagctgtgctgatgacatcagataaggctgaatcatgtcagggagatttaagtacattggccaatgtggttacatcattagcgaatcttggaaaaactaaagatctttctcaaaatagtaatgaaatgtctatgattgaaagcttaagcaatgatgatacctctttgtgtgaatttcaagaaatgcagaccaacggtgatgtttcaagggcatttgacactcttgcaaaagcattgaatcctggagagagcacagcctgccagagctcagtagcgggcatggaaggaagtgtacacctaatcactggagattcaagcataaattacaccgaaaaagaggggccacttctcagcgattcacatgtagctttcaggctcaccatgccttctcctatgcctgagtacctgaatgtgcactacattggggagtctgcctccagactgctgttcttatcaatgcactgggcactttcgattccttctttccaggctctagggcaagaaaacagcatatcactggtgaaagcttactggaatgaactttttactcttggtcttgcccagtgctggcaagtgatgaatgtagcaactatattagcaacatttgtcaattgtcttcacaatagtcttcaacaagcagaggggtaatcaccttaaaatgtcatcaaaaatagatctactagaaggcagcatcacattcccatcttacttatggactcctacccctggttcatgtcttatatgcctgtaatggttataaagcctaccttcaggaaagctatggttgactaattactaatggatgggttttaaacatgtccctctacaataaattaaaatctttattgtaaaactttaaaaaaaaaaaaaaaaaaaaaaaaaaaaaaaaaa

SEQ ID NO: 1000 - DNA, 2138 bp, Homo Sapiens
  NM_001032288
gggggggtgaagaaggggccggccttcaagcaagagcgacgcaagatggcagccaccacgggctcgggagtaaaagtccctcgcaatttccgactgttggaagaactcgaagaaggccagaaaggagtaggagatggcacagttagctggggtctagaagatgacgaagacatgacacttacaagatggacagggatgataattgggcctccaagaacaatttatgaaaaccgaatatacagccttaaaatagaatgtggacctaaatacccagaagcacccccctttgtaagatttgtaacaaaaattaatatgaatggagtaaatagttctaatggagtggtggacccaagagccatatcagtgctagcaaaatggcagaattcatatagcatcaaagttgtcctgcaagagcttcggcgcctaatgatgtctaaagaaaatatgaaactccctcagccgcccgaaggacagtgttacagcaattaatcaaaaagaaaaaccacaggcccttccccttccccccaattcgatttaatcagtcttcattttccacagtagtaaattttctagatacgtcttgtagacctcaaagtaccggaaaggaagctcccattcaaaggaaatttatcttaagatactgtaaatgatactaattttttgtccatttgaaatatataagttgtgctataacaaatcatcctgtcaagtgtaaccactgtccacgtagttgaacttctgggatcaagaaagtctatttaaattgattcccatcataactggtggggcacatctaactcaactgtgaaaagacacatcacacaatcaccttgctgctgattacacggcctggggtctctgccttctccccttaccctcccgcctcccaccctccctgcaacaacagccctctagcctggggggcttgttagagtagatgtgaaggtttcaggtcgcagcctgtgggactactgctaggtgtgtggggtgtttcgcctgcacccctggtttctttaagtcttaagtgatgccccttccaaaccatcatcctgtccccacgctcctccactcccgcccttggccgaagcatagattgtaacccctccactcccctctgagattggccttcggtgaggaattcagggctttccccatatcttctctcccccacctttatcgaggggtgctgctttttctccctcctcctcaagttcctttttgcaccgtcaccacccaacaccttccatgacacttccttgctttggccagaagccatcaggtaaggttggaaagagcctctgacctcccttgtttagttttggaaccatactcactcactctccaccagcctgggaaatgaatattgggtcctcagccctgccaccctctgctgtcatcagctgatgcattgtttttagctcaggttttgataaggtgaaaagaatagtcaccagggttactcagacctgccagctctcggagtccttggtggttgaacttggagaaagaccgcatgaagatacttgtaagcacacatgatccctctgaattgttttactttcctgtaactgcttttgcttttaaaaattgaagaagttttaaacagggctttcatttggtcatccttgcaatccattggggtctagtttggaatctgacaactggaacaaaaagaaccttgaatccggtgcatgccttggttttggtgctgctgctgcttcccaagatcctcagcagggattaagaaggaacccggtgtgcacagcagatccccgaaattggtgggcttgacctcctggcaaattgctgcgtctttccacttgctgttcaggaccactaaatgctgaaatgtggatgcataccgaaataaaagcaattcattgtgtactaaaggttttttttttttttttaatttagtatttgtgtaaaaccaccttttgaagcagcaactatcaagtctgaaaagcaattgatgtttccattaatctttttctggggggaaaaccttagttctaaggatttaacatcctgtaagtgaagtttaacataacagtattccataagcagcctttttattgtcagaccattgcctgattttaatataataaaaaaaaagtgtgcgttaatatttaaaaaaa

SEQ ID NO: 1001 - DNA, 2240 bp, Homo Sapiens
  NM_001032293
cggagcggggaacgaggccgtcggccattttgtgtctgcttcctgtgggacgtggtggtagccgttgggttgggaaagtgagggatttttggcctcgtttctcctgcttcttttctcctcccttttactttgccggtagaacacagttatgggtcgcaagaagaagaagcagctgaagccgtggtgctggtattgtaatagagattttgatgatgagaagatccttattcagcaccaaaaagcaaagcattttaaatgccatatatgtcacaagaaattgtatacaggacctggcttagctattcattgcatgcaggtacataaagaaacaatagatgccgtaccaaatgcaatacctggaagaacagacatagagttggaaatatatggtatggaaggtattccagaaaaagacatggatgaaagacgacgacttcttgaacagaaaacacaagaaagtcaaaaaaagaagcaacaagatgattctgatgaatatgatgatgacgactctgcagcctcaacttcatttcagccacagcctgttcaacctcagcaaggttatattcctccaatggcacagccaggactgccaccagtaccaggagcaccaggaatgcctccaggcatacctccattaatgccaggtgttcctcctctgatgccaggaatgccaccagttatgccaggcatgccacctggattgcatcatcagagaaaatacacccagtcattttgcggtgaaaacataatgatgccaatgggtggaatgatgccacctggaccaggaataccacctctgatgcctggaatgccaccaggtatgcccccacctgttccacgtcctggaattcctccaatgactcaagcacaggctgtttcagcgccaggtattcttaatagaccacctgcaccaacagcaactgtacctgccccacagcctccagttactaagcctcttttccccagtgctggacaggctcaggcagctgtccaaggacctgttggtacagatttcaaacccttaaatagtacccctgcaacaactacagaacccccaaagcctacattccctgcttatacacagtctacagcttcaacaactagtacaacaaatagtactgcagctaaaccagcggcttcaataacaagtaagcctgctacacttacaacaactagtgcaaccagtaagttgatccatccagatgaggatatatccctggaagagagaagggcacagttacctaagtatcaacgtaatcttcctcggccaggacaggcccccatcggtaatccaccagttggaccaattggaggtatgatgccaccacagccaggcatcccacagcaacaaggaatgagacccccaatgccacctcatggtcagtatggtggtcatcatcaaggcatgccaggataccttcctggtgctatgcccccgtatgggcagggaccgccaatggtgcccccttaccagggtgggcctcctcgacctccgatgggaatgagacctcctgtaatgtcgcaaggtggccgttactgatcttacttcatccagtctaataggtttggagattaaaccttttctcaacttgtgctgtttatatagccaagcttccgtcaataaggcttcattgtgactttaacaaacattatcttcccacataccaggaactattggacatttattttacatgggaaaaattatttggaataataaagcaggaacttttcctgaagttgcaatttatactgtatggcttctttttcatgtttcatctaggtttttagaagtgaagtatagtaaatttggttcgttaaattgtgaaggcgctggaattacatgaacataccaccctagtaaaggcaagttctgtaagcttacattgctatttgtaaagtttgccttcacagcatttcagatgctgttggacttcatgtccccaacctagcttggtgagggctgtaactgtttccaagtacttgtacattggaagtctgaatgtgtaacaatatttaatgtatttagagttcctcatgttgcagggtttaagaaatctgacccaccaaggtcatgtgacttttctgtactgttaaacttcattgtaataaaatgagagaaaaatttatgcctttttattcataacccagctgtggaccactgcctgaaaggtttgtacagatgcatgccacagtagatgtccacataataaaattcatagttaccaatgcaaaaaaaaaaa

SEQ ID NO: 1002 - DNA, 3726 bp, Homo Sapiens
  NM_001032363
tcgcgagactttcaggggtcggagcgcgggggccggccgagaggaaagctggaggcgcgggtggggaacatgtctgagtcggagctcggcaggaagtgggaccggtgtctggcggatgcggtcgtgaagataggtactggttttggattaggaattgttttctcacttaccttctttaaaagaagaatgtggccattagccttcggttctggcatgggattaggaatggcttattccaactgtcagcatgatttccaggctccatatcttctacatggaaaatatgtcaaagagcaggagcagtgacttcacctgagaacatcccagcgggaggacaagagaaatcatgtttattcctcaggaatactgaagtgccctggagtaagctgccattcttctgtaacaatgttatcagtaatgctttaaactccagcacctggttatgcatttgaaaccaagtctgtttcttgttttgtattttctctctggaagttgtaaggaggtggtcttaaataaattaaacaaaaagaggaagtccattgcatggcctttgtttcttcacctttggtctctgagcatgaggaggactgtgtgtgaactgccagcagctgtagccacctgctcacagcctctctgagaaccccctgaaaccagttgttgggtatccttcccatttgccccctcaggcgtagttttcagaactgcttccacctcgtaatcagaagttgaagattgctgctgcgtggcctgatggagatgactgatgtcttaaggcgcctttccttctgtggcacctcttcgtgtgttctcacctggggacctggcagggcacatctccgctgtgcctactgcaaggcggtcccactgctgctgtattagcaggggaagaatcctggctgtgtggatggcccactccattgaagtcaagtcctgcagcttcatagagcttgagacagtccaagcttcagctctggagggcggaggaaagctcatggcatacccacctggccggaggagcccgattggggttaattttatcttcacgtagcagctgaagtttgaggacaaaagggccacttctgatgcccctctgagtttgttcctgtggtttcacttgaaccagggatgctagatgcaaaagtcatattttagcaatttcttcagacgatatacagaaccccagcgctcagccgttcttatttctttttccttatcgtagaattaagatagggagagcccgatcccacttgcccctgtatcctgtaaatgttgatttatcatctactgtaagcgaggcactgttgtaagcagcagagataaatggataaatagacacaggcttctgccttcaaggagcttagagtctgatggaaagacagacgtgcaaacacaactctgaaagaagtgttttaatggagaagagaggtgtaggcaaagtacactgagaacaaaggagaaggagcaactatgtctccctaggatggccccacaggcgacggaatgcctgcgctgggacccgaagttgactgggaatcccagacagaaggagggtagcctctgtgtttgctcaggatcatgtaatgcatattatagctgggaaatcgcaagtagttcagcatagccagggtgtgtaggggcaggggaaaggcatggagggggaggctgggcaatagggtacaactcatgtctgactccagttctggaacattgattagaccttagttcttgcaagtgctatagtgagtacattcagggtagcaaataccctccctcagcctccccactcccttttccagaaaggtctgctaggctctgccctgcaaactgtccaggctcctctgccctctgggcttgttttcctctttattgctacttggctgtttttcacttggtcctcttcattctatgattaaggcaacccatataattgaaagaaaaataatgtgcagcctgtttcatcccttccacttgttttcttactatttatttatttatttctgagatggaattttgctcttgttgcccaggctggagtgcaatggtggcgatctcggcctgctgcaacctccgcttcctgggttcaagcgcttctcctgcctcagcctcccgagtagctgggattacaggcatgcgccatcacacctggctaattttgtatttttagtagagacggtgtttctccttggtcatgctggtctccaactcccgacctcaggtgatcctcccgcctcggcctcccaaagtgctgggattacaggcgtgagccaccgcacccagcctcctatttgctttaaaagtaatttcctggccggatgcggtggctcacacctgtaatcccagcactttgggaggccaaggcaggtggatcatgaggtcaagagatcaagaccatcctggccaacattgtaaaaccctgtctctactaaaaatataaaaatcagctgggcatggtggcgcacacctgtagtcccagctactcaggaggttgaggcaggagaatcatttgaacccgggaggcagaggttgcggtgagctgagatcgcgccactgcactccagcccggcgacagagcgagaatctgtctcaaaaaaaaaaaaaaaaaaaaagcattttccttccccaatttttctgtcattttcccatcctcattcaggcagagagaagaataacatgcccccttccaaaaaagacaaaacacaaggtagccacaaattccctagacacattagaaaaatagggagtggagaggggcattggaatgaaagttctctatctcattagctgttaggctttaggcatttatttggatggatccctttggcaccttggaagcaccactgaagtgctctgagaaaggggtcagctgtctgagggaatagttctggatagaggccacaggaagcactggccagttgctttagttctagatagctttgtattcccgccttgttgcccttagcggaggctggcccaaagcacacttgatcttgtccccactccctgcccccatctcagatcaaccttcagaaagtcccggcttgttggcaaaggcacacattctgtgttactcttaagtttcattagaaattcaagtcctctggggccctgttcccttgtgggcttgtgcaactgactttgtttcttgtctgcctttctggaaccaaatccaaggaaattcatgggtttggggagacagcgatgggaacccagcagggcacaggatgctaggataaagctgtggcgccccaaaagtggcctgctctgccaacatacataaatacatacagtctgagcttgacactgtataatttggcccagaacaatatgtattttgagctcatttaggtgaatgactttggcattccatgtacccactaggggaagctttatcaggctgcatttgccttatgcagaagtatgcctttgttctgagaaatggcctcagaacacactgttgagctgtctcctttagtgagtgtcatcctctcatccatttcaaaagattgcagatgccgtcttgaagtcctgcttgtaagaaatgcaggggttgggaatggaggagatgacgatgtagttttgcttttagttttcccaaacctgtttacattttttaaaaatgtaaccaacccataattgcattttacttgtcgtggttcgatctgattgtattgtcgaaggactatttttgaacctgtccaaataaactctgcaaagtatttccacaag

SEQ ID NO: 1003 - DNA, 2376 bp, Homo Sapiens
  NM_001032364
aggaggagctgggtcacagcagggaatcttagcttggttttggtgtgctgctggatgaccagaccgggcgtcgggtgagcccagaagtgagagcagttggctgtgccccagtgctgtgtgacccagaggcgccgctcaccctctctgagctggtggacatcatagcgggtgcagcccagaactgtcttctgaggaagaggtgctctcctgggcccccactgtccccaggcctcagcaaggcaagtgaggtgctgccgtcatccaggctggacagttcagtgatttgcctgaggccccacagcaggagaacgagaaggctgcctgatcagagagtccctgaagaagattctgtggctacaggcttcagcagagtgtgagggagaccccggttatttcctcagctatttccaccaaatcctcctgtctttcgtggccaacaccccaggcaaggcttggggcccccgtctgctgctggacgagccatgaagaagaagttagtggtgctgggcctgctggccgtggtcctggtgctggtcattgtcggcctctgtctctggctgccctcagcctccaaggaacctgacaaccatgtgtacaccagggctgccgtggccgcggatgccaagcagtgctcgaagattgggagggatgcactgcgggacggtggctctgcggtggatgcagccattgcagccctgttgtgtgtggggctcatgaatgcccacagcatgggcatcgggggtggcctcttcctcaccatctacaacagcaccacacgaaaagctgaggtcatcaacgcccgcgaggtggcccccaggctggcctttgccaccatgttcaacagctcggagcagtcccagaagggggggctgtcggtggcggtgcctggggagatccgaggctatgagctggcacaccagcggcatgggcggctgccctgggctcgcctcttccagcccagcatccagctggcccgccagggcttccccgtgggcaagggcttggcggcagccctggaaaacaagcggaccgtcatcgagcagcagcctgtcttgtgtgaggtgttctgccgggatagaaaggtgcttcgggagggggagagactgaccctgccgcagctggctgacacctacgagacgctggccatcgagggtgcccaggccttctacaacggcagcctcacggcccagattgtgaaggacatccaggcggccgggggcattgtgacagctgaggacctgaacaactaccgtgctgagctgatcgagcacccgctgaacatcagcctgggagacgtggtgctgtacatgcccagtgcgccgctcagcgggcccgtgctggccctcatcctcaacatcctcaaagggtacaacttctcccgggagagcgtggagagccccgagcagaagggcctgacgtaccaccgcatcgtagaggctttccggtttgcctacgccaagaggaccctgcttggggaccccaagtttgtggatgtgactgaggtggtccgcaacatgacctccgagttcttcgctgcccagctccgggcccagatctctgacgacaccactcacccgatctcctactacaagcccgagttctacacgccggatgacgggggcactgctcacctgtctgtcgtcgcagaggacggcagtgctgtgtccgccaccagcaccatcaacctctactttggctccaaggtccgctccccggtcagcgggatcctgttcaataatgaaatggacgacttcagctctcccagcatcaccaacgagtttggggtacccccctcacctgccaatttcatccagccagggaagcagccgctctcgtccatgtgcccgacgatcatggtgggccaggacggccaggtccggatggtggtgggagctgctgggggcacacagatcaccacggccactgcactggccatcatctacaacctctggttcggctatgacgtgaagcgggccgtggaggagccccggctgcacaaccagcttctgcccaacgtcacgacagtggagagaaacattgaccaggcagtgactgcagccctggagacccggcaccatcacacccagatcgcgtccaccttcatcgctgtggtgcaagccatcgtccgcacggctggtggctgggcagctgcctcggactccaggaaaggcggggagcctgccggctactgagtgctccaggaggacaaggctgacaagcaatccagggacaagatactcaccaggaccaggaaggggactctgggggaccggcttcccctgtgagcagcagagcagcacaataaatgaggccactgtgccaggctccaggtggcctccctggcctgtctccccactcaaaaaaaaaaaaaaaaaa

SEQ ID NO: 1004 - DNA, 1209 bp, Homo Sapiens
  NM_001032391
agccggcgtgggcggcgtcactgagccgcgccagctgagccaggtagggccctaccctcttctgttgctttctccctgtggctcgcgccgtcccccgccgcccgtcgaccccgcttccatgtccctggcggacacagctcccaggaacctccacgcccatggccactaggcagagggaatcctctatcacctcctgctgttccacctcgagctgcgacgcagacgacgagggcgtgcgcggcacctgcgaagatgcttccctgtgcaagaggtttgcagtaagcattggctactggcatgacccttacatacagcactttgtgagactgtctaaagagaggaaagcccctgaaatcaacagaggatattttgctcgagtccatggtgtcagtcagcttataaaggcatttctacggaagacagaatgtcattgtcaaattgtcaaccttggggcaggcatggataccaccttctggagattaaaggatgaagatcttctcccaagtaaatattttgaggttgactttccaatgattgtcacgagaaagctgcacagtatcaaattgccaacactcctgatagctgaatgtgtgctggtttacatgactccagagcagtccgcaaacctcctgaagtgggcagccaacagttttgagagagccatgttcataaactacgaacaggtgaacatgggtgatcggtttgggcagatcatgattgaaaacctgcggagacgccagtgtgacctggcgggagtggagacctgcaagtcattagagtcacagaaagaacggctcctgtcgaatgggtgggaaacagcatcggccgtcgacatgatggagttgtacaacaggttacctcgagctgaagtgagcaggatagaatcacttgaattcctggatgaaatggagctgctggagcagctcatgcggcattactgcctttgctgggcaaccaaaggaggaaatgagcttgggctgaaggagataacttattaatctgtcgaaggcttatgccgagccagaagccgaagccacttgccctcctggaggagacctgcaagctccctgagcggtgggcgggcctcgtccgcaggtctcatcccacactcttgagaagccttggtcactacagtggtcgcacatgttcctcttcctgttcctgttgacatgtcgttgtttaaataaatctcacttgccaccagtaaaa

SEQ ID NO: 1005 - DNA, 3011 bp, Homo Sapiens
  NM_001032392
atgtaagtcaacaacatcctgggattgggacacactttctgggcactgctggccagtcccaaaatggaacataaggaagtggttcttctacttcttttatttctgaaatcaggtcaaggagagcccctggatgactatgtgaatacccaggggccttcactgttcagtgtcactaagaagcagctgggggcaggaagcagagaagaatgtgcagcaaaatgtgaagaggacaaagaattcacctgcagggcattccaatatcacagtaaagagcaacaatgtgtgataatggctgaaaacaggaagtcctccataatcattaggatgagagatgcagttttatttgaaaagtaaatgtatctttcagagtgcaagactgggaatggaaagaactacagagggacgatgtccaaaacaaaaaatggcatcacctgtcaaaaatggagttccacttctccccgcaaacctaggtcagacttttcctttcatctttgtgttcatctactgtaaagtgtccgtctgtgtctgtgagggattggttccaggacccctgtggctaccaaaatccatgcttctcaagtcccttatgtaaaatggtgcagtatttgcatataacctacataccttctcttgtgcaatccctaatataatgtaaatgctatgtaatcgttgttatactgtattgtttttatttgtattatgttttattgtcatattgttattttctctcatctttttcaagtcttttccatccacagttggttgaatttgtggatgtggaacccatggatacagagggccaactgtatttaggataatttcatcacttttaattcaaaccagaatatgtgaataagcagacagaaagaatctttttgatgtcgatgttcaactatttttggcaccatagtagaacatggttgctttctattttttcttgggtatggaggtttcttgaagacctagaacatagaagaatgcctagttaaaaaaaaaaatcaatgaaactacgagttttaggccaaatctgagaaaagaccaaagatgactatgtttgggactgaagtaaacatatcaagttagaactctcatcacatgtttgactcaaattgtggagcaaaatagtaaataaaatataaaaatgaaaatgaagatacgtgaaattcaaatgtcacaacttgcctattatttattttagtgcatttttttgtgcttttcccagtttggtgttaggtggccttaagttctcagtaatgacacttatcaaataggaacttagtgttactcacctttatccattcccccaacactcaacaaattgcctttgctatatccctatgagatgagcagatcaaatattccccgtgagttaatgaaaactgattcaaccaaatggcgaagtcagagactatcgggggccatggagacactctgggccatttttatgaggtagtctaggctcatcttcatgagggaactgaggtcttggggggtgggggttacccaaataggttcacagaagaaccagaaataaaacctgcctttctagactgtaagtcttgtgattgtcatctaaatggttgtctctatacagcaactcatctctagaactgaaaataagtttaaatccctcctccatccccaataattcaagctgcatttcagagaaaaccaggactttggaatcagacagatcaactttgacttcttgatctgcttcttcatagctatttatgcttaggcaagttttgttttgttttgttttacgttgccactcagtcttctcatctgtaaaacagggataataacaccttcctcaaatggttttttttattaggactaaaagagagaatgtgtggaaagatgttagtggaattcctggcacatagttcacatggacaaaatggtgttaactacgaaaatttttacagagaaaagggcaactgacaaaagcaggtgtttggaatgaattaagaccatggcaggcttttgaggcctttatatttctcctgactgtgcaataaaaatattttggctctctgtctaagacttggctgtcacagtagcaatggtaatattagctactgtgccagaagcagcctatcaatagagaaattgaaaatctgaccacacaaatgctgcagcacccagctgaaatgcatttggatgacaatctcagatgggaatcgagagcatctccttctgccttgctaatagcaagctgatttttagaatatagtctaagtgcttctcttccatcctccccagattctcacctgctacacacccctcagagggactggaggaatccagacaacgatgcgcaggggccctggtgctatactactgatccagaacagagagatgactactgcgacattcctgagtgtgaagggcaggagtggctctagaaaatgttttcatttctgcccttcacctgtaaaataatttgttgtaaagccccttcccacagggatattattaataattgcgtaacgtgttcacctctcggaaaggagcaaaactttgctcagatcccagaattaacctgattttttttttttttctgagacagaattttgctctcattgcccaggctagagtgcaatggtgcgatctcagctcaccacaacctccgcctccgggttcaagcgattctcctacctcagcctcccaagtagctggaattacatgcatgtgccaccatgcctggctaattttacatttttagtagagacagggtttctccatgttggtcaggctggtcttgaactctcgacctcaggtgagccgcccgcctcagcctcccaaagtgctgggattacaggcatgagccaccatgcccagcagacctgaattattattattaaaatgttacatcaacatgtacaaatataaaactacatctaaactctaagtacagacttcttatgcttaaaactcttacacagtgttaaccccaagacagatttgcaattaagtagttaaaataagacaacaaagtcaataaa

SEQ ID NO: 1006 - DNA, 2554 bp, Homo Sapiens
  NM_001032396
cacaatcacttccgccgccgcagtcgccgcccgccccgctgctgtctggcgggggaggagctcgggaccgggagcagcggctctggcggtcgtggcggtcggagatccgagagctctgcttctctgaaaagcgtgtggctttctggacttgtttcaggccacccacgagccagcgggaaaggattgccagccagagaaagacgaactccgaagtcccaatgcacagatcagcccccagtcaaaccaccaagaggagccgatcgccattttccactactcgtcgtagttgggacgacagcgagagttcgggaaccaacctgaatattgataatgaggactattccaggtatccgccaagagagtacagagcttcgggtagcagaagaggaatggcctatggacatattgactcttatggggcagatgatagtgaggaggagggggctgggcctgttgagcgaccgccagtgagagggaaaactggcaagtttaaagatgataagctgtatgacccagagaaaggggcaaggtctttggctgggccacctccacatttctctagttttagccgtgatgtgagagaggagcgagacaagttagacccagtccctgcagcaagatgctcagctagcagagctgacttcctgccacaaagtagtgtggcctcacagtcgtcttctgaaggcaagctggctacaaaaggtgacagctcggagagggagagaagggagcaaaatttacctgcacgtcccagcagggctcctgtgagtatttgtggtggtggggaaaacacctcaaagagtgcagaggaacctgtggtcaggcccaaaatcagaaacctggcaagtccaaactgcgtgaaaccaaaaattttttttgatactgatgatgatgacgatatgccacacagtacttccaggtggagggataccgccaatgacaatgagggccactcggatggcctggcaagaagagggagaggcgagagttcaagtggctatcccgagccaaagtaccctgaagacaaacgggaagcgaggagtgaccaagtgaaaccagaaaaggtgccgagacgacgacgcaccatggccgaccctgacttctggacgcacagtgatgattactacaaatactgcgacgaagactctgacagtgacaaagagtggattgctgctctgcgtcggaaatatcgaagccgagagcaaaccctgtcctccagtggcgaaagctgggagactctgccggggaaagaagagcgggaacctccacaggctaaggtgagtgccagcactggcaccagccctggccccggtgctagtgccagtgccggggctggcgccggggccagtgctggcagcaatggcagcaattaccttgaagaagttcgagaaccatctcttcaggaagagcaggcatccctggaagaaggagaaattccttggctccagtaccatgagaatgacagtagcagtgagggggataatgattctggtcacgagttgatgcaacctggggtattcatgctggatggaaacaacaaccttgaagatgactccagtgtgagcgaagacctagaagtggattggagcctctttgatggatttgcagatgggttaggagtggctgaagccatttcctatgtggaccctcagttcctcacctacatggcacttgaagaacgcctggcccaggcaatggaaactgcccttgcgcacttggagtctctcgcagtggatgtagaggtggccaatccaccagcaagcaaggagagcattgacgctcttcccgagatcctggtcactgaagatcatggcgcagttggtcaggagatgtgctgccccatctgctgtagcgaatatgtgaagggggaggtggcaactgagctgccgtgccaccactatttccacaagccgtgtgtgtccatctggcttcagaagtcaggcacctgccccgtgtgccgctgcatgttccctcccccactctaaagaccaaggccgtttactcctggtctgattattttccccatctgaaatccacaatactgcaggagccctcttgaaattaacaatggaaataaaaccaatcagtcagttagcctaaacctattgattcctcgtgattatttccaatgtgaaaacagttgtgtatgattgcattaaaaatcatatcatcttttagaggttagaaaagggaaaactaaactttctaaatgctacttgagattgcagtaagaagatacgttttctaacctgaaagttaaatcgcatttgttttcttcagtagaatgggaatgtgttgctgttacttgtaatgtcaagtttatctgttaaatatgtccaaaaggcaaaatcatttttgttgcatgttatgggtcgatgttcctgtaattgcagtgccgtaaaagcttattaaagttgttcttttggttttacatggtataatggaattttttggttttgtctgaagcagtggtactgaatgactttataattgatcccttgcatttgcatcaaaagctttagtttcactggaaatgctgacttcaacaattgca

SEQ ID NO: 1007 - DNA, 2123 bp, Homo Sapiens
  NM_001032731
caagagttggtaagctcgctgcagtgggtggagagaggcctctagacttcagtttcagtttcctggctctgggcagcagcaagaattcctctgcctcccatcctaccattcactgtcttgccggcagccagctgagagcaatgggaaatggggagtcccagctgtcctcggtgcctgctcagaagctgggttggtttatccaggaatacctgaagccctacgaagaatgtcagacactgatcgacgagatggtgaacaccatctgtgacgtcctgcaggaacccgaacagttccccctggtgcagggagtggccataggtggctcctatggacggaaaacagtcttaagaggcaactccgatggtacccttgtcctcttcttcagtgacttaaaacaattccaggatcagaagagaagccaacgtgacatcctcgataaaactggggataagctgaagttctgtctgttcacgaagtggttgaaaaacaatttcgagatccagaagtcccttgatgggttcaccatccaggtgttcacaaaaaatcagagaatctctttcgaggtgctggccgccttcaacgctctgagtaagcattgctgggtgtcaggagagaaaagccaaagaagcgggtgccagacagctctgtgcaacctctaggccatgagtgggatagataccactgctgctttaaaaaatgggagaccatagaccctcaggagagaagaatcccttctaccctggactcgctctcttctctggaactaacttctcccccataccctgattgtctttggagaaaatgttctggattctagaatctaaggcagagccttttaagccatactgtacacataaatcacctggaaccttgttaaaatgcagatcctgactcaggaggtctgagttagagcccaggatttcatatttctagccagctccatgatgagctgctggtccgcagatcatgcttgcaggttttgaccagagtcagtgttggttagagtaagaggatgaggcagacatctgggaaaagtccagctggggcaagcatttgaagtctgccttcctaccaggtcaaaatcaaggcaacgaccttccatagataactatcaaagcttgagggggtgccttgaacccaactcctaaatccctaagacctgcccacctcttgtgtctcctgtctcagcaaacattcccacactcttgcatattgttaaagtaacctctgcttaccaggcttctggtttaataaaagatggctagagtgactccatcttaaagcaagtagctaggcactcaaaaggaacctacaggcttaatacttgggtctgaaaatagccacagtctaagctgaccaccaattataattgcagaatatttaaggccatacaaaacatctcccactaagcctacaaaatgtccaggtgtcctaaaagttcagcccacttaaaggcagcattaatgagcaggtttaggttgaaggattaatggtcatcaataccactgttaagaagaaaattcttggccaaattgaatttaatggagtttaactgagcagacaattcacaaatctagaagcctcctgagccagagtaggttcagagagtcttgaacacagccacgtggtggaagaagatttatggacaggaaaaggaaaatgatgtactgaaaatgaaagtgaggtacagaaacagccagactggttatagctcagcattggccttatttgaacgagatttgaacagttggccacctttgattggccgaaactcagtgattggcacaagagtaggttgcagtctgtttacacatccttttaggttatagttcaccatgtacagagaaattttaggccaaacttaaaatatgtaaggaggcagctttaggctaaacttgatttaacagcaccaataccccctacctttagtgagcacatctgcacattccaattttaatgacagctccttagaatttcttatcaacgaagacactaacaaagaatggcgcattcctccttctcctttctgaggatgccctaccctgtaacaaagtcgtttctaataaatttgcttctttcaccataaaaaaaaaaaaaaaaaaaaaaaaaaaaaaaaaaaaaaa

SEQ ID NO: 1008 - DNA, 3234 bp, Homo Sapiens
  NM_001033
cttgcccagactcaacatggcggctacacgtcgcctgtcagtctgtgaagcctaccccgggcgtgggccgcagcgtcgagtaacgtcattcgaaccccgtcgcgcccctttgtgcgtcacgggtggcgggcgcgggaaggggatttggattgttgcgcctctgctctgaagaaagtgctgtctggctccaactccagttctttcccctgagcagcgcctggaacctaacccttcccactctgtcaccttctcgatcccgccggcgctttagagccgcagtccagtcttggatccttcagagcctcagccactagctgcgatgcatgtgatcaagcgagatggccgccaagaacgagtcatgtttgacaaaattacatctcgaatccagaagctttgttatggactcaatatggattttgttgatcctgctcagatcaccatgaaagtaatccaaggcttgtacagtggggtcaccacagtggaactagatactttggctgctgaaacagctgcaaccttgactactaagcaccctgactatgctatcctggcagccaggatcgctgtctctaacttgcacaaagaaacaaagaaagtgttcagtgatgtgatggaagacctctataactacataaatccacataatggcaaacactctcccatggtggccaagtcaacattggatattgttctggccaataaagatcgcctgaattctgctattatctatgaccgagatttctcttacaattacttcggctttaagacgctagagcggtcttatttgttgaagatcaatggaaaagtggctgaaagaccacaacatatgttgatgagagtatctgttgggatccacaaagaagacattgatgcagcaattgaaacatataatcttctttctgagaggtggtttactcatgcttcgcccactctcttcaatgctggtaccaaccgcccacaactttctagctgttttcttctgagtatgaaagatgacagcattgaaggcatttatgacactctaaagcaatgtgcattgatttctaagtctgctggaggaattggtgttgctgtgagttgtattcgggctactggcagctacattgctgggactaatggcaattccaatggccttgtaccgatgctgagagtatataacaacacagctcgatatgtggatcaaggtgggaacaagcgtcctggggcatttgctatttacctggagccttggcatttagacatctttgaattccttgatttaaagaagaacacaggaaaggaagagcagcgtgccagagatcttttctttgctctttggattccggatctcttcatgaaacgagtggagactaatcaggactggtctttgatgtgtccaaatgagtgtcctggtctggatgaggtttggggagaggaatttgagaaactatatgcaagttatgagaaacaaggtcgtgtccgcaaagttgtaaaagctcagcagctttggtatgccatcattgagtctcagacggaaacaggcaccccgtatatgctctacaaagattcctgtaatcgaaagagcaaccagcagaacctgggaaccatcaaatgcagcaacctgtgcacagaaatagtggagtacaccagcaaagatgaggttgctgtttgtaatttggcttccctggccctgaatatgtatgtcacatcagaacacacatacgactttaagaagttggctgaagtcactaaagtcgttgtccgaaacttgaataaaattattgatataaactactatcctgtaccagaggcatgcctatcaaataaacgccatcgccccattggaattggggtacaaggtctggcagatgcttttatcctgatgagatacccttttgagagtgcagaagcccagttactgaataagcagatctttgaaactatttattatggtgctctggaagccagctgtgaccttgccaaggagcagggcccatacgaaacctatgagggctctccagttagcaaaggaattcttcagtatgatatgtggaatgttactcctacagacctatgggactggaaggttctcaaggagaagattgcaaagtatggtataagaaacagtttacttattgccccgatgcctacagcttccactgctcagatcctggggaataatgagtccattgaaccttacaccagcaacatctatactcgcagagtcttgtcaggagaatttcagattgtaaatcctcacttattgaaagatcttaccgagcggggcctatggcatgaagagatgaaaaaccagattattgcatgcaatggctctattcagagcataccagaaattcctgatgacctgaagcaactttataaaactgtgtgggaaatctctcagaaaactgttctcaagatggcagctgagagaggtgctttcattgatcaaagccaatctttgaacatccacattgctgagcctaactatggcaaactcactagtatgcacttctacggctggaagcagggtttgaagactgggatgtattatttaaggacaagaccagcggctaatccaatccagttcactctaaataaggagaagctaaaagataaagaaaaggtatcaaaagaggaagaagagaaggagaggaacacagcagccatggtgtgctctttggagaatagagatgaatgtctgatgtgtggatcctgaggaaagacttggaagagaccagcatgtcttcagtagccaaactacttcttgagcatagataggtatagtgggtttgcttgaggtggtaaggctttgctggaccctgttgcaggcaaaaggagtaattgatttaaagtactgttaatgatgataatgattttttttttaaactcatatattgggattttcaccaaaataatgcttttgaaaaaaagaaaaaaaaaacggatatattgagaatcaaagtagaagttttaggaatgcaaaataagtcatcttgcatacagggagtggttaagtaaggtttcatcacccctttagcactgcttttctgaagacttcagttttgttaaggagatttagttttactgctttgactggtgggtctctagaagcaaaactgagtgataactcatgagaagtactgataggacctttatctggatatggtcctataggttattctgaaataaagataaacatttctaagtgaaaaaaaaaaaaaaaaaaaaaaaaaaaaaaaaaaaaaaaaaaaa

SEQ ID NO: 1009 - DNA, 1679 bp, Homo Sapiens
  NM_001033002
cggccgccatcttggcccaactgctcccctcactccagttgctcagcccgccgctgagcacagccaatccgcggccgtccactcactgtttcggccaatcaccgagcagacggcccggaagctcgagaggctcgtgccaggtcggggggcgaaggcgaggccagcccaccaagcaggggcgtcaccaagggaaagccaatcaccattatttctgaagcccaagggggcgggacgagaagtcaacataatggtggtgctgctggaaatctagcacctggggagagcctgagacttgtgtatctaattgcctattggacacctccatctgggtaaacccaggcatccagaactttccctcaagacttacctccctcagtgcaggtcgggctggcctcacgcatttcgcttggatgcctaaatctgtctccacgtggggccggtcgataaaacaacacttcccagaatacgctgcgatccattcgcggtctgcacccggaaagtacacctcccaggggtctgtgcgcgcctccagggaacgggtcttgtggctttgtctcccgcgaagaggagatggcggagtcgttgaggtctccgcgccgctccctgtacaaactggtgggctcgccgccttggaaagaggctttccggcagagatgcctggagagaatgagaaacagccgggacaggctcctaaacaggtaccgccaggctggaagcagtgggccagggaattctcagaacagctttctagttcaagaggtgatggaagaagagtggaatgctttgcagtcagtggagaattgtccagaagacttggctcagctggaggagctgatagacatggctgtgctggaggaaattcaacaggagctgatcaaccaagagcagtccatcatcagcgagtatgagaagagcttgcagtttgatgaaaagtgtctcagcatcatgctggctgagtgggaggcaaacccactcatctgtcctgtatgtacaaagtacaacctgagaatcacaagcggtgtggtggtgtgtcagtgtggcctgtccatcccatctcattcttctgagttgacagagcagaagcttcgtgcctgtttagagggtagtataaatgagcacagtgcacattgtccccacacacctgaattttcagtcactggaggaacagaagaaaagtccagtcttctcatgagctgtctggcctgtgatacttgggctgtgatcctctagagccagcttggactcacatcattctatggggttgaagacaactcattccctctgaggagccttgtacatacaagccttttatttataacttattttgtattgaaacttttaaacaatactgaagaaaaaaaaacttttccgacatctgttcttggtcttttgtgacgcaggttgaagggggaggaatagaaaaagacaaactgccttggaggagataaaccaattttatgtctatcatgttatacaaaaatctagaaataatagatttgtacagaaaaaaatgataataaatgagaacacaaaacatataatttaaatttggtattttttcccccatgatattaggatgataatcatttcaaagcacatgtctagcttcagagtaggatttgttcactggccaaagcctgccatgaaactatggctttcagcatctgtctgctctactg

SEQ ID NO: 1010 - DNA, 2754 bp, Homo Sapiens
  NM_001033026
agcagcgccgcagccggacgagaaagcggaagatggcggcggcggccgggaggccgtgaggagagcggcggctgcgagggcggccgatggcggccgggaggcgccctcggacacttgcgggtcgttagggcgcgacgctgggaggcatgtcggagcacgtggagcccgcagctccggggcccgggcccaacggcggcggcggcggcccggcccccgcgcgcgggcctcgcacccccaatctcaaccccaaccccctcatcaacgtgcgcgaccggctcttccacgcgctgttcttcaagatggctgtcacctattcgcggctcttcccgcccgccttccgccgtctcttcgagttcttcgtgctgctcaaggccctgtttgtgctcttcgtcctggcctacatccacatcgtcttctcccgctcgcccatcaactgcctggagcatgtgcgtgacaagtggccgcgtgagggcatcctgcgtgtggaagtgcggcacaactcgagccgcgcgcccgtcttcctacagttctgtgacagcggcggccgcgggagcttcccgggcctggccgtggaaccaggcagcaacctggacatggaagatgaggaggaggaagagctgaccatggagatgtttgggaacagctccatcaagtttgagctggacatcgagcccaaggtgttcaagccgccgagtagcacagaggccctgaatgacagccaggagttccccttccccgagacgcccaccaaagtgtggccgcaggacgagtacatcgtggagtactcactagagtatggcttccttcgcctgtcgcaggccacccgccagcgcctgagcatccccgtcatggtggtcaccctggaccccacgcgggaccagtgcttcggggaccgcttcagccgcctgctgctggatgagttcctgggctacgatgacatcctcatgtccagcgtgaagggcctggccgagaacgaggagaacaagggcttcctgcggaatgtggtgtcgggcgagcactaccgctttgtgagcatgtggatggcgcggacgtcctacctggccgccttcgccatcatggtcatcttcacgctgagcgtgtccatgctgctgcggtactcacaccaccagatcttcgtcttcatcgtggacctgctgcagatgctggagatgaacatggccatcgccttccccgcagcgcccctgctgaccgtcatcctggccctcgtcgggatggaggccatcatgtcggagttcttcaacgacaccaccaccgccttctacatcatcctcatcgtgtggctcgcggaccagtatgacgccatctgctgccacaccagcaccagcaagcggcattggctgcggttcttctatctctaccacttcgccttctatgcctatcactaccgcttcaatgggcagtatagcagcctggccctggtcacctcctggctcttcatccagcattccatgatctacttcttccaccactacgagctgcctgccatcctgcagcaggtccgcatccaggagatgctgcttcaggcgccgccactgggccccgggacccccacggcgctgcccgatgacatgaacaacaactcgggcgccccggctacagcccctgactctgccggccagccccccgccctgggccccgtctcgcctggggccagcgggagtcccgggcctgtggcagcggcgcccagctccctggtggccgcggcagcctcagtggcagcagctgccggtggtgacctgggttggatggcagagaccgctgccatcatcacagacgcctccttcctgtccggcctgagcgcctccctcctggagcggcgtccagccagcccgctgggccctgctgggggcctcccccacgccccccaggacagtgtccccccgagtgactccgcagcttctgacacaactcccctgggggctgcggtaggcgggcctagcccggcctccatggccccaacggaggcgccctcggaggtggggtcctgagccgcacagctgagccgcctctgacccctgctggctgggcctgaccttcccgagcccgtgggggtgggggaggccagccacctccttcctctgggactgcccagcctgtgtcgggggctttcagggtttcgtggggtttgcccggaaggcggctttcctccccctggtgtgaggtcgcgcccgaggcttgtacccgctagtgaggtgtttgagctggtcagcaaggagagggggtggggttccgcggaaggttctggaggggtcttggtaggtctgcagtgaaccgtcctgaggatggagtggggtcccatggtgcaggtctctgagcaaggcggaggtgtggaggagaggccggcttggggtggggcctcgcgccctagtgccggccggcctcagcccggctctgcctggtgctccctgcagtgccttctccatggccccgccctccccgcgtgtgcgccaggcttggggtccccgggagagcagagcttgcgcctcgggcatagggacgtggggtgcaggcgccaacatcagtggcagcagccagggccgtggtccagtcccactcggggatggagtgggccggcggccaaaccagtcactcggggaggaatgcggaggagcgctcattccattctatttaattgcagtgtacaaaattgtgtttgtatatagaataaactgtctgttgacagcggcaaaaaaaaaaaaaaaaaaaaaaaaaaaaaaaaaaaaaaaaaaaaaa

SEQ ID NO: 1011 - DNA, 3351 bp, Homo Sapiens
  NM_001033028
ccggtttaatccacaccgctgcgtctgtcctccgtcctggggctggtcttctccctcatctctgccggaggcttttaatctcttctgccactcttctggaaagtcaccagcaatgcacgctgctggctctgcaggagggtcagggggacggccctcggcctgtgcgtggtgccagccaccctccctgcctccctctgcgtgcgtcccgtgtccctgcctggggtgtgtgtgtcgagtgactaacgtctctctcctgcctctccctcctgtctgtccgtgtctagctctacctggtgcgcaccatggccgagtccttgggctctgccgagctgctcaggcagctcaagtctctgggcatggagaggctcttgcatgcggttaacacgtttctgaggcagtcgtgcacctacctaccccttttaacctttggtggtaagacatcatttgtttctcttgacgtttatggcacggaggcgaactgctccgctacaagttgttctttccccaaagcagcagcaacgtggccgcgtagacaggcacccggacccctcggggagctggtgcggggccctcccgaccagggcgtagcggagcagtccttctctcatgggctttttgagtttggcataactaatgtaccatgtatattttctcccccacaaatgtttccttggataatccagctttacatggtgagaaccatgctagagtccctcattgcagacaaaagtggttccaagaaaaccttgagaagtagccttgaggggcccaccatattggacatagaaaaatttcatcgagagtcattcttctacactcacttgataaatttcagtgaaacgctgcagcagtgctgtgacctttcgcagctgtggttccgagagttcttcctggagctgaccatgggcaggaggatccagttccccattgagatgtcgatgccctggatcctgacggaccacatcctggagaccaaggaggcatcgatgatggagtacgtgctctactccctggacctgtacaatgacagcgcccactacgcgctcaccaggttcaacaagcagttcctgtacgacgaaattgaggccgaggtgaatctatgttttgaccaatttgtttacaagctagcagaccagatatttgcctattataaggttatggcaggaagtttgcttcttgataaacggttacgatcagaatgcaagaatcagggagccacgatccacctcccgccgtctaaccgctacgagacgctgctgaagcagaggcatgtgcagctcctcggcagatcaatagacctcaatcgtctgatcacccagcgcgtctcagcagccatgtataagtccctagaactggcgattggacgatttgaaagtgaagatttgacctccatagttgagctggatggcctgttggaaatcaaccgcatgacccacaagctgctgagccggtacctgacgctggacggcttcgacgccatgttccgggaggccaaccacaacgtgtcagcgccctacgggaggatcaccctgcacgtcttctgggagctcaactatgacttcctgcccaactactgctacaacggctctaccaaccggtttgttcggacagtgttaccattttctcaggaatttcaaagagataagcagcctaatgcacagcctcagtatctgcatggatccaaggctttgaacttggcctactccagcatttacggcagctaccggaacttcgtgggacctccacactttcaagtcatctgccggcttctcggctaccagggtatcgccgtggtcatggaggagctgctgaaggtcgtcaagagcctgctgcaaggcacaatcctgcagtacgtgaagacgctgatggaggtgatgcccaagatctgccgcctgccccggcacgagtacggctctcctggtatcctggagttcttccaccaccagctgaaggacatcgtggagtacgcagagctgaagacggtgtgcttccagaacctgcgggaggtggggaacgccatcctcttctgcctgctcatcgagcagagcctgtctttagaagaagtgtgtgacctgctgcacgcggctcctttccagaacatcttgccgcgagtccatgtgaaagagggggagagacttgatgccaaaatgaaaagactagaatcaaagtacgccccgctgcatcttgtcccactgattgaaagactggggacccctcagcaaattgccatcgcaagagagggggacctgctgacaaaggagcgcctctgctgcggcctgtccatgtttgaggtcatcctgacacggatccggagctttctggatgaccccatctggcgcgggcctctgcccagcaatggggtcatgcatgtggacgagtgtgtggagtttcacagactgtggagtgccatgcagtttgtctactgcattcccgtggggacacacgagttcacagtcgagcagtgctttggtgatgggctacactgggctggctgtatgatcatcgtacttcttgggcagcagcggcgttttgctgtgctggatttctgctaccatctacttaaagtccagaaacatgatggcaaagatgagattattaaaaatgtgcctttgaagaagatggtggagagaattcgcaagttccagattctcaatgatgagatcatcaccatcctggataagtacctgaagtcaggcgacggggagggcacgccagtggagcatgtgcgctgcttccagccgcccatccaccagtccctcgccagcagctgagggcacgcgctgcactccgtaactcaacatggcatgcctttctctccgtaaactatttagtgagatttttagggactatttttcagtatctctgtacctgttaaagggggtgcttttcgatctaaaaacttaattttataaaattgacttatttttctagactaaaattgtatatgcttttggtaattaggaactcttgagaatattggctgctgattgttgccatcacgttcctacaaaattgtttttctatgggatgttctggcagctgtgtcataaaatgctgctgggttcattcattcattccataagaaacttaataccagcaaatgcattaaatcccttgccagttaccattaactgtaactatttagcttttgtttagggatctttctgatggtcttttatgagcaatcttagttctaagtcattgttcccatcccttttttgtgtgtttcagaaaatagtgaacttgattcccctgcttccactaaatccagttgtgacaaaatctaacgtgacatcagatcgaaaggttatagaaataaaactaatgagatctaaaaaaaaaaaaaaaaaa

SEQ ID NO: 1012 - DNA, 1538 bp, Homo Sapiens
  NM_001033030
tgggtccgtggcggcgggaggggtggcctcctgcgctggtcgccccaggggacctgagaggcgcgacaaacagtcggcgcgtttggtactcgcgcctgcagagctttcaacctccgcgccggctgcgcctgtttctcggccaggggagcaaggccacgcggcctacgcagccgagtcggaaccaaccggttgtttggtgaaacctaccccagagcctcccgcggcccacagagcacagacagaatctccctctgtcacccaggctggagtgcagtggcatgatctcggctcactgcaacctccacctcccgggttcaagcgattcttgtgcctcagcctccggagtagctgggatttacagacgtgcgctaccatgcccggcaaatttttctatttttgcaaagacaggatttcaccgttttgtccaggctggtcttgaactattgacctcaagtgatccgaccgccttgacctcccaaagtgctgggattacggggtgtgagccatcgcgcctggccactttctccaaagttttaaaccaaagccttcttcggcagagctacgacccttcctctatggcccattctatcctatgctgcttccctttataaggacactcccactgttgtgctataatcatctcttggtatctccggactctgccactctgagccctccttacagcctagaaaaaatgacagatctcgtagctgtttgggatgttgctttaagtgacggagtccacaagatcgaatttgaacatgggactacatcaggcaaacgagtagtatatgtagatggaaaggaagagataagaaaagagtggatgttcaaattagtgggcaaagaaacattctatgttggagctgcaaagacaaaagcgaccataaatatagacgctatcagtggttttgcttatgaatatactctggaaattaatgggaaaagtctcaagaagtatatggaggacagatcaaaaaccaccaatacttgggtattacacatggatggtgagaactttagaattgttttggaaaaagatgctatggacgtatggtgcaatggtaaaaaattggagacagcgggtgagtttgtagatgatgggactgaaactcacttcagtatcgggaaccatgactgttacataaaggctgtcagtagtgggaagcggaaagaagggattattcatactctcattgtggataatagagaaatcccagagattgcaagttaatgaattttcatcttaagaagtaaagatcaggactttttaattactgtggtaattaaatgtgttcagtatgtacttatcagtacatttagtctgcaatgttttaattttttaaaaagttacatgaaactaacattccaagggtcaggaaaaaaaccaattatgtatagtcataaaaattacaatttatgatgcaaataatgtaaaatgttttaaagacaaatggcaaataagatatggaccaaagtcactaatgttttacaacagtaacctttactataataaatacttttaaaaaaaaaaaaaa

SEQ ID NO: 1013 - DNA, 5030 bp, Homo Sapiens
  NM_001033049
gcggcggcggcggcggcggcggcagcggcggccaagcggccaggttggcggccggggctccgggccgcgcgaggccacggccacgccgcgccgctgcgcacaaccaacgaggcagagcgccgcccggcgcgagactgcggccgaagcgtggggcgcgcgtgcggaggaccaggcgcggcgcggctgcggctgagagtggagcctttcaggctggcatggagagcttaaggggcaactgaaggagacacactggccaagcgcggagttctgcttacttcagtcctgctgagatactctctcagtccgctcgcaccgaaggaagctgccttgggatcagagcagacataaagctagaaaaatttcaagatgaaattgaaatggccaatgagcacaccctcattcatccagcgagcattgaggaccccctagaggccaggcccatgagtgatgaagatcccgaggatgaagacgccttgccagccagacagaaacagtctccgccagtcaagaaaccctcaaaagtattttgccatggatatagaagatgaagaaaacatgagttccagcagcactgatgtgaaggaaaaccgcaatctggacaacgtgtcccccaaggatggcagcacacctgggcctggcgagggctctcagctctccaatgggggtggtggtggccccggcagaaagcggcccctggaggagggcagcaatggccactccaagtaccgcctgaagaaaaggaggaaaacaccagggcccgtcctccccaagaacgccctgatgcagctgaatgagatcaagcctggtttgcagtacacactcctgtcccagactgggcccgtgcacgcgcctttgtttgtcatgtctgtggaggtgaatggccaggtttttgagggctctggtcccacaaagaaaaaggcaaaactccatgctgctgagaaggccttgaggtctttcgttcagtttcctaatgcctctgaggcccacctggccatggggaggaccctgtctgtcaacacggacttcacatctgaccaggccgacttccctgacacgctcttcaatggttttgaaactcctgacaaggcggagcctcccttttacgtgggctccaatggggatgactccttcagttccagcggggacctcagcttgtctgcttccccggtgcctgccagcctagcccagcctcctctccctgtcttaccaccattcccacccccgagtgggaagaatcccgtgatgatcttgaacgaactgcgcccaggactcaagtatgacttcctctccgagagcggggagagccatgccaagagcttcgtcatgtctgtggtcgtggatggtcagttctttgaaggctcggggagaaacaagaagcttgccaaggcccgggctgcgcagtctgccctggccgccatttttaacttgcacttggatcagacgccatctcgccagcctattcccagtgagggtcttcagctgcatttaccgcaggttttagctgacgctgtctcacgcctggtcctgggtaagtttggtgacctgaccgacaacttctcctcccctcacgctcgcagaaaagtgctggctggagtcgtcatgacaacaggcacagatgttaaagatgccaaggtgataagtgtttctacaggaacaaaatgtattaatggtgaatacatgagtgatcgtggccttgcattaaatgactgccatgcagaaataatatctcggagatccttgctcagatttctttatacacaacttgagctttacttaaataacaaagatgatcaaaaaagatccatctttcagaaatcagagcgaggggggtttaggctgaaggagaatgtccagtttcatctgtacatcagcacctctccctgtggagatgccagaatcttctcaccacatgagccaatcctggaagaaccagcagatagacacccaaatcgtaaagcaagaggacagctacggaccaaaatagagtctggtgaggggacgattccagtgcgctccaatgcgagcatccaaacgtgggacggggtgctgcaaggggagcggctgctcaccatgtcctgcagtgacaagattgcacgctggaacgtggtgggcatccagggatccctgctcagcattttcgtggagcccatttacttctcgagcatcatcctgggcagcctttaccacggggaccacctttccagggccatgtaccagcggatctccaacatagaggacctgccacctctctacaccctcaacaagcctttgctcagtggcatcagcaatgcagaagcacggcagccagggaaggcccccaacttcagtgtcaactggacggtaggcgactccgctattgaggtcatcaacgccacgactgggaaggatgagctgggccgcgcgtcccgcctgtgtaagcacgcgttgtactgtcgctggatgcgtgtgcacggcaaggttccctcccacttactacgctccaagattaccaagcccaacgtgtaccatgagtccaagctggcggcaaaggagtaccaggccgccaaggcgcgtctgttcacagccttcatcaaggcggggctgggggcctgggtggagaagcccaccgagcaggaccagttctcactcacgccctgacccgggcagacatgatggggggtgcagggggctgtgggcatccagcgtcatcctccagaacctcacatctgaactgggggcaggtgcataccttggggagggagtagggggacacgggggaccaccaggtgtccacggttgtccccagcatctcacatcagacctggggcaggtgcgcagtgtggggaggggatggggtgcgtcagggcccagcatcgccgcctggcatctctctgccgcagcatttccccttctgaaccgtccagtgactgctttcaatctcggtttacgtttagaaattgagttctactgagtagggcttccttaagtttaggaaaatagaaattactttgtgtgaaattcttgaataaataatttattcagagctaggaatgtggtttataaaataggaagtaattgtgtcaggtcacttttatgccacattattttaattgcaaaaaagcatctatatatggaggagggtgggaaaatagaggtaggaaatagtagcctaaaggaaatcgccacacgtctgtctaaacttaggtctcttttctccgtaggtacctccctgggtagttccacacactaggttgtaacagtctctccctgaggagcagactcccagcatggtgtagcgtggccctgtcatgcacatggggtcccgcagcagtgactgtgtgtcctgcagaggcgtgacccaggcccctgtagccctcagcctcctctagaagcttctgtactccttgtaggatcagatcatggaaaacttttctcagtttacttctaagtaatcacagataatacatggccagtaatcccaggctggccattcattcaggttttttaaaggatatttaacttttatggactagaaggaatcacgagggctactgcacaatacatggcctaagttccctctgttccttcctctgaatcgaatggatgtgggtgaccgcccgaaggccttcacaggatggaagtagaatgatttcagtagatactcattcttggaaaatgccatagttttaaattattgtttccagctttatcaaagacatgtttgaaaaataaaaagcatccaagtgagagctggtgagaccacgtgctgctggcgtagtgtaggccagacattgacagtcctgacgggagctcagggctgcccagcgcccagcgtgcacgggacggccccacgacagagggagtcagcccgggaggtcaggagcgcggcgggcgagggccctgtgtggaccacctccaccaagctcagagatttgcaccaggtgccttgttgcctccgctcaggatgaaagaggagctgagagaagtgctctgcctgccagtgcagtgcccagctccaaggctctagagggtgttcaggtacactgaggaggggacggctccgtcttcacattgtgcacagatctgaggatgggattagcgaagctgtggagactgcacatccggacctgcccatgtctcaaaacaaacacatgtacagtggctctttttccttctcaaacactttaccccagaagcaggtggtctgccccaggcataaagaaggaaaattggccatctttcccacctctaaattctgtaaaattatagacttgctcaaaagattcctttttatcatccccacgctgtgtaagtggaaagggcattgtgttccgtgtgtgtccagtttacagcgtctctgccccctagcgtgttttgtgacaatctccctgggtgaggagtgggtgcacccagccccgaggccagtggttgctcggggccttccgtgtgagttctagtgttcacttgatgccggggaatagaattagagaaaactctgacctgccgggttccagggactggtggaggtggatggcaggtccgactcgaccatgacttagttgtaagggtgtgtcggctttttcagtctcatgtgaaaatcctcctgtctctggcagcactgtctgcactttcttgtttactgtttgaagggacgagtaccaagccacaagaacacttcttttggccacagcataagctgatggtatgtaaggaaccgatgggccattaaacatgaactgaacggttaaaagcacagtctatggaacgctaatggagtcagcccctaaagctgtttgctttttcaggctttggattacatgcttttaatttgattttagaatctggacactttctatgaatgtaattcggctgagaaacatgttgctgagatgcaatcctcagtgttctctgtatgtaaatctgtgtatacaccacacgttacaactgcatgagcttcctctcgcacaagaccagctggaactgagcatgagacgctgtcaaatacagacaaaggatttgagatgttctcaataaaaagaaaatgtttcact

SEQ ID NO: 1014 - DNA, 4083 bp, Homo Sapiens
  NM_001033056
actacttgcggccgaagcgccgcccctggaggccgttgggccggcctgcgccctggggctcgcagtggtttgtttgcgctgtggatggagtggcggtgcggtcccctgtggagcgcaaacaaggcgcttggttggcgcgggcgcctggctgccttcctcgtggtggggccttcggagcaatcgtcctggttctggcgatggttgagacgcctcgattgcggcgtgtaacgaacaccttccaccatgaccacctcagcaagttcccacttaaataaaggcatcaagcaggtgtacatgtccctgcctcagggtgagaaagtccaggccatgtatatctggatcgatggtactggagaaggactgcgctgcaagacccggaccctggacagtgagcccaagtgtgtggaagagttgcctgagtggaatttcgatggctctagtactttacagtctgagggttccaacagtgacatgtatctcgtgcctgctgccatgtttcgggaccccttccgtaaggaccctaacaagctggtgttatgtgaagttttcaagtacaatcgaaggcctgcagagaccaatttgaggcacacctgtaaacggataatggacatggtgagcaaccagcacccctggtttggcatggagcaggagtataccctcatggggacagatgggcacccctttggttggccttccaacggcttcccagggccccagggtccatattactgtggtgtgggagcagacagagcctatggcagggacatcgtggaggcccattaccgggcctgcttgtatgctggagtcaagattgcggggactaatgccgaggtcatgcctgcccagtgggaatttcagattggaccttgtgaaggaatcagcatgggagatcatctctgggtggcccgtttcatcttgcatcgtgtgtgtgaagactttggagtgatagcaacctttgatcctaagcccattcctgggaactggaatggtgcaggctgccataccaacttcagcaccaaggccatgcgggaggagaatggtctgaagtacatcgaggaggccattgagaaactaagcaagcggcaccagtaccacatccgtgcctatgatcccaagggaggcctggacaatgcccgacgtctaactggattccatgaaacctccaacatcaacgacttttctgctggtgtagccaatcgtagcgccagcatacgcattccccggactgttggccaggagaagaagggttactttgaagatcgtcgcccctctgccaactgcgaccccttttcggtgacagaagccctcatccgcacgtgtcttctcaatgaaaccggcgatgagcccttccagtacaaaaattaagtggactagacctccagctgttgagcccctcctagttcttcatcccactccaactcttccccctctcccagttgtcccgattgtaactcaaagggtggaatatcaaggtcgtttttttcattccatgtgcccagttaatcttgctttctttgtttggctgggatagaggggtcaagttattaatttcttcacacctaccctcctttttttccctatcactgaagctttttagtgcattagtggggaggagggtggggagacataaccactgcttccatttaatggggtgcacctgtccaataggcgtagctatccggacagagcacgtttgcagaagggggtctcttcttccaggtagctgaaaggggaagacctgacgtactctggttaggttaggacttgccctcgtggtggaaacttttcttaaaaagttataaccaacttttctattaaaagtgggaattaggagagaaggtaggggttgggaatcagagagaatggctttggtctcttgcttgtgggactagcctggcttgggactaaatgccctgctctgaacacgaagcttagtataaactgatggatatccctaccttgaaagaagaaaaggttcttactgcttggtccttgatttatcacacaaagcagaatagtatttttatatttaaatgtaaagacaaaaaactatatgtatggttttgtggattatgtgtgttttgctaaaggaaaaaaccatccaggtcacggggcaccaaatttgagacaaatagtcggattagaaataaagcatctcattttgagtagagagcaagggaagtggttcttagatggtgatctgggattaggccctcaagacccttttgggtttctgccctgcccaccctctggagaaggtgggcactggattagttaacagacaacacgttactagcagtcacttgatctccgtggctttggtttaaaagacacacttgtccacataggtttagagataagagttggctggtcaacttgagcatgttactgacagagggggtattggggttattttctggtaggaatagcatgtcactaaagcaggccttttgatattaaattttttaaaaagcaaaattatagaagtttagattttaatcaaatttgtagggtttctaggtaatttttacagaattgcttgtttgcttcaactgtctcctacctctgctcttggaggagatggggacagggctggagtcaaaacacttgtaattttgtatcttgatgtctttgttaagactgctgaagaattattttttttcttttataataaggaataaaccccacctttattccttcatttcatctaccattttctggttcttgtgttggctgtggcaggccagctgtggttttcttttgccatgacaacttctaattgccatgtacagtatgttcaaagtcaaataactcctcattgtaaacaaactgtgtaactgcccaaagcagcacttataaatcagcctaacataagatctctctgatgtgtttgtgattctttcaaatccctatgtgccattatatttctttatttcctaaaacaggcaaaataagctcaagtttatgtactctgagtttttaaaacactggagtgatgttgctgaccagccgtttcctgtacctctctaagttgggtatttgggacttaagggattaagtttttcacctagacttagttacacacaatcttggcatttcctagcctagaggtttgtagcagggtacaagccccactcctcccccttcctttgctcccctgagtttggttttggcttaccataacattgttttgaccattcctagcctaatacaatagcctaacataatgtaagattaactggctttacgatttctattctctgctctcagtgataagaaacaaatattagctaccctgctaccctggttgaagccttccaaggctggctatgccctaggcatgggctcatccttgggtgtatcttgccttgcaggaagaccagtggaccgattgtgattctcaaaagctctgtgttgtcacctgtgcccttgccccttgctcttatcttggtccgtgtatctgggagttcttccaccttatcttggccaattcctaccttcgttcattcctcatgaggttgggtaaaagctccctccggctcccatgatgctgtgcatatacctagcaaaaagcaattattggacacattggagtgcaatattattaatagcattaatactactaataatgtgggcaatagtgattgtttttaaaaggcagtatactcttaccagtgcgaggtagctggggcctgtgatagtttttagagataagttcttcaggcaactgtgtattttacactagtcaagtaatcctagatatccgtggtttttcttaagaaagttggctcgtaatatgatttaatattcaaagtagagtcatctacctattagcttgctggcgtggtcctagtttatgcctgtttcagcatgattgttgagtaccctgtttcatccttagcattttcttgattttgttgttaaatgatgtatacccttatttccattgaatctgtgcttccacccccccaactgaagttgtcttccctttgcttggccacccttacagcctcttggatggtgtatcctacagtgtaagcactaaactgaagaggcagtgacctgaaaaaaaaaaaaaaaaaa

SEQ ID NO: 1015 - DNA, 8829 bp, Homo Sapiens
  NM_001033117
cggagcttaagcgttgcagcaggaaaacttccatctcgctctcctggctttgatcctcactggacatcagaccagaggcaccgaagggagggaggatgcgagatgaccggccctttggcaacctgaccatcgacttagcagagccttcaaaagcaagccaggggctggctgcacgaccaaagaggcgccgcgcctctcgtggatgtgtgtgtgtgagtgatccagcgagtgtgtgtgcgtgtgagggtgtgtgtgtgtatgcctgtgtgcacagcacaactgtgtgcgtgtcccggtgagtgtgcctgtgcatgcgtgagtgtgtgtacgtgtgcatgtgtgtgtgagtgcgcttggttattactattattattatttttggaagaaaaatctttgaaaatctggggcaggttactgtgctcctagggtgattcttcttttgcaagaggagctgaccagggcaagctactagagccatttctcggcaagtaaagagatttttccttccagaaggagaaggatttttctccctgctctgcagccaagtgaaagagattagtccctaaacctgtgaaatcgaccagagctgtgtgattaccagggcttgagagaggactcgaaaagaaaaggagaaataaatcaaacagcctgtcagttcctttggccacgtcagaagatgtcatctcaaactaagttcaagaaagacaaagagatcattgctgaatatgaagcccaaataaaagagatccgcacgcagctggtggagcagttcaaatgtctggagcagcaatcagagtcgcgactgcagctgcttcaagacctccaggagtttttccgccggaaagctgagattgagctcgagtactcccgcagcctggagaagctggctgagcgcttctcctccaaaatccgcagctcccgggagcaccagttcaagaaggaccagtacctcctctcgcctgtgaactgttggtatctggttctgcatcagacccggcgggagagccgagaccatgccaccctcaatgacatcttcatgaacaatgtcatcgtccgcctctcccagatcagtgaggatgtcatcagactcttcaaaaagagcaaggagattggcctgcagatgcacgaggagctcctgaaggtgaccaatgagctctacacagtcatgaaaacctaccacatgtaccatgcagagagcatcagtgcggaaagcaagctgaaggaggctgagaagcaggaggagaagcagttcaataagtcaggagacctcagcatgaacctgctccggcacgaggaccggccccagcgccgcagctctgtgaagaagattgagaagatgaaggagaagaggcaggccaagtactctgagaacaagctgaaatgcacaaaggcccggaatgactacttgctcaatctggcagccaccaacgcagctataagcaaatactacatccatgatgtctctgatctgatcgattgctgtgatttgggcttccatgccagcctggcccgcaccttccggacctatctctcagctgaatacaacctggagacctctcgccacgaagggctggatgtcattgagaatgcagtggacaacctggattcccgaagtgacaagcacacagtcatggacatgtgcaatcaagtcttctgccctccactcaagttcgagttccagccccacatgggggatgaggtctgccaggtcagcgctcagcagcccgtccagacagaactgctcatgcgttatcaccagctgcagtccagactggccaccctcaagatagagaatgaggaggttaggaaaaccctggatgccaccatgcagacattacaggacatgctgactgtggaggactttgatgtctccgatgccttccaacacagtcgatcgacagagtccgtcaagtcggctgcctctgagacctacatgagcaagatcaacattgccaagaggagagccaaccagcaggaaacagaaatgttttattttacaaaatttaaagagtatgtgaatggcagtaacctcatcaccaagctgcaggccaagcacgatttactcaagcagaccctgggcgaaggggaaagagcagaatgcggcaccaccagaggaagaagaaatgctcgaaccaggaaccaggattcaggacaagctataccgcttgtagtcgagagctgcatccgttacatcaatttatatggactccagcagcaggggatcttcagagtgccaggatctcaggtggaagtcaatgacatcaaaaattcctttgagagaggtgaagacccccttgtggacgatcaaaatgaacgagatatcaattcagtcgctggtgttttaaaactgtatttccgaggactggaaaacccactctttcctaaggaaaggtttcaagatttgatatctactattaaactggagaacccagccgagagggtgcaccagatccaacaaatcctcgtcacccttccccgcgtggtcattgtggtcatgagatacctcttcgctttcctcaaccacctctcccagtatagcgacgagaacatgatggatccctacaacctggccatctgcttcgggcctaccctcatgcacatccctgatgggcaggaccctgtgtcctgccaggcacacatcaatgaagtcatcaaaaccatcatcatccatcatgaagccatcttccccagcccccgggagctagagggacctgtgtatgaaaaatgcatggctggaggggaagaatattgtgacagcccacacagcgagccaggggccatcgatgaagttgaccatgacaatggcactgagcctcataccagcgatgaagaagtggagcagatcgaggctattgccaagtttgactacatggggcggtccccgcgtgagctatccttcaagaagggggcctcgctgctcctgtaccaccgcgcctcggaggactggtgggagggccggcacaacggcgtggatggactcatcccccatcagtacatagttgtacaggacatggatgatgccttctccgacagcctgagccagaaggctgacagcgaggccagcagtgggccattgctggatgacaaggcctcttccaaaaacgacctccagtcccccacggagcacatctcggattacggctttgggggggtgatgggccgagtgcggttacgatctgatggagcagccatccccagacgccgaagcgggggcgacacacacagcccgccccggggcctgggccccagcatagacacaccaccccgggctgctgcctgccccagcagcccccacaaaatccccctcacccgggggaggatcgagagccctgagaagcggaggatggcgacgttcgggagcgctggcagcatcaactaccctgacaagaaggcgctctccgaagggcactcgatgaggtcgacctgcggttccaccaggcacagcagcctaggggaccacaagtccctggaggccgaggccctggcagaagacatcgagaagaccatgagcacggctctgcacgagttgcgggaactcgagaggcagaacacggtcaagcaggcgccagatgtggtgctggacaccctggagcccctgaagaacccgccaggccccgtcagctcggagcccgccagtccccttcacaccatcgtcatccgcgaccccgatgccgccatgcgccgcagcagcagctcctccaccgagatgatgaccaccttcaagccagccctgtccgcccgcctggctggcgcccagctccgcccgccccccatgcggcccgtgcggccggtggtccagcaccggtccagcagcagcagcagctcgggcgtgggcagcccggccgtgacgcccaccgagaagatgttccccaacagctcagcggacaagtcgggcaccatgtgacctgcaggatgggccgcgccgccgtggcccgctgtggctcaccacggcccagggtggccttggtggcttccacgtgcttcccagtgaccctggccttggagggcagaggtccgtctgggagggtgtgtctgtgcagagctgaggcccgggcgctggctgcagctcacgtccagccatgggaatcccacggacctctcgcgtgtcaacagacgaccagaggagtgctggagctccagcagccccaaccacagcattccctaacatggaggcaaaataccacatggcttctcccgcatatcgtcactggaaacttcctctctcgacattctctctacatacgtatatgtgtgtgtatatcgatgtgtgcatatatacacatgtatacgtatgtacgtgtctgtaggtgtgtgtatatatatatatatttatgcatctatatacatatactagatctggacacacgcatactaagtgtatatagtatctcctttttctttttatgaaacttagatttacctcagatccatgccaccaaacatctcccaccgagttatttggtgggatttgcagggacttttctgggagaacttaaaggcccatagtaactgcgaatgaagcaatataccactaacctgcagaaaaacacaaacaaaaacagactcccactgtctccagaagtcgtggccttccagaacagtctgcccctcaaggaagggtggggcaggcagtacccccaagcaggctgctcccagaggtggggaacccttcataggaaatccccacccccgtccaccccagagaccctgcccttccacccggaggccaaaggccaactgtactcccaaaggcatgggagaaggttggcgagaagacccctgactaccacatccttgtgtttgtgtgtagagacgggggatagtgagaacctaagccccatcgtagcacagtattacatgtggttgggaaaaataaaaatacagtggtgtggaatactccaaaacctagaaatgctgtaggaataaatctgtggtaactatagaggtttaacttatatcattttcaaactatttaattttttcttttcctggttctactaattatactgtgtcagatttggaactaaacaggcaaggaggctttgagtcacatcgttttcattttaaatcaggctgtgatgcactgtggctggtgccgtcttgcatgaaacgcatgagccgtgagcgcccagttcagactggggccagggaggggcagtccttggcactttctgtcctagaggacactgtcagttgagttaatacaagtgacatagcttcccttccctcccccttcacccactccctccagaacatttagtgtagatgaaaatgtggtgatagaaatgggtgcatgatcttcacgtgtgacagccaggcctttgcctcttggccaagtaaagcccttccgggtcgctctccttcgattccattttacctcctcttctgatcacttccagagatgagctgtttctggataatggcacacgggcaaatctgtgtgccctgtgggccgctgttacttaccctctcctgcgagacccaggggcttttccctactgttcccacgcttcctctctctcgaggccactgaagtttggagtcaaaaggcccagagtctgagtcccagccctgagcacttaggagccttctgacttagggtttgtcactccacctcattgagcctgactgttctgctccataaaatagggtaataaaggtcaaacatcagtgagcaagctgtgtacactggaaaacactgaatcaatacaatgcgtttgtgattatcattagtaaggtaagtcttagatcagagccctccagcccttctttttgaaacctcccaatggcatttcagaagtgagcagtggaattttcctgccatcctaataagagccctggattccatcattaacatttcagcccattggatgaagtggtgccctctcctctggtcccccgcgaaaaggtaaatacacccaaagggagggacctagttaagtcactggcacctagataagttaggagggtaaagccactacctcgtctgaaggactggacttgacaccccacagtggaagggagcatcaggagaggaacaaaaaaagggatctcagggagaggccagtgtcaaacttgacctcccttgtttggcctagaatgaacccttctctttagctcctggatatgaaaggccatctgcttggagcacagaaagatattgccattttacagcttaagagagtaaggccttgggctgtgctgtgacctgcccaagatttgacactggctaggagcagaggctgcgtcaggctcttaaagtcatgtgtttgcatgctggatgctatactgtccagccaggacacaagacttctgatttctaccctcaagatactcccagatcctaaatccagtagcctcccaggcaaaatatagcaatctgccacaactgccagatgaaaagcaacaatcagagtagaaaaatctgttgcctgatatacataacaccaatcagaccgtgtggatttttctctgaattgactgattttgtttttttcttactgaaaatggacctgcctttcactgaattttctgagggcagagtcttagctgttttctttaagcaccttttttttttttttccattgggaaatggctgatgagttcacatttagggatgtacacacacagatggcagacgtctccccactcatccagccccagatctgagccttgacgcaggccaagtggaaaaatactttcccgcccccctcccctgttcccacttcctcatctggcactatgcatgtctcactcaccctccacagcactcagtcccatcgacgttcactgaacattggctttctctttctgactcctgcctgttttagtccactatatattgctgtatttgcttaaatgctggaaagtaactgttaaaatgtgaaattgtaatttttaaaaaggctacaattaaattttagccaatgccactcaccaaatctttgcacctagtagatagatcaatgtaaaaacaaatacctaactgtacagtgagtgtgggggaaatgtagtaacctagttagtagtcttcaatataaccaattgtacaaggggaagtggtgtttacctacttgttcatcaccattattgaaagccgtactgatcagttagttgacaacgggcatttttttttctttgcttcatggaatgatttcttttcttaaccttcgacttatcctgaggtcaagccttttgtctttatgtgtaaccgacgttcagtctattctaggaatgaaccagcaagttgttcatttaaaactgaccaaagacaattaattcctggtctagtttcctgggccttgtggctcagctgccactaaagagctttttggataaaattgagaacaagctgtgcttcctaccccactctccccgtccccttttattcccttttcctcttaaagagctgctctgagctgtgggattctatgaaaaattcttgcctttccttgtttcagtgctaacgatttctcacctcgaagcgccttttgaaccccggacagagtgcacaatcggagggaattgcgagcttgggaattagactttggagtcttttctctgaagtcaccaggccaggggtcaggagagagatggattcccaagggatgaaaggtttctattcaatgaagaaatcggagtgggaagagacacagggaaattgagccatattttggctatcggctggaaccagcagttcagagatctgccttataaacatttaaaaccggtttgtggtacacaaagaggaaccagtgtgggaaggggcctttatgtggggctttcttctctgttggagtcccttggagtgccttgttgggtatatttctctgtcattcaggaggcacgaatgtggaggacttctcgtgacctggtcgtgatgtggcattcagtgcatgtccacagctaatggaaaaacacgaggactcgggtaatggttcttcctctcagtctttctattcctaacttttcacacatccagatggttccacactagtgcaaatgcctcactctcctgagaaacccagaaagaagagtggctggctcacaaccatggggttagcccctgctgggctgggagtcggggtggcggccaggaggaaaggcagaaaggggtgagccgaggtgttgcctagctgattttctgctgtgcagagctaatgctgacatttcatgtcaacttccccggttctctggggtctcctctcctctgagcagccacatagaacattccccacatatccaaagctgcccaggggagccgagagaagggactttgctgtcaggtccaagccctcctgacctccctgagattgatctgccagtgtcctgctgtccctctgggactggccacatggccatcgctgccccttgttgacacctcctttctgtgtgagttgtccccggccaataacaaagctgttccttgaaccagaacaaccagagtgcacttttccttccttagacggaagtagatcctggctagggtttctgcccaggcccttgttcccggcagtgtgactgtttacatggtttggcaataggtttgattctgattgcttcagagtggctggtctattttgtttcctttggtttccttcctccccaaattgtgacaggaaaaacagaccaaaaccaccctaggaaattgctggttgcctgtccccacgtgatgataaatgttgccctcttctggatatcgtttctctaccttacgaccaaacgcccgtcctatagagtgtctgattggatcctctgtcgcgtattctgatggtgcctgctggtttgacgtggagctatcctgtgaaataaaacagcttaacttttctc

SEQ ID NO: 1016 - DNA, 6651 bp, Homo Sapiens
  NM_001033503
gccggcccggaaggggctgatgcgaactggggccacggcagccatcgcgctttgcagttcggtctcctggtgtacggccaacgccaagtaggggattgcgttccctccagtcgcagagtttccctcttgtcgcccaggctggagtgaagtggcacgatctcggcttactgcaagctccgcctcccgggttcacgccattctcctgcctcagcctcccgagtagctgggactacagaccctatcagatttggatatgtccttcatatttgattggatttacagtggtttcagcagtgtgctacagtttttaggattatataagaaaactggtaaactggtatttcttggattggataatgcaggaaaaacaacattgctacacatgctaaaagatgacagacttggacaacatgtcccaacattacatcccacttccgaagaactgaccattgctggcatgacgtttacaacttttgatctgggtggacatgttcaagctcgaagagtgtggaaaaactaccttcctgctatcaatggcattgtatttctggtggattgtgcagaccacgaaaggctgttagagtcaaaagaagaacttgattcactaatgacagatgaaaccattgctaatgtgcctatactgattcttgggaataagatcgacagacctgaagccatcagtgaagagaggttgcgagagatgtttggtttatatggtcagacaacaggaaaggggagtatatctctgaaagaactgaatgcccgacccttagaagttttcatgtgtagtgtgctcaaaagacaaggttacggagaaggcttccgctggatggcacagtacattgattaacacaaactcacattggttccaggtctcaacgttcaggcttactcagagatttgattgctcaacatgcataacttgaattcaatagacttttgctggttataaaacagatgttttttagattattaatattaaatcaacttaatttgaatgagaattgaaaactgattcaagtaagtttgagtatcacaatgttagctttctaattccataaaagtacttggtttttacagtttataatctgacatcaccccagcgccatttgtaaagagcaactttccagcagtacatttgaagcactttttaacaacatgaaactataaaccatatttaaaagctcatcatgttaaattttttatgtacttttctggaactagtttttaaattttagattatatgtccacctatcttaagtgtacagttaataattagcttattcaatgattgcatgatgccttacagttttcaataactttttttcttatgcaaacgtcatgcaataaaacaaactctaatgtttggcatccttgttgggcaaatgtttcatttaaatgtgtcttatctagctagtatactctgaaaatttgagtatttaatattaggcatatgaagtggttgttgggaaaggagattccttcagaatatttagaatagcgtttaaggctctcaaggcttaggtatttaccatgagatggttgtggtcagttgcacctgataccatgtatccctgaatcatgtgtatttttattagtaatgcagccactaccattgctgatggggtctgtgtcctagtccctgtgggattggccttctgaagaaaagcacatttatggtacacaaggttgattctcagtttggtaggctctatagttccatcccagctgtctaattctgaagtgctccagtcttattggtgcccaatggggtaatctgtgcctcttccccaaaagcaatgacaggcaccagtgtctccacatttagatatattcccagtctctgtacatttaacagtactctctggggcaagcaataagtaggaccttgtgtgcagtttcattgtagagacatgtatatctgaggaataaaacagcttgttctgtgtcagtctgagatatgtggagattttgttcctatcctatagctcttttgtattctttggcatattttatatcctggtagaagaaaacaagtgcttgtttccaattttcttttttcttatttgctctcaggtagttcttactccatacaacaaagactttttgtttgttgggctttttttttttttttttttttgctctgtttcattttgttttagagacggggtttcaccatgttgtccaggctggtctcaaactcctgacctcaagtgatctgcccgccttggcctcccaaagttctgggattataggcgtgagctaccatgcctgacctgacttttgtttttagatattatgcttgccatgtgatagggcctgcaagcctcattgctaggcttactaagaaaattttagtttttcaaaagcattataatttcctaagaaactgaattctttttttatatgtttgagattcccatcattagtaatataagatgaaaggtaagtgccaaaaatgtatttttaaagaccctcaagtttaagatttatcctgattataagccaagttttatagtatatttaaccaattccatcaagaataattttaatatcaaaaattagtgttttctgtagccattgtccatgtcagagttacagtcctttttgtcattgataatataacctatgaagcagataaggattgaggaatatgactggaaggaattactatttagctaagctgacaaggtcgcttcttaagatgacatttggtttcagtaatctgactattctgttttcactttcatcttctttctaaatgaaaacaaaagtgctccctcccttcctggaaacctcagtaacactatgggaaaagtagaacatgacattgcagcctattgatttcttcttccagataggtttaaagtactccttaagttctgactaaatagaactaagccttattaaaaataactgcctcttgttcatgttatctgtaccttcagggacctgcctttcttcaagtatttcctagagtatctattatgatactgaagaagctaattatttgtgttgtaaatgggtataaatgaaaaaaaaacatactggtttctctagccaggaaaaatgctttctggtgtaatatatcttgctccagaaccctcattctaattgtaacactaggatcaaagaaacaaagtcactttgtggaccacagctaaactgtggatattttcccaaagacataagatttttatggcccgagcctctagaaaggaagccatgtttaggagcaaccagctttcctcccagctttagggggcagagttcctgagccagaggacttactgtccagctttgagaacctctccagagtatatgcactgggtactgctctttttcaagagaaccaaattaagaggatggcaagaaacagtagaagcacagaggaaagacaactctgcatgtgcctgtgtgaatgtgtgcatccatggagtatttcccaggtaaatactagtactggggacataggctaattgtgtgtcccacactgcaagatgctagggcgtagttaacactgtggtatacatacaaatcaggcactgtccaaaagattttttaaaatctaaagtctgaaatgtaaaaatataaggtctcaacccacttttacacttttaaagagatcccatacctgtttcactgactgccgttaattacacttttggatcacagctggttaaattgatagatttcagtttatctcagtgaatttttagaatggagattatagcattttttaattggagaacagacatttcctaaagtatatgaaaaaaaattattcactgttggtttaaaccagtatctttgtatgagtgccaaagatatatgaacacagatactgcctgtgcagacctaaattttagttttgtgtacctggatccatatacaaattttttgtggtttatagcataaaagcagaacgttgtttctttcttagttttcaaccggctcatcttttgtttttgttttttgtttttttgttttttgttttttttgagatggagtcttgctttgttgcccaggctagagtgcagtggcacaatctctgcttactgcaacctccacctccggggttcaagtgattctcctgcctcagcctcctgagtagctgggactacaggcgcgcaccaccatgcccggctaatttttgtatttttagtagagatggggtttcactatgttggccaggctggtctcgaactcctgacctcgtgatctgcccacctcagcctcccaaagtgctgggattacaggcgtgagccgccatgcccggccaattttcaactggcccatactttatagtgatggaaagcgcataaactacttgtaaatcattaaaatagggtgataactgtgataatagtgtttcttgcattctagaaaattattttattaactacattcaaaacccagcatttcacaggttccatcattagaaacagtatagttctagttaacatgattggagagtttcaggggaaaggtttacattttctgaaactgtatttggtatgtgactcaatgtggtatttcagtcttgttagtcacttacatgactgacgtttgcaaggatttattgccaagtaaaatttgaccagagtgcactgagaatagctacataaggggaaatctctcaaaattccttctgttcatttaatttggagcatattgtttaaatcattttaaacatatgtaaaaagttgaagcattaaaaaatcttcaagaaacaatgaaaaaatagaaattagcaaacataagtttcttaatgcaaaattaatagtgaataaaatatagcctacattaaaagccagaggctttgctataaatataagagtttagaaaaacagtgtgcttcaattaaggactaaattatcaaaactgcatgtttgttttttcttttcttttcttttttttttgagatgaagtctcactctgttgcccaggctggagtgcagtggtgcgatcttggctcactgcaacctctgcttcccaggttcaagcgattctcgtgcctcaccatcccgagtagctgggattacaggtgcaccacaccatgcccagttaatttttgtatttttagtagagacagggtttcattatttggccaggctggtctcgagctcctgatcttaagtgatccactcgcctcggcctcccaaagtgctgggattatacacatgagccactgtgcccagcctaaaactacatgttgaagcttccggtcatttccattattatccttcttttgaaattcaagttagtgctttttaaccaaataaaagaagaaccagctcttgggatatgtgactctgcctctgtataaagtgactggaattttgttaaaaccgtgtttccacttctgaaccctgttaccattccccctcacaaatccccacccaacacctggattttaaagatcctccagtgtcaagggaagccacagagtctattaaagaggcagttctgaaccaattaatttttgtccttataatttagagcattaaatagctaatatatttaatggcactaattgttgttcacggctttcatcatacttttaaacagaatccaaagtattcaaaggaaagtaagcgaagttatccaaagccaactttgtttcaggtgtgtcccctgccccaaatagattttagggcagaaatagaaaactgagtttacacagaactatttttggaaaagctgcactggagtagatggattcttcttcagcatacttttttgtttgtttgtttgagatggagtcttgctttgtcacccaggctggagtgcagtggtgtgatctccactcactgcaacctccacctcccagcttcaagtgattctcctgcctcaaccttccaagtagcttggattacaggcgtgcgccaccacagctggctaatatttgtattgttagtagagacagggtttcaccatgttgtccaggcttgtcgaacttctgacctcacgtgatccacctgcctcagcctcccaaagtgctagattataggcgtgaaccactgcgcccggccagcatgcattttaaaagtggcttagatttagttttaaatattttggggtgaaaggcaggaacagttctgtttttgacatacaggttttctttgggattgttttcattttcaagtatagattcatgtcagaatggccaacttaacgtgggtttctgtattccctggtgttgctcttaacctgaactcataatcagttgccatactgaggcaagagcactcagggtgaacatagtcaagttactttaaaagtgataaaagtgtttttccatggtgaaaccttcagtatttggctgaatgtaaagtatgttgaagtggtatattgatggtaagttgttaatcactaaccttgtttgcacttttgtacaccactgcttgcactaggatcttggtgtgaattttcaattgttttacagtgtatacagattattaaggataatttatataaagatgtttctgtttaactttgtgtgttttacaacaaagagctataatagatggttaaacgtttttgaattgtgtttatatgttagtttgattatgttctattatcttttcacctgccatgaatttgagtgttaggaagggaaaaataaaatactaatctggtcttgaagaa

SEQ ID NO: 1017 - DNA, 1732 bp, Homo Sapiens
  NM_001033504
cccggggcggggcgcaggcagggaccctccgctcccctctccgtctgccgcccggacgggccaccgcgggggcgcgaggaaggggtgttgggtcgccagggcccgcctcccagctgccccggccgccggggggcctggcggtgacggcggcgcctggcggcggggatttggcgcgggccgggggccgggggccggggcgcgggggcgcgaggctggattcctagggccgcggcgcttcccggcatgctccgctgcaggcccgcgcccgcgcccggactttgccatcggcggggcagtcgcgggatgcgcccgggagccacagcctgagctttagcccatgaggaggatgtgaccgggactgagtcaggagccctctggaagcatggagactgtggtgattgttgccataggtgtgctggccaccatctttctggcttcgtttgcagccttggtgctggtttgcaggcagcgctactgccggccgcgagacctgctgcagcgctatgattctaagcccattgtggacctcattggtgccatggagacccagtctgagccctctgagttagaactggacgatgtcgttatcaccaacccccacattgaggccattctggagaatgaagactggatcgaagatgcctcgggtctcatgtcccactgcattgccatcttgaagatttgtcacactctgacagagaagcttgttgccatgacaatgggctctggggccaagatgaagacttcagccagtgtcagcgacatcattgtggtggccaagcggatcagccccagggtggatgatgttgtgaagtcgatgtaccctccgttggaccccaaactcctggacgcacggacgactgccctgctcctgtctgtcagtcacctggtgctggtgacaaggaatgcctgccatctgacgggaggcctggactggattgaccagtctctgtcggctgctgaggagcatttggaagtccttcgagaagcagccctagcttctgagccagataaaggcctcccaggccctgaaggcttcctgcaggagcagtctgcaatttagtgcctacaggccagcagctagccatgaaggcccctgccgccatccctggatggctcagcttagccttctactttttcctatagagttagttgttctccacggctggagagttcagctgtgtgtgcatagtaaagcaggagatccccgtcagtttatgcctcttttgcagttgcaaactgtggctggtgagtggcagtctaatactacagttaggggagatgccattcactctctgcaagaggagtattgaaaactggtggactgtcagctttatttagctcacctagtgttttcaagaaaattgagccaccgtctaagaaatcaagaggtttcacattaaaattagaatttctggcctctctcgatcggtcagaatgtgtggcaattctgatctgcattttcagaagaggacaatcaattgaaactaagtaggggtttcttcttttggcaagacttgtactctctcacctggcctgtttcatttatttgtattatctgcctggtccctgaggcgtctgggtctctcctctcccttgcaggtttgggtttgaagctgaggaactacaaagttgatgatttcttttttatctttatgcctgcaattttacctagctaccactaggtggatagtaaatttatacttatgtttccctcaaaaaaaaaaaaaaa

SEQ ID NO: 1018 - DNA, 655 bp, Homo Sapiens
  NM_001033505
gcagccattttaattcatatttgagtgggcggtggcgattggtgttggcggtctggctcagctgggcagggggtaactttactgatttgggggtggtttttagtttaatttttcttttctagcttcccatcgacggtcagtgcgcacgttgtaatcagctgaggccatgtcaggagacggagccacggagcaggcagctgagtatgtcccagagaaggtgaagaaagcggaaaagaaattagaagagaatccatatgaccttgatgcttggagcattctcattcgagaggcacagaatcaacctatagacaaagcacggaagacttatgaacgccttgttgcccagttccccagttctggcagattctggaaactgtacattgaagcagaggttactattttattttattttttcttatatcagtattgcagcattcactgtagtgatagaaaacaagttaggaacatagccaattaggacaaggaggatttaaatgtgtcttacctttattttgtaaaataggtataaaggagtaattaaaatgaatttttgaaatttgggtcttttacaagctgatgattgttgcattttggagttgcaacaacattaaaacagtttcaatggtaaaaaaaaaaaaaaaaaaaaaaaaaaaaa

SEQ ID NO: 1019 - DNA, 777 bp, Homo Sapiens
  NM_001033506
gcagccattttaattcatatttgagtgggcggtggcgattggtgttggcggtctggctcagctgggcagggggtaactttactgatttgggggtggtttttagtttaatttttcttttctagcttcccatcgacggtcagtgcgcacgttgtaatcagctgaggccatgtcaggagacggagccacggagcaggcagctgagtatgtcccagagaaggtgaagaaagcggaaaagaaattagaagagaatccatatgaccttgatgcttggagcattctcattcgagaggcacaggtttagtgatataggattacatttccttctctatgggtccaatcacactacttggttctgcagtgaataatattttcataatcctaacattgtaaatgctgtttattggttttcaattttagaatcaacctatagacaaagcacggaagacttatgaacgccttgttgcccagttccccagttctggcagattctggaaactgtacattgaagcagaggttactattttattttattttttcttatatcagtattgcagcattcactgtagtgatagaaaacaagttaggaacatagccaattaggacaaggaggatttaaatgtgtcttacctttattttgtaaaataggtataaaggagtaattaaaatgaatttttgaaatttgggtcttttacaagctgatgattgttgcattttggagttgcaacaacattaaaacagtttcaatggtaaaaaaaaaaaaaaaaaaaaaaaaaaaaa

SEQ ID NO: 1020 - DNA, 979 bp, Homo Sapiens
  NM_001033523
ggagcgcgccagagactggcgggcagctccgcccgcggccgggatgcactaggcaaagccagctgggctcctgagtccggtgggtacttggagaacttattacgtctagctggaggattgtaaatgcaccaatcagcatgctgtgtctagctcaagattttctccatccccttattttgggccagtggctgtcattacatatgagaactcaagctccatgaggagatgtttcattgtcaagagcagtcatgatggcctgcactccacacaatgcaacagagtgaaggagcaggttctggttctttggtgtagtcctgaagcttcctaagaaagttcacatcaggtgatggataggagcaaccctgtaaaaccagccttagactatttttcaaacaggctggtgaattaccagatctccgtcaagtgcagtaaccagttcaagttggaagtgtgtcttttgaatgcagaaaacaaagtcgtggacaaccaggctgggacccagggccagctgaaggtgctgggtgccaacctctggtggccgtacctgatgcacgaacaccccgcctacctgtactcgtgggaggatggtgattgctcacaccaaagccttggacccctcccagcctgtgacctttgtgaccaactccacctacgcagcagacaagggggctctgtatgtggatgtgatccgtgtgaacagctactactcttggtatcgcaactacgggcacctggagttgattcagctgcagctgcccgcccagtttgagaattggtgtaagacatcacaatcccattattcagagcgcgtatggagtggaaacgcttatagggtttcaccaggatccacctctgatgttcagtgaagagtaccagaaaagtctgctagagcagtaccatctgggtctggatcaaaaacgcagaaaatacgtggttggagagctcatctggaattttgccgatttcatgactaaccagt

SEQ ID NO: 1021 - DNA, 3213 bp, Homo Sapiens
  NM_001033566
gccgccgccgccgccgccgccgccgccgccgccgccgccgccgccgccacagcccgctgggccggaggaggcggagctggcgctgtcccggctctcttgcggggaagcaactgagggggcggcgcggcgggccccggcggccgaagaggctggcaggtggcgccgtggggtgggtgctcctggtgagaggagtccactccgtgcgtgcgggcggaggccggcccccgagagccgccgacatgaagaaagacgtgcggatcctgctggtgggagaacctagagttgggaagacatcactgattatgtctctggtcagtgaagaatttccagaagaggttcctccccgggcagaagaaatcaccattccagctgatgtcaccccagagagagttccaacacacattgtagattactcagaagcagaacagagtgatgaacaacttcatcaagaaatatctcaggctaatgtcatctgtatagtgtatgccgttaacaacaagcattctattgataaggtaacaagtcgatggattcctctcataaatgaaagaacagacaaagacagcaggctgcctttaatattggttgggaacaaatctgatctggtggaatatagtagtatggagaccatccttcctattatgaaccagtatacagaaatagaaacctgtgtggagtgttcagcgaaaaacctgaagaacatatcagagctcttttattacgcacagaaagctgttcttcatcctacagggcccctgtactgcccagaggagaaggagatgaaaccagcttgtataaaagcccttactcgtatatttaaaatatctgatcaagataatgatggtactctcaatgatgctgaactcaacttctttcagaggatttgtttcaacactccattagctcctcaagctctggaggatgtcaagaatgtagtcagaaaacatataagtgatggtgtggctgacagtgggttgaccctgaaaggttttctctttttacacacactttttatccagagagggagacacgaaactacttggactgtgcttcgacgatttggttatgatgatgacctggatttgacacctgaatatttgttccccctgctgaaaatacctcctgattgcactactgaattaaatcatcatgcatatttatttctccaaagcacctttgacaagcatgatttggatagagactgtgctttgtcacctgatgagcttaaagatttatttaaagttttcccttacataccttgggggccagatgtgaataacacagtttgtaccaatgaaagaggctggataacctaccagggattcctttcccagtggacgctcacgacttatttagatgtacagcggtgcctggaatatttgggctatctaggctattcaatattgactgagcaagagtctcaagcttcagctgttacagtgacaagagataaaaagatagacctgcagaaaaaacaaactcaaagaaatgtgttcagatgtaatgtaattggagtgaaaaactgtgggaaaagtggagttcttcaggctcttcttggaagaaacttaatgaggcagaagaaaattcgtgaagatcataaatcctactatgcgattaacactgtttatgtatatggacaagagaaatacttgttgttgcatgatatctcagaatcggaatttctaactgaagctgaaatcatttgtgatgttgtatgcctggtatatgatgtcagcaatcccaaatcctttgaatactgtgccaggatttttaagcaacactttatggacagcagaataccttgcttaatcgtagctgcaaagtcagacctgcatgaagttaaacaagaatacagtatttcacctactgatttctgcaggaaacacaaaatgcctccaccacaagccttcacttgcaatactgctgatgcccccagtaaggatatctttgttaaattgacaacaatggccatgtatccccatgcccggttacgctgtatgtgcacctgcaacaggtgtacattttgcatctgtcagaacttcctcaactcagacttgctgcaatctgtaaagaacaaaatcttcactgcagttcttaacaggcacgtgacacaagctgacctcaagagctccacgttttggcttcgagcaagttttggtgctactgtttttgcagttttgggctttgctatgtacaaagcattattgaaacagcgatgatataaaaagaaatactgtccctaccaaaaacaaatacttttatgtacattctgaatgctttaagttctgctagaattattgagatatttatacatgcagagttactttattaatatttgtaattcatgcataagagtattttaatgatagttataactgcagtattggctagcatatggaaagaaaacagctaacagccaaactaaaatggctaaattccagaggccaaaagggaatattttgtaaatatatgtacatattcaggcaagatatggtctcccaagctgagttctagaaatgatgtttctagacatttctaagtggtattgttagtgctcacttggctcactcttctaggtttaagttagcccagagattgtatttactcatggatcactttatttatttcacatttactcagaatgatcctttgggttctataaggacataaggtacaatttgccattgtctctccatttttaaaaacatacaagtcagtgtcagcttaccaacatgacattttttcagtcagttgtggtaggccagccttgaagccatcgcacagtctagaaacttgtgtagctgagtgtgcagctcacctttaagggtgaagttaggtaaaagcaattagcagaggcgttatctatgtgattatgttgcttccttgtcagtatgttgaattttatagccctttcaatgaaataaaaaaaaaatttgtatattaccaatgtttttagtttaaataaagagtcacccttactactgttgaatttcatcccaagtgtaaatcattctataatggctgtgtctgttatagtatattacagtaactgcatgtgtcaccaagtgttctatatcaggctaggataacctagaggcagtaattttttaaatgataaaataaatctaatgaatataaactctcatgataaacctattttttccatcatcagccttttcaagtatttaaataaataactgctgtgtactgtga

SEQ ID NO: 1022 - DNA, 1700 bp, Homo Sapiens
  NM_001033583
cgcccccggacaccgctgtccggctcccgggctgtcctcagcaagggcgcggtctggtactcgtgcgtcttttatcgcctcagtttccctccgccgactagcgcgcggggcccggttctccatcgcgcgcacggcagcctagcgcaatgaggcgggcagcactgcggctttgtgccttgggcaaagggcagcttactcctggaagaggactgactcaaggaccccagaaccccaagaaacagggaatcttccacattcatgaagttcgagataagttgcgggagatagtaggagcatccacaaactggagagaccatgtgaaggcaatggaagaaaggaaattacttcatagtttcttggctaaatcacaggatggactgcctcctaggagaatgaaggacagttatattgaagttctcttgcctttgggcagtgagcctgaattacgagagaaatatttgactgttcaaaacaccgtaagatttggcaggattcttgaggatcttgacagcttgggagttcttatttgttacatgcacaacaaaatccactccgccaagatgtctcctttatcgatagttacagccctggtggataagattgatatgtgtaagaagagcttgagcccagaacaggacattaagttcagtggccatgttagctgggtcgggaagacatccatggaagtgaagatgcaaatgttccagttacatggtgatgaattttgtcctgttttggatgcaacatttgtaatggtggctcgtgattctgaaaataaagggccggcatttgtaaatccactcatccctgaaagcccagaggaagaggagctctttagacaaggggaattgaacaaggggagaagaattgccttcagctccacgtcgttactgaaaatggcccccagcgctgaggagaggaccaccatacatgagatgtttctcagcacactggatccaaagactataagttttcggagtcgagttttaccctctaatgcagtgtggatggagaattcaaaactgaagagtttggaaatttgccaccctcaggagcggaacattttcaatcggatctttggtggtttccttatgaggaaggcatatgaacttgcgtgggctactgcttgtagctttggtggttctcgaccgtttgtggtagcagtagatgacatcatgtttcagaaacctgttgaggttggctcattgctctttctttcttcacaggtatgctttactcagaataattatattcaagtcagagtacacagtgaagtggcctccctgcaggagaagcagcatacaaccaccaatgtctttcatttcacgttcatgtcggaaaaagaagtgccattggttttcccaaaaacatatggagagtccatgttgtacttagatgggcagcggcatttcaactccatgagtggcccagcgaccttgagaaaggactaccttgtggagccctaagaacaccacatttgttgaaaactagcactctacccacagtgacgtggtatctgatgaagacctgatcgagtgtattgattttagtattgcttcgtgtcctccacacaggaggaggatgtattcagcctttaggatgatcagaaaagcagaaagagagagtggccggatggggctgaggggagaaagaattattaaacaataaatactttcaagacaattttaattgtgaaccta

SEQ ID NO: 1023 - DNA, 3914 bp, Homo Sapiens
  NM_001033604
agtggcgtccgttgtaagtgctatgacaacagggcgaagatggctcagagttaggctggagaggggaggtgtcccttccgctgcggccgtcgggtttctgctacatcccattcaccgcctcctccatcctttcctcctcggtgtgagcagcaggacttgcatttgttctcgcctgcctagtgtcttccaagggatagatgccgtttcctctgctggtctctgggggtgacggggggcgcaggggagcttcttgggggaatcactccaactctgtggagctggtggtgctgcctggtggggctctctctttgcccgggacgtggaacaactttcagctggaggacgagagggaatagtgaagctaaaggttgcttttctctgcaccgtccgttcttgctccctctgctccatcactgggaccttgtcaggcgttcataaagcaaaatttgccgaacgagggttcgcagaaaggtggggcagagctcatctgacgtggcatcagtgtgaaagaaaatgtctttatttaaagcccgtgattggtggtctactattctgggagataaagaagaatttgatcaaggctgtttgtgtctggctaatgttgacaatagtggaaatggacaagataaaataattgtgggtagctttatgggatacctaaggatctttagcccccatcctgcaaaaacaggagatggagctcaagccgaagatttgcttctagaagtggatctacgagatccagtacttcaagtggaagtaggaaagtttgtttcaggtaccgaaatgctacatttggctgtgttacattctagaaaactttgtgtctactctgtctcaggaaccttgggtaatgtggaacatgggaaccaatgtcagatgaaattgatgtatgaacataatcttcagagaacagcctgcaatatgacctatggatcatttggtggtgtaaaaggtcgagatttaatttgcatccagtctatggatgggatgctgatggtatttgagcaggagagctatgcttttggaagatttctccctggctttcttctgcctggtcctcttgcctacagttcccgtacagattccttccttactgtctcttcctgccaacaagtggaaagttataagtaccaggtacttgcttttgcaacagatgcagataaaaggcaggagactgaacagcaaaaacttggttctggaaaaagactagttgtggattggactctaaatattggagagcaagcccttgacatatgtattgtctctttcaatcagtcggcatcctctgtttttgttcttggtgagagaaactttttttgccttaaggataatggacaaattcgattcatgaagaagcttgattggagcccaagttgttttctgccatattgctcagtttctgaaggaacaataaatactttgattggaaatcataataacatgctgcatatttatcaagatgtgacactgaagtgggccacccaacttccccacattcctgtagcagtaagagtgggctgtttgcatgatttaaagggagtgatagtcactctgagtgatgatggtcacttgcagtgttcatacctggggacagatccttctctgttccaagctccaaacgttcaatctcgagaactaaactatgatgaacttgatgtagaaatgaaagaacttcagaaaatcatcaaagatgttaacaaatcacaaggtgtttggcccatgactgagagagaagatgacttgaacgtttctgtcgtggtttctcctaactttgattcagtttctcaagcgaccgatgttgaggtgggaactgaccttgtcccttctgtcacggtgaaggtcacactgcagaacagagtgatattgcaaaaagccaaattatcagtctacgtgcaaccaccattagaattgacttgtgatcagttcacctttgaatttatgaatcgaaatcctgatggcattccgcgagttatccaatgtaaatttagacttcccctaaagttaatttgcctaccaggtcagccttcaaaaactgcaagccacaaaattactattgataccaacaaatctccagtcagtcttcttagtctcttcccaggttttgccagtcagtcagatgatgatcaggtgaatgtaatgggttttcacttcttaggaggtgctcgaattactgttcttgcttccaaaacttctcaacgatatcgcattcagagtgaacaatttgaagatctttggctcataaccaatgagcttattcttcgccttcaagaatattttgaaaaacagggagtcaaagattttgcatgttctttttcgggatctataccccttcaagaatattttgagttgattgatcatcattttgagctacggataaatggtgaaaaattagaagaactcttatctgagagagctgtacaatttcgggccattcaacgccggctactagcaagattcaaagataaaactcctgcccctcttcaacacctggacaccttgttagatggaacctacaagcaggtaattgctctagcagatgcagtggaggaaaaccaaggcaatctgttccagtcattcaccaggctgaagagtgccacccatttggtgattctgctgatcgcgctgtggcagaagcttagtgctgaccaggttgctattctggaagcggcatttctgccgctacaagaagacactcaagaattgggctgggaagaaacggtggatgccgccatttcccacctgttgaagacttgcctgtcgaagagttctaaggagcaggctttgaacctcaacagccagctgaacatacccaaagacacaagccaactgaagaaacatatcaccttgctctgcgatagattatccaaaggtggccgtctctgcctaagtaccgatgcagcagccccacagaccatggtcatgccaggtggttgtactacaatcccagagtcagacctagaagaaagatcagtagaacaagactctacagaactgtttaccaaccacagacatctcactgcagagacacccaggcctgaagtttcacccctccaaggagtctcggaataattcaagtagagttgtttggttgagaggaacatccccatctcaaggccgaacctgtgtgaacctcatgccaagcacagatatagggctggcgcaggtgcttcctaaagctcaccttcctggagatgacatgcatagaaagaggggttgggactttttacttcactaggagaacttgtaacaccatggggaagtcagctgaaacttgtcttgttttgccaggaaaggaagtagttgcctttggtcatccatctgctaatagtcacagaatacagtgaaatgacatagttttgggttagattttataatgcaaagattcagatccaaaataatttcataccccattttttcacagaattcttatatagtaaatgtatcaagtttaataaagcatctcattgtcaaataatatcttggattttatttataattagagggatttatgagtgattgctctacattatttcttcaaaggaaaggaaaggaattgaagactttgctactctctggtaagacttgaatgtgattattttataaataaaagaaccactatgaaactttcatgtgatttgttctattaagctaaacgtggaagaagggaagttttctagtattgtatgaaaatgtttaaatattttcaaggaagctagtacattaacatccccttttcattaccccattgggtggcaccttttaaaaatccaggttattaaaggattcacactttattacagttaaaatttaaggtttttatgtgtaagaagtgaaagaaactttgctaatttcaagttcgaattacagttgtgagattgatttatttaaataaaaatatgcctttgccagtt

SEQ ID NO: 1024 - DNA, 1424 bp, Homo Sapiens
  NM_001033667
gctgtggtaagtgcatcctccttcagtctcagttctgaaaatagatcatcatggtggcaccaaagagtcacacagatgactgggctcctgggcctttctccagtaagccacagaggagtcagctgcaaatattctcttctgttctacagacctctctcctcttcctgctcatgggactaagagcctctggaaaggactcagccccaacagtggtgtcagggatcctagggggttccgtgactctccccctaaacatctcagtagacacagagattgagaacgtcatctggattggtcccaaaaatgctcttgctttcgcacgtcccaaagaaaatgtaaccattatggtcaaaagctacctgggccgactagacatcaccaagtggagttactccctgtgcatcagcaatctgactctgaatgatgcaggatcctacaaagcccagataaaccaaaggaattttgaagtcaccactgaggaggaattcaccctgttcgtctatgcaccatttattgaaaagttgtccgtccacgtcatcgagggtgaccaccgcacactcctggagggcagcggcctggagtccatcatcagcaccctggctgagccacgtgtgagcgtgcgggagggctaggccctcgcccccacctgccactggagaccgctccgccatccccacctcaccgccgcgcagcagagctggaagggtcctgccgatgggaccctgccaggcccagtgccactgccccccgaggctgctagacgtgggcgttaggcgtgtcccacccacccgccgcctcccatggcacgtcgggaacaccggagccgccaacttggagactcctggtctgtgaagagccgctgacgcccgcaggaaccgggctgggccttgtgtgccagtggggtttgtgcttggtctttctccgcttggatttgcttatttattgcattgctggtagagactcccaagcctgtccaccctgcaaagactcctcgggcagcatgcgggtcccgcacactgcacccatttcctggatgtcccctgcaggcgcgggaggccatccgggcctgctggctgcggccccctctcagccaggcctggctcagcccactgcgtgggaggtcaccggccactccccgaggagctgggatccccgggatgcaggcccacagtgcggggctgcacccatgatgcggagctggcctccaaccctgcgggccgcgccaggcaccaactcagtgtttgtcagtgtttgtttttccaagaaatggttcaaattgctgctcagatttttaaatttactgtagctgccagtgtacacgtgtggaccccattttatttttacaccaatttggtgaaaatgctgctttcctcagcctccccacaattaaactgcacatggtctctaaaaaaaaaaaaaaaaaa

SEQ ID NO: 1025 - DNA, 2729 bp, Homo Sapiens
  NM_001033714
gtgcgcctgcgtggaacgattctgtggcgagtgccggccgaaagctaggtccggattgcacgtggagggccgcccgaagggcactctcggacattaacccgcattctggtgggtctagaggaaattgggggacgaagagtggcagcactgacctggtctgggacgtggggagaaggtaccatggggcgcaagttggaccctacgaaggagaagcgggggccaggccgaaaggcccggaagcagaagggtgccgagacagaactcgtcagattcttgcctgcagtaagtgacgaaaattccaagaggctgtctagtcgtgctcgaaagagggcagccaagaggagattgggctctgttgaagcccctaagacaaataagtctcctgaggccaaaccattgcctggaaagctaccaaaaggagctgtccagacagctggtaagaagggaccccagtccctatttaatgctcctcgaggcaagaagcgcccagcacctggcagtgatgaggaagaggaggaggaagactctgaagaagatggtatggtgaaccacggggacctctggggctccgaggacgatgctgatacggtagatgactatggagctgactccaactctgaggatgaggaggaaggtgaagcgttgctgcccattgaaagagctgctcggaagcagaaggcccgggaagctgctgctgggatccagtggagtgaagaggagaccgaggacgaggaggaagagaaagaagtgacccctgagtcaggccccccaaaggtggaagaggcagatgggggcctgcagatcaatgtggatgaggaaccatttgtgctgccccctgctggggagatggagcaggatgcccaggctccagacctgcaacgagttcacaagcggatccaggatattgtgggaattctgcgtgattttggggctcagcgggaggaagggcggtctcgttctgaatacctgaaccggctcaagaaggatctggccatttactactcctatggagacttcctgcttggcaagctcatggacctcttccctctgtctgagctggtggagttcttagaagctaatgaggtgcctcggcccgtcaccctccggaccaataccttgaaaacccgacgccgagaccttgcacaggctctaatcaatcgtggggttaacctggatcccctgggcaagtggtcaaagactggactagtggtgtatgattcttctgtgcccattggtgctacccccgagtacctggctgggcactacatgctgcagggagcctccagcatgttgcccgtcatggccttggcaccccaggaacatgagcggatcctggacatgtgttgtgcccctggaggaaagaccagctacatggcccagctgatgaagaacacgggtgtgatccttgccaatgacgccaatgctgagcggctcaagagtgttgtgggcaacttgcatcggctgggagtcaccaacaccattatcagccactatgatgggcgccagttccccaaggtggtggggggctttgaccgagtactgctggatgctccctgcagtggcactggggtcatctccaaggatccagccgtgaagactaacaaggatgagaaggacatcctgcgctgtgctcacctccagaaggagttgctcctgagtgctattgactctgtcaatgcgacctccaagacaggaggctacctggtttactgcacctgttctatcacagtagaagagaatgagtgggtggtagactatgctctgaaaaagaggaatgtgcgactggtgcccacgggcctagactttggccaggaaggttttacccgctttcgagaaaggcgcttccaccccagtctgcgttctacccgacgcttctaccctcatacccacaatatggatgggttcttcattgccaagttcaagaaattttccaattctatccctcagtcccagacaggaaattctgaaacagccacacctacaaatgtagacttgcctcaggtcatccccaagtctgagaacagcagccagccagccaagaaagccaagggggctgcaaagacaaagcagcagctgcagaaacagcaacatcccaagaaggcctccttccagaagctgaatggcatctccaaaggggcagactcagaattgtccactgtaccttctgtcacaaagacccaagcttcctccagcttccaggatagcagtcagccagctggaaaagccgaagggatcagggagccaaaggtgactgggaagctaaagcaacgatcacctaaattacagtcctccaagaaagttgctttcctcaggcagaatgcccctcccaagggcacagacacacaaacaccggctgtgttatccccatccaagactcaggccaccctgaaacctaaggaccatcatcagccccttggaagggccaagggggttgagaagcagcagttgccagagcagccttttgagaaagctgccttccagaaacagaatgatacccccaaggggcctcagcctcccactgtgtctcccatccgttccagccgccccccaccagcaaagaggaagaaatctcagtccaggggcaacagccagctgctgctatcttagatggttgaaaactagacgggtggctcactgccattgtcaccaggttggaactcttgcctctgtgaggatgccttctctactgtgcatacccatgaaatttaatacacattttaaaacctctg

SEQ ID NO: 1026 - DNA, 1201 bp, Homo Sapiens
  NM_001033853
ccagatttggctttatatagcggacccgtaaggccgaccggcctctaccggcgggatttgatggcgtgatgtctcacagaaagttctccgctcccagacatgggtccctcggcttcctgcctcggaagcgcagcagcaggcatcgtgggaaggtgaagagcttccctaaggatgacccgtccaagccggtccacctcacagccttcctgggatacaaggctggcatgactcacatcgtgcgggaagtcgacaggccgggatccaaggtgaacaagaaggaggtggtggaggctgtgaccattgtagagacaccacccatggtggttgtgggcattgtgggctacgtggaaacccctcgaggcctccggaccttcaagactgtctttgctgagcacatcagtgatgaatgcaagaggcgtttctataagaattggcataaatctaagaagaaggcccacctgatggagatccaggtgaacggaggcactgtggccgagaagctggactgggcccgcgagaggcttgagcagcaggtacctgtgaaccaagtgtttgggcaggatgagatgatcgacgtcatcggggtgaccaagggcaaaggctacaaaggggtcaccagtcgttggcacaccaagaagctgccccgcaagacccaccgaggcctgcgcaaggtggcctgtattggggcatggcatcctgctcgtgtagccttctctgtggcacgcgctgggcagaaaggctaccatcaccgcactgagatcaacaagaagatttataagattggccagggctaccttatcaaggacggcaagctgatcaagaacaatgcctccactgactatgacctatctgacaagagcatcaaccctctgggtggctttgtccactatggtgaagtgaccaatgactttgtcatgctgaaaggctgtgtggtgggaaccaagaagcgggtgctcaccctccgcaagtccttgctggtgcagacgaagcggcgggctctggagaagattgaccttaagttcattgacaccacctccaagtttggccatggccgcttccagaccatggaggagaagaaagcattcatgggaccactgaagaaagaccgaattgcaaaggaagaaggagcttaatgccaggaacagattttgcagttggtggggtctcaataaaagttattttccactgacaaaaaaaaaaa

SEQ ID NO: 1027 - DNA, 4108 bp, Homo Sapiens
  NM_001033858
gcttcccggaagtggcggcgcggtcagggctggccttggcttcagctgcggttttggggtcccggactctgggatcggcggcgctatgagttctttcgaggggcagatggccgagtatccaactatctccatagaccgcttcgatagggagaacctgagggcccgcgcctacttcctgtcccactgccacaaagatcacatgaaaggattaagagcccctaccttgaaaagaaggttggagtgcagatgaggaaactgaggaaccagagaggttaaattagttgcccagtgtcacacagccagtaagtggcaggaccaggattccagccagcttgaaggtttatctatactgttcacctgtgactaaggagttgttgttaacgagcccgaaatacagattttggaagaaacgaattagcagtcacaacagcagggttgttcctgttgtctctggcattcagcttgaagttactacaggtcagcccggccagcagtcaggaaggaaagctggaagagaagtggaggggaacagagacaaactggaaggcagaatggcccactaggacagaccgaaacccacttctgtctctcacttcctctggcctcaatagtgctggtctcccgctttggctctgaagcacatgcacctgccccaggactcggaggagctgcacacgggcacccagcagaagctgatgttgctgcggccctgccccagactctgagttaagccagaagatatctattgaaatcgagactcctacccagatatctttagtggatgaagcatcaggagagaaggaagagattgttgtgactctcttaccagctggtcactgtccgggatcagttatgtttttatttcagggcaataatggaactgtcctgtacacaggagacttcagattggcgcaaggagaagctgctagaatggagcttctgcactccgggggcagagtcaaagacatccaaagtgtatatttggatactacgttctgtgatccaagattttaccaaattccaagtcgggaggagtgtttaagtggagtcttagagctggtccgaagctggatcactcggagcccgtaccatgttgtgtggctgaactgcaaagcggcttatggctatgaatatctgttcaccaaccttagtgaagaattaggagtccaggttcatgtgaataagctagacatgtttaggaacatgcctgagatccttcatcatctcacaacagaccgcaacactcagatccatgcatgccggcatcccaaggcagaggaatattttcagtggagcaaattaccctgtggaattacttccagaaatagaattccactccacataatcagcattaagccatccaccatgtggtttggagaaaggagcagaaaaacaaatgtaattgtgaggactggagagagttcatacagagcttgtttttcttttcactcctcctacagtgagattaaagatttcttgagctacctctgtcctgtgaacgcatatccaaatgtcattccagttggcacaactatggataaagttgtcgaaatcttaaagcctttatgccggtcttcccaaagtacggagccaaagtataaaccactgggaaaactgaagagagctagaacagttcaccgagactcagaggaggaagatgactatctctttgatgatcctctgccaatacctttaaggcacaaagttccatacccggaaacttttcaccctgaggtattttcaatgactgcagtatcagaaaagcagcctgaaaaactgagacaaaccccaggatgctgcagagcagagtgtatgcagagctctcgtttcacaaactttgtagattgtgaagaatccaacagtgaaagtgaagaagaagtaggaatcccagcttcactgcaaggagatctgggctctgtacttcacctgcaaaaggctgatggggatgtaccccagtgggaagtattctttaaaagaaatgatgaaatcacagatgagagtttggaaaacttcccttcctccacagtggcagggggatctcagtcaccaaagcttttcagtgactctgatggagaatcaactcacatctcctcccagaattcttcccagtcaacacacataacagaacaaggaagtcaaggctgggacagccaatctgatactgttttgttatcttcccaagagagaaacagtggggatattacttccttggacaaagctgactacagaccaacaatcaaagagaatattcctgcctctctcatggaacaaaatgtaatttgcccaaaggatacttactctgatttgaaaagcagagataaagatgtgacaatagttcctagtactggagaaccaactactctaagcagtgagacacatatacccgaggaaaaaagtttgctaaatcttagcacaaatgcagattcccagagctcttctgattttgaagttccctcaactccagaagctgagttacctaaacgagagcatttacaatatttatatgagaagctggcaactggtgagagtatagcagtcaaaaaaagaaaatgctcactcttagatacctaagaattcaaagcgtttcaacctagagcaaccactaaaaaacctgcacagagatgacagtcaatattacaatagagaaaatacagtacttaaaaatgttcaaataacctggttgggtgtggtggctcacacttgtaatcccagcactttgaggtgggcaatggcttgagcccaggagttcgacaccagcctggccaacacagtgaaatgtgtctctacttacaaaaaaaaaaaaaaaaaaaaaagccaggcatggtggtgggctactctggaggcccttgaggatcacttgagcccaggagattgaggctgcagtgagccatgactgtgccactgcacctctagtctgggtgacagagcaagaccctgtttaaaaaagaaaaaggccaggcacggtggctcatgcctgtaatcccagctacgcaggaggccaaggcaggagaatcacttgaacctgggaggtggtggttgcagtgagctgagattgtgtcattgcactccagcctgggcaacaagagcaaaactctgtctcaaaaaaaaaaaaaaaaaaaaagaaaaaaaaatggtagaactaaacccatacgtatcaatgattacattaaatgtaaatggtctaagtgcatcaatgacaagagacacggaaaaaaccaacataacccagtgatctgctgtctataaagaaagtcaattcaagtgattgataggttaaaaggatggaaaaaccatgtaaacaattaaaaatggagtggttatatggacagtttcctaatgataaaaggtctagttcaccaagaagacaaaataatcctaaacgtatatgcacctaacagctccaaaaatttatgaagctagaacagctgaaaagagacaaactaatgcacaattacagctagggattaatttaacatccctccttagtaacagaactagtatatacacattaatcagtaagaatatagaactgaaaatcataagccgactggattaaattgacatttatagaacacaccaccccaaactagcagaatgtatctcctgaagtacacatggaacattcagcatgatcatatctttgctcataaacacacctgatttaaattgacaaacttggatctagtatgataaactgatggctatagacaaaatcagcaccttatttatccccaaagatgttaagtcacttaaccttgatgtgaatacggtggccaaattagaagcggacaattagaatataaaagaaaatgctcaagaattaaatggtggccaggcacagtaactcctgcctgcaatcccagtactttgggaggctcgcttgagctcagggttttgagtccagcctgggcaacacacagggagaccctgtctccacaaaatgttagccagacatggtggtgtgcacctgtagtcctcgctacttggaaggcttaggtggcaggatggattgagcccaggaggttgaaactgcagtgagctgattgtgcccagcctgggcaacaaagcaagaccccatctcaagaaaaataaattaaaaaaaactaaa

SEQ ID NO: 1028 - DNA, 1076 bp, Homo Sapiens
  NM_001033873
acattcgccgcagccacctcggccgtggcaggaaccgaaacccggagcggccgaagctcagcgctccgctggggcagagggtcgcggcggctgggaacgccgctccccgacgcaccggccgcccccagcgcagcgcgctccgcggggtgctgatctgcctcttctccaagaaactcaaccactagtgacaatgaccagcctcctgactactccttctccaagagaagaactgatgaccaccccaattttacagcccactgaggccctgtccccagaagatggagccagcacagcactcattgcagttgttatcaccgttgtcttcctcaccctgctctcggtcgtgatcttgatcttcttttacctgtacaagaacaaaggcagctacgtcacctatgaacctacagaaggtgagcccagtgccatcgtccagatggagagtgacttggccaagggcagcgagaaagaggaatatttcatctaatgactcccaggccccaaggagcttattcctggctccatcgctaacacgttgactgcttattatgggaaagttttctctgaagccagggagaagcattgattgatgtgggcaaatccaagctccagccaggtcgcagtcccaaatgccgacatcactgactccagggaccagggacatggagaaagctgtttatgatatctttaaccaggccctcttactagagctggtgtttgtgactggccaacaagatgtggctatgccaggggacatctgagtatgtgcccagtcatcttttttcacaggttgaagggagagaaaagattttgagttaaggtcattggctgctctactctgtcccctacctggtcacctagtgatagccccagtggagatactgtccatacaaggtcttcccagaggctggataccacagtaaaaggccaggccaggaggggtaggagactatggagatcttacctcctgataaatgtgctacaccccctaatctgagcccttcctttccgtgttccccaacaacctcatgcttacgtgatttttattcaaattaaaaattttcattgctacagaaatc

SEQ ID NO: 1029 - DNA, 3284 bp, Homo Sapiens
  NM_001034
cccgtgcaccctgtcccagccgtcctgtcctggctgctcgctctgcttcgctgcgcctccactatgctctccctccgtgtcccgctcgcgcccatcacggacccgcagcagctgcagctctcgccgctgaaggggctcagcttggtcgacaaggagaacacgccgccggccctgagcgggacccgcgtcctggccagcaagaccgcgaggaggatcttccaggagcccacggagccgaaaactaaagcagctgcccccggcgtggaggatgagccgctgctgagagaaaacccccgccgctttgtcatcttccccatcgagtaccatgatatctggcagatgtataagaaggcagaggcttccttttggaccgccgaggaggtggacctctccaaggacattcagcactgggaatccctgaaacccgaggagagatattttatatcccatgttctggctttctttgcagcaagcgatggcatagtaaatgaaaacttggtggagcgatttagccaagaagttcagattacagaagcccgctgtttctatggcttccaaattgccatggaaaacatacattctgaaatgtatagtcttcttattgacacttacataaaagatcccaaagaaagggaatttctcttcaatgccattgaaacgatgccttgtgtcaagaagaaggcagactgggccttgcgctggattggggacaaagaggctacctatggtgaacgtgttgtagcctttgctgcagtggaaggcattttcttttccggttcttttgcgtcgatattctggctcaagaaacgaggactgatgcctggcctcacattttctaatgaacttattagcagagatgagggtttacactgtgattttgcttgcctgatgttcaaacacctggtacacaaaccatcggaggagagagtaagagaaataattatcaatgctgttcggatagaacaggagttcctcactgaggccttgcctgtgaagctcattgggatgaattgcactctaatgaagcaatacattgagtttgtggcagacagacttatgctggaactgggttttagcaaggttttcagagtagagaacccatttgactttatggagaatatttcactggaaggaaagactaacttctttgagaagagagtaggcgagtatcagaggatgggagtgatgtcaagtccaacagagaattcttttaccttggatgctgacttctaaatgaactgaagatgtgcccttacttggctgattttttttttccatctcataagaaaaatcagctgaagtgttaccaactagccacaccatgaattgtccgtaatgttcattaacagcatctttaaaactgtgtagctacctcacaaccagtcctgtctgtttatagtgctggtagtatcaccttttgccagaaggcctggctggctgtgacttaccatagcagtgacaatggcagtcttggctttaaagtgaggggtgaccctttagtgagcttagcacagcgggattaaacagtcctttaaccagcacagccagttaaaagatgcagcctcactgcttcaacgcagattttaatgtttacttaaatataaacctggcactttacaaacaaataaacattgtttgtactcacaaggcgataatagcttgatttatttggtttctacaccaaatacattctcctgaccactaatgggagccaattcacaattcactaagtgactaaagtaagttaaacttgtgtagactaagcatgtaatttttaagttttattttaatgaattaaaatatttgttaaccaactttaaagtcagtcctgtgtatacctagatattagtcagttggtgccagatagaagacaggttgtgtttttatcctgtggcttgtgtagtgtcctgggattctctgccccctctgagtagagtgttgtgggataaaggaatctctcagggcaaggagcttcttaagttaaatcactagaaatttaggggtgatctgggccttcatatgtgtgagaagccgtttcattttatttctcactgtattttcctcaacgtctggttgatgagaaaaaattcttgaagagttttcatatgtgggagctaaggtagtattgtaaaatttcaagtcatccttaaacaaaatgatccacctaagatcttgcccctgttaagtggtgaaatcaactagaggtggttcctacaagttgttcattctagttttgtttggtgtaagtaggttgtgtgagttaattcatttatatttactatgtctgttaaatcagaaattttttattatctatgttcttctagattttacctgtagttcatacttcagtcacccagtgtcttattctggcattgtctaaatctgagcattgtctagggggatcttaaactttagtaggaaaccatgagctgttaatacagtttccattcaaatattaatttcagaatgaaacataatttttttttttttttttgagatggagtctcgctctgttgcccaggctggagtgcagtggcgcgattttggctcactgtaacctccatctcctgggttcaagcaattctcctgtctcagcctccctagtagctgggactgcaggtatgtgctaccacacctggctaatttttgtatttttagtagagatggagtttcaccatattggtcaggctggtcttgaactcctgacctcaggtgatccacccacctcggcctcccaaagtgctgggattgcaggcgtgataaacaaatattcttaatagggctactttgaattaatctgcctttatgtttgggagaagaaagctgagacattgcatgaaagatgatgagagataaatgttgatcttttggccccatttgttaattgtattcagtatttgaacgtcgtcctgtttattgttagttttcttcatcatttattgtatagacaatttttaaatctctgtaatatgatacattttcctatcttttaagttattgttacctaaagttaatccagattatatggtccttatatgtgtacaacattaaaatgaaaggctttgtcttgcattgtgaggtacaggcggaagttggaatcaggttttaggattctgtctctcattagctgaataatgtgaggattaacttctgccagctcagaccatttcctaatcagttgaaagggaaacaagtatttcagtctcaaaattgaataatgcacaagtcttaagtgattaaaataaaactgttcttatgtcagtttcaaaaaaaaaaaaaaaaaa

SEQ ID NO: 1030 - DNA, 1603 bp, Homo Sapiens
  NM_001034023
gcaccgccggaagtttctgccgcggctttgcggggacgggggagtggtagtgggggctgcagctgccggacccaggcactgacccttgacctccggtggctcccccatctctcaggcgcgatggctacgggcgcggatgtacgggacattctagaactcgggggtccagaaggggatgcagcctctgggaccatcagcaagaaggacattatcaacccggacaagaaaaaatccaagaagtcctctgagacactgactttcaagaggcccgagggcatgcaccgggaagtctatgccttgctctactctgacaagaaggatgcacccccactgctacccagtgacactggccagggataccgtacagtgaaggccaagttgggctccaagaaggtgcggccttggaagtggatgccattcaccaacccggcccgcaaggacggagcaatgttcttccactggcgacgtgcagcggaggagggcaaggactacccctttgccaggttcaataagactgtgcaggtgcctgtgtactcggagcaggagtaccagctttatctccacgatgatgcttggactaaggcagaaactgaccacctctttgacctcagccgccgctttgacctgcgttttgttgttatccatgaccggtatgaccaccagcagttcaagaagcgttctgtggaagacctgaaggagcggtactaccacatctgtgctaagcttgccaacgtgcgggctgtgccaggcacagaccttaagataccagtatttgatgctgggcacgaacgacggcggaaggaacagcttgagcgtctctacaaccggaccccagagcaggtggcagaggaggagtacctgctacaggagctgcgcaagattgaggcccggaagaaggagcgggagaaacgcagccaggacctgcagaagctgatcacagcggcagacaccactgcagagcagcggcgcacggaacgcaaggcccccaaaaagaagctaccccagaaaaaggaggctgagaagccggctgttcctgagactgcaggcatcaagtttccagacttcaagtctgcaggtgtcacgctgcggagccaacggatgaagctgccaagctctgtgggacagaagaagatcaaggccctggaacagatgctgctggagcttggtgtggagctgagcccgacacctacggaggagctggtgcacatgttcaatgagctgcgaagcgacctggtgctgctctacgagctcaagcaggcctgtgccaactgcgagtatgagctgcagatgctgcggcaccgtcatgaggcactggcccgggctggtgtgctagggggccctgccacaccagcatcaggcccaggcccggcctctgctgagccggcagtgactgaacccggacttggtcctgaccccaaggacaccatcattgatgtggtgggcgcacccctcacgcccaattcgagaaagcgacgggagtcggcctccagctcatcttccgtgaagaaagccaagaagccgtgagaggccccacggggtgtgggcgacgctgttatgtaaatagagctgctgagttggaccaggcaaaaaaaaaaaaaaaaaa

SEQ ID NO: 1031 - DNA, 1563 bp, Homo Sapiens
  NM_001034024
gcaccgccggaagtttctgccgcggctttgcggggacgggggagtggtagtgggggctgcagctgccggacccaggcgcgatggctacgggcgcggatgtacgggacattctagaactcgggggtccagaaggggatgcagcctctgggaccatcagcaagaaggacattatcaacccggacaagaaaaaatccaagaagtcctctgagacactgactttcaagaggcccgagggcatgcaccgggaagtctatgccttgctctactctgacaagaaggatgcacccccactgctacccagtgacactggccagggataccgtacagtgaaggccaagttgggctccaagaaggtgcggccttggaagtggatgccattcaccaacccggcccgcaaggacggagcaatgttcttccactggcgacgtgcagcggaggagggcaaggactacccctttgccaggttcaataagactgtgcaggtgcctgtgtactcggagcaggagtaccagctttatctccacgatgatgcttggactaaggcagaaactgaccacctctttgacctcagccgccgctttgacctgcgttttgttgttatccatgaccggtatgaccaccagcagttcaagaagcgttctgtggaagacctgaaggagcggtactaccacatctgtgctaagcttgccaacgtgcgggctgtgccaggcacagaccttaagataccagtatttgatgctgggcacgaacgacggcggaaggaacagcttgagcgtctctacaaccggaccccagagcaggtggcagaggaggagtacctgctacaggagctgcgcaagattgaggcccggaagaaggagcgggagaaacgcagccaggacctgcagaagctgatcacagcggcagacaccactgcagagcagcggcgcacggaacgcaaggcccccaaaaagaagctaccccagaaaaaggaggctgagaagccggctgttcctgagactgcaggcatcaagtttccagacttcaagtctgcaggtgtcacgctgcggagccaacggatgaagctgccaagctctgtgggacagaagaagatcaaggccctggaacagatgctgctggagcttggtgtggagctgagcccgacacctacggaggagctggtgcacatgttcaatgagctgcgaagcgacctggtgctgctctacgagctcaagcaggcctgtgccaactgcgagtatgagctgcagatgctgcggcaccgtcatgaggcactggcccgggctggtgtgctagggggccctgccacaccagcatcaggcccaggcccggcctctgctgagccggcagtgactgaacccggacttggtcctgaccccaaggacaccatcattgatgtggtgggcgcacccctcacgcccaattcgagaaagcgacgggagtcggcctccagctcatcttccgtgaagaaagccaagaagccgtgagaggccccacggggtgtgggcgacgctgttatgtaaatagagctgctgagttggaccaggcaaaaaaaaaaaaaaaaaa

SEQ ID NO: 1032 - DNA, 1333 bp, Homo Sapiens
  NM_001034025
gagcctcctggggtgtccacgtgagcgcgcgtgagtccgcccccccagtcacgtgaccgctgactcggggcgttctccactatcgcttacctacctccctctgcaggaacccggcgatatggctgccgctgtgccccgcgccgcatttctctccccgctgcttccccttctcctgggcttcctgctcctctccgctccgcatggcggcagcggcctgcacaccaagggcgcccttcccctggatacggtcactttctacaagattatggtgacaagctgaacatggagctgagtgagaaatacaagctggacaaagagagctacccagtcttctacctcttccgggatggggactttgagaacccagtcccatacactggggcagttaaggttggagccatccagcgctggctgaaggggcaaggggtctacctaggtatgcctggttgcctgcctgtatacgacgccctggccggggagttcatcagggcctctggtgtggaggcccgccaggccctcttgaagcaggggcaagataacctctcaagtgtgaaggagactcagaagaagtgggccgagcaatacctgaagatcatggggaagatcttagaccaaggggaggacttcccagcatcagagatgacacggatcgccaggctgattgagaagaacaagatgagtgacgggaagaaggaggagctccagaagagcttaaacatcctgactgccttccagaagaagggggccgagaaagaggagctgtaaaaaggctgtctgtgattttccagggtttggtgggggtagggaggggagagttaacctgctggctgtgagtcccttgtggaatataagggggtagtgggaaaagtggtactaacccacgattctgagccctgagtatgcctggacattgatgctaacatgaccatgcttgggatgtctctagctggtctggggatagctggagcacttactcaggtggctggtgaaatgacacctcagaaggaatgagtgctatagagaggagagaggagtgtactgcccaggtctttgacagatgtaattctcattcaattaaagtttcagtgttttggttaagtggacctgaagccattcttttttcttttcaaattatactttcgtctatgacctgctttcctctttgaatctaagctggtatagactccactttcccagggtaacaaactatcctcataacactgtggaaactggcatacctttgttattttccagtgatattcagactgacatggattgactgtcaatggtaaagtttgtctattttccagtccttaaaactcaatagcagtat

SEQ ID NO: 1033 - DNA, 1644 bp, Homo Sapiens
  NM_001034194
gatgacgtaattttcctgcgcctcggggcgagcagcggcgcgcaaggaaagatcgggttccgtttttcccgcggattctggtgcctgtggggccggtgacccaacaccatgaaggaaacgccactctcaaactgcgaacgccgcttcctactccgtgccatcgaagagaagaagcggctggatggcagacaaacctatgattataggaacatcaggatctcatttggaacagattacggatgctgcattgtggaacttggaaaaacaagagttcttggacaggtttcctgtgaacttgtgtctccaaaactcaatcgggcaacagaaggtattcttttttttaaccttgaactctctcagatggccgctccagctttcgaacctggcaggcagtcagatctcttggtgaagttgaatcgactcatggaaagatgtctaagaaattcgaagtgtatagacactgagtctctctgtgttgttgctggtgaaaaggtttggcaaatacgtgtagacctacatttattaaatcatgatggaaatattattgatgctgccagcattgctgcaatcgtggccttatgtcatttccgaagacctgatgtctctgtccaaggagatgaagtaacactgtatacacctgaagagcgtgatcctgtaccattaagtatccaccacatgcccatttgtgtcagttttgcctttttccagcaaggaacatatttattggtggatcccaatgaacgagaagaacgtgtgatggatggcttgctggtgattgccatgaacaaacatcgagagatttgtactatccagtccagtggtgggataatgctactaaaagatcaagttctgagatgcagtaaaatcgctggtgtgaaagtagcagaaattacagagctaatattgaaagctttggagaatgaccaaaaagtaaggaaagaaggtggaaagtttggttttgcagagtctatagcaaatcaaaggatcacagcatttaaaatggaaaaggcccctattgatacctcggatgtagaagaaaaagcagaagaaatcattgctgaagcagaacctccttcagaagttgtttctacacctgtgctatggactcctggaactgcccaaattggagagggagtagaaaactcctggggtgatcttgaagactctgagaaggaagatgatgaaggcggtggtgatcaagctatcattcttgatggtataaaaatggacactggagtagaagtctctgatattggaagccaagagctggggtttcaccatgttggccagactggactcgagttcctgacctcagatgctcccataatactctcagatagtgaagaagaagaaatgatcattttggaaccagacaagaatccaaagaaaataagaacacagaccaccagtgcaaaacaagaaaaagcaccaagtaaaaagccagtgaaaagaagaaaaaagaagagagctgccaattaaagctaacagttgtatatctgtatatataactattaaaagggatatttattccattctgagaaccctgggtattttttattcacaaatccattataaaatctagcaggattttaaaaatagttttttgtttttaatgtgctttaaaataataaaccttctggagca

SEQ ID NO: 1034 - DNA, 761 bp, Homo Sapiens
  NM_001034833
attgggctgagtcggagacttcctttcctgattggccgtgttgtacggcggcttctcgcgcagctgatgacctggaagtgatgcctaaagctgtggaccgcgtgggctcgcctccctgggactaggtttcagcggccgctgcgatgaccaaaataaaggcagatcccgacgggcccgaggctcaggcggaggcgtgttccggggagcgcacctaccaggagctgctggtcaaccagaaccccatcgcgcagcccctggcttctcgccgcctcacgcggaagctctacaaatgcatcaagaaagcggtgaagcagaagcagattcggcgcggggtgaaagaggttcagaaatttgtcaacaaaggagaaaaagggacctgggtgcagccgcaggctccaagcgccccacctgtgtgataatggtcaagccccatgaggagtaccaggaggcttacgatgagtgcctggaggaggtgcagtccctgcccctacccctatgaggggctccggtagcacctgggcacctgccgctggaagctattgggctggcagcaggacgactggctgtcctcctgcccacccacactgacggcatcttcccagttccccaaggcacgccttcttcccaggcagctctaacagccctttcatgaaggtaatgctagtcttctgtccatcagtgccatttcctgtagaactaaaggctgttccaagaatgtggggtggggaaagtaaatgctaagactaaaaaaaaaaaaaaaa

SEQ ID NO: 1035 - DNA, 7722 bp, Homo Sapiens
  NM_001034841
gtcgctttaaggcggaggcccgggagggggccgacccggctcgccagctccacgctcggctccagactccggcatttcctccccgctagctggcgcggcctcgcctccccctcggaagaggaaactcccggggtccgagtaacagggtcaggcgcggagaggagcggcgggagagccaggagggccgcccagggtaggaggcgagccaggccgggccagaagctggccgacggcggcgcgcgggggcgccgggcggggagggccgctgggccggactcagcgcgcagccggggcagggcgcggcccggggcccgagagcgcagggcgggccgcagctggaaggaacacttgagctgggagaggaggccgagctggagggcggcctccctcgggcctgcgttcgggaagccgccgcggaggaggagacggggacagcggggctgcccgggcgctgtgcgcatgctgggcttgggtcgccgccggggcttgccccctgggctgctcggccaccgccgccccgggcgcccggcatgtcggtgcactacaccctcaatctacgcgtcttctggcccctggtgaccggcctgtgcaccgccctggtgtgcctctaccatgtcctgcggggaagcgggggcgcccgggccgagcccgccgacggcgtggatggcggcttcccgttgcttaaggtggccgtcctgctcctcctcagctatgtcctcctgcgctgtcgccacgctgtccggcagcgcttcctgcccgggtctccccgtctggagggtcacgccgccttctcctcgagacacttccgagagccgggcctcagcatcctgctggagagttactacgagcatgaggtgcgcctgtctccgcacgtgttgggccacagcaaggcgcacgtgagccggatcgtgggcgagctggtgcgggctggccgcgcccgggggtcccccggtctcattcctgggggagcgctggccttggccttccgcggagacttcatccaggtgggcagcgcctacgagcaacataaaatccgccggcccgacagcttcgacgtgctggtgccactgcgcctcccgccgcttgtggcgctggagccacggagcctgggcgaggagccagcgctggccccggccttccgcggctgcttcttgtgcgccctcaaggcaccaccctcaccatcgggggcctcggggggccactggcttcgggactgcaaaccctttgctgatgccttctgcgtggatgtgcgcgggcggcgtcacctctctgctactctggtgctgcgctggttccagtcgcatctgcagcgctccttggccactgtgcgttacagcctggaggggcgctgtcgggtcaccttgaccccaggtggcctggaacagccccccaccttacacatcttgccctgccgcactgactacggctgctgccgcctttctatggctgtgcgtctcatccccgctgtccatctgggagatggggtcttccttgtggcgccaccaccgccacccttgcccagcgcgcccctgttggagctccctgagggcctgcgtgcggaggcactgtggggtgtgaacacagcacgccaggagcagaagctgctgagttggctgcaggaacgggcagctccaggtgcctgctacctcaagtgcctgcagttgcttaaggctctgcgcgatctgggggcccgtgggctggactcagcggccgccacccagtggggacgcatcctatcctcatatgtgctcaagacagtgctgctggcagtgctgctgcgcaagggggcccctgggcaaggctgggacgaggagcacctgggaaggtgtttggaggagttggtgcagttccttagggactgcctgctgcgacgccatacgctcttccactgcgtcctgggccctggtggggcggctgccgaggtgggtcccctgcccaaggcactgagggaagccgccccagttgacctcctggccgctttcgacgggcacgcccgggaacttgcagcagcgcggttgctgtccacgtggcaaaggctgccccagcttctccgggcctacgggggtccccgctaccttgccaggtgccccccaccccggagtcagcgcacccagggcttccttgaaggtgaaccgtaaaccctgacagcacccccacctgaccaaatgctcctaaagcctttcccactgggtgggggtgggaatggcggtgaagccagttaaatgcaagattgcagaaggcattggaaaatttggtggctgccacaagctttagtggcttaaatatcaccttctcgcttcacagtccagtataatatgacatcttcacacccactagagtgtcctgggcaaaccatgggaagacatccaacaggagacccaagaattggttcaaatattgttctgtgtagacggattctgtagaaggatgtggcttttagagaagtccagtagaagaagcaagaactagctgcagggaaagttccttctgtcggtttttagacacagatctctctgcccaaattaaaaaaaaacaaaacaaaacactaaagtttttgacacaattacttgctaggtactgggttcctgattgtctttaaaaagaaaaatctgaatctttatttgcaactggaattgaagttctattttaggggctaatgtttagaggaacataatttccactgttcaaattaatattaatgtatttttaaaatggtgcaatcacaggtgtttgacaagattgtcaacaagttaagtcacatagatggaaaggcaatcgagagttggttagagaagcttccagagaaaatagcactttatattgatcaattcactcattttgtggtaattgctagcaccaagcattgcatctgaaagggaagccagttatatttattattaaatgtacaaccttgaaaagcagccagcatgcttgcctaactaacatcgccgcaggccacaagctgggatatgtacctgtccgtcaacatccattcattaaactacctactaccagccagagatgtctggaaccaaagtagcaaccaaatacatattcaagacaacactggtgaaggcataaaacatgttggctttggagaaagatgtgttttaggctttgcctgtaaaggtgtttctccaaggctggctgctggctggagacagaaaacttttttgttttaaggtttttagcaaactccttcacaaagagatttctttctgagcttaatgagctaatgaagaggaaatgcctgctgcttagcatgtggtttgtgctgggtctctaaccattgatggttcttccttgtccaggcagtcttacgtggtccaagagacctgttgattcagcacaggtcttgcaaaacatttcacttatagttcagtatcttgggctctgtgcttgaagatcagttactccctggtcgtgggcagaggagacaaattaggaaaagagcaagggagacagcccttgacggcagtctgtctcttttctctttaggtgtcagtatcaccaggttgggtgtattttgcagctgggaggagccggtcctggaattcttccttgttctcccaaatttataacagtcctcaattgcagtttaagttcagcatggcccctcatctgcttgcctgattggaaatgcagccagtccaagtgttacaaattgggatttttttgttttctaaataaaaacatgtacttcctcagactcttaaagctaaaatttggaagacagaaatgcctatgtgaatagaatcattgttgaagttctgagctcttttgagggaactctataagccttctttctttaggggatccacttgcctgctgtgggaaatcatagtgagtgatttacaggaatccttctcctccaagctgcattggcttcttatatcctttgcgaccttgggctgaaagagaaacagctgcaaatgttgtgctgtctctttgaggttgtcttggggacagttccccgcaaaggtcattcctagcttttgaggtcaatgttgggtcataaggtactgcattgtgcaaagaagtcagtctgctaactttatgcaaagatagaaactgcacggtattttttaaaattagtttttaaaataaatgccaagagtagatcttatatatatatatatgtatacatattttatatatatatatatttccatactcaaccacaacttcctctgtactcattgtttactacagtgggggacatcaagggttggaaggattataaagctttaaggctgggcgtggtggctcacgcctgtaatcccagcactttgggaggcgaggtgggcggatcacctgaggtcaggagttcaagaccagcctagccaacatagtgaaactctgtctctactaaaaaatacaaaaattagctgggcgtggtggcgggcgcctgtaatcccagatactcgggaggctaaggcaggagaatcacttgaacccgggaggtgaaggttgcagagagccaagatcacaccactgcactccagcctgggtgaccgagcgagactccgtctcaaaaaaaaaaaaaaaaagctttaaaaagctgaattttagaaatatttctagcagtgtcagtgagttcctcttttaatagtgttttaaagtataaatctggtaacatactgttcttgtagttttttgttagttttgtttttcaggttaattacccaaagcctcatccatcctcaaggtttttaaattttatttttttaaaataaattgtgcattgtatttgtgaatttttaaaatattactgttttatttaaatgccatgctgagcaattgttctctgtacatggtaaccaaaacttagagatttcgatcaattttgatcaatgtttagtaaaccaaaacatgtactgtgtacaacggaaataatatggcatattagccaggcatgatggttgcccaagacagttaaattaagctcaattctgtattttattagggctctgttatgtccttcatctgaaatgtacacatttttggtgtatgcttggtactggagattcatatatgcaaatattctcatgcaagaagttccacagtaacaacagcaaaaagaaaaaattagttgtccagccagtgctggaggaaaatgtttctggggaagatgactcagtcattttgtggcgagacaccctttggtaactcccactgaccagtcttgggagccttcctggaatgatcgtgggctgagcggagatgttttttgcaaaatgaaactgaagctgaaagaaaggagaattcgagtgaaccaagagaaatccaaagacctggggaaggaggacttaagatgaaagtgaagcaagagagggaaggggaaatgaagtgaaaatggcgtgagggtgtgagagaggtttgggttaggaaacatgtttttagtgctatttccaaccaggggtcgcaaactcagcagcctgtagaaacaggggtgggaggtgggggggaagctgtgcccacctttaaagagggggccattgctcagccatgcagaaaaaaatggggcaacaagctggaaatcaggttttttttttttaaagtgaaacttgatgatttttaaacaagtaattaaaaaaatgtccaaaacaccatgtgggccaaacatttgtttgagcctgggggccaccagtttgcgaccactgccttacgtagttaacaccctgagtatgtatacagtcatattttttgttttggatatggtagtgttatatatacttgggggcgtgatatttgaagtcatctttatctctcagagttaagctttattgtagaagaaaaaaaaaaaagttaacacagccatagataacacttaactcacagttcccaggaggacacttgatctcgaagctgctctttttgagtcagatcctacatcaaaccacttagggccagtttttggcatttccttcctggtgatttggggtaaacttctttgctctgtcggagtttgcagatgagtaatcagaaggattgcagaataacttgtttctttgtattttattcttacatttaaattaattttggggggttagtggtatcctagctcgtgcctttacagggatgattggtggctagatttggggtgcaagcttcttaggctcataccatttcaactaccaagaacacaggtttttgtttttgttttttgagacagggtctcagtctgttgcccaggctggagtgcagtggcaagattgcagctcattgcagccttgacctcctgggctcaagcgatcctcctgcctcggcctcccaactagctgggaccacaggtatgtgccactacacccagcgaatttttaaattatttgtagagtcagggtctccctatgttgcccaggctggtcttgaactactggactcaagccatcctcccacctcggcctcccaaagtgttgggattataggcgcgagccaccacacctggcctaaaagcgtcgttctgatcagacttcacccctgaatgtttctatcattttcttttctttttttttttttttcgagacagagttttgctcttgttttacaggctggggtgcggtgggatgatcttggctcactgcaatctcctcctcccaggttcaagtgattcttgggccttagcctcccgagtagctgggattacaggcacctgccaccacgcctggctaatatatatatatatatatatatattttttttttttttttttagtagagatggggtttcatcatgttggccaggctggtctcgaactcctgacctcaggtgatctacctgcctcggcctcccaaagtgcagggattacaggtgtgagtgagccaccgcggccggcctctatcattttctgactcagcagctccaccaaaattgacatcctagcaaacactgtgaaggaattaacctaagtgcttccagagcatctcatgtaacctctatggagtaagtcactttttctgtaacatgtggcttttgaccttgatgaagactttgacttctcatccctgtctacatggaggaagatgattcagtggtggggaaaatgaacctcggtaacatttccaatgtccttcaagagggaaacaagttcagtgttatcatcgtggcattcgttagtttttttttttttaaatcacttgtttagatacaactttatttttttatacctacatagcacatgactggggggataaagcatgtataagttgggagagggtaaagaatgtgtgactatgtatacagaaaatagactaaaatgtgcagcaaaatgatatatactgtaatctggtttttgaagtatctactattctggaatattgttaaacaactttttgcttttgaaaaaaaaaggtgccttgattcagttgcgtgacttagaacattcatcctattttattgtgatttttaatgtcttctgaccccaaactgtgtttttggttgcagtctggcggctgcaggcatagcgtcggttttgttccaataacagagaccaaagagttaatcagatatggttcagctgctacaattgtatgattcaaaggcaatttaatcaccccaaatttccatggcccccacagtcaagacctgccattcgttttctcttgcaggttggagtaaatttgcactttgaatcatgtgggtcatttggggaccttgttcttttctattttgctttattaataaaggaacttgtagaaacaaaaaaaaaaaaaaaaaaaaaaa

SEQ ID NO: 1036 - DNA, 2735 bp, Homo Sapiens
  NM_001034914
atgggcatccagggcatggagctgtgcgccatggccgtggtggtgctgctgttcatcgccgtcctcaagcagttcggcatcctggagcccatatccatggaagatagcagcgacagtgagctggagctgtccacggtgcgccaccagccagaggggctggaccagctgcaggcccagaccaagttcaccaagaaggagctgcagtctctctacaggggctttaagaatgagtgtcccacgggcctggtggacgaagacaccttcaaactcatttacgcgcagttcttccctcagggagatgccaccacctatgcacacttcctcttcaacgcctttgatgcggacgggaacggggccatccactttgaggactttgtggttggcctctccatcctgctgcggggcacagtccacgagaagctcaagtgggcctttaatctctacgacattaacaaggatggctacatcaccaaagaggagatgctggccatcatgaagtccatctatgacatgatgggccgccacacctaccccatcctgcgggaggacgcgccggcggagcacgtggagaggttcttcgagaaaatggaccggaaccaggatggggtagtgaccattgaagagttcctggaggcctgtcagaaggatgagaacatcatgagctccatgcagctgtttgagaatgtcatctaggacacgtccaaaggagtgcatggccacagccacctccacccccaagaaacctccatcctgccaggagcagcctccaagaaacttttaaaaaatagatttgcaaaaagtgaacagattgctacacacacacacacacacacacacacacacacacacagccattcatctgggctggcagaggggacagagttcagggaggggctgagtctggctaggggccgagtccaggagccccagccagcccttcccaggccagcgaggcgaggctgcctctgggtgagtggctgacagagcaggtctgcaggccaccagctgctggatgtcaccaagaaggggctcgagtgcccctgcaggggagggtccaatctccggtgtgagcccacctcgtcccgttctccattctgctttcttgccacacagtgggccggccccaggctcccctggtctcctccccgtagccactctctgcccactacctatgcttctagaaagcccctcacctcaggaccccagagggaccagctggggggcaggggggagagggggtaatggaggccaagcctgcagctttctggaaattcttccctgggggtcccaggatcccctgctactccactgacctggaagagctgggtaccaggccacccactgtggggcaagcctgagtggtgaggggccactgggccccattctccctccatggcaggaaggcgggggatttcaagtttagggattgggtcgtggtggagaatctgagggcactctctgccagctccacagggtgggatgagcctctccttgccccagtcctggttcagtgggaatgcagtgggtggggctgtacacaccctccagcacagactgttccctccaaggtcctcttaggtcccgggaggaacgtggttcagagactggcagccagggagcccggggcagagctcagaggagtctgggaaggggcgtgtccctcctcttcctgtagtgcccctcccatggcccagcagcttggctgagccccctctcctgaagcagtgtcgccgtccctctgccttgcacaaaaagcacaagcattccttagcagctcaggcgcagccctagtgggagcccagcacactgcttctcggaggccaggccctcctgctggctgaggcttgggcccagtagccccaatatggtggccctggggaagaggccttgggggtctgctctgtgcctgggatcagtggggccccaaagcccagcccggctgaccaacattcaaaagcacaaaccctggggactctgcttggctgtcccctccatctggggatggagaatgccagcccaaagctggagccaatggtgagggctgagagggctgtggctgggtggtcagcagaaacccccaggaggagagagatgctgctcccgcctgattggggcctcacccagaaggaacccggtcccaggccgcatggcccctccaggaacattcccacataatacattccatcacagccagcccagctccactcagggctggcccggggagtccccgtgtgccccaagaggctagccccagggtgagcagggccctcagaggaaaggcagtatggcggaggccatgggggcccctcggcattcacacacagcctggcctcccctgcggagctgcatggacgcctggctccaggctccaggctgactgggggcctctgcctccaggagggcatcagctttccctggctcagggatcttctccctcccctcacccgctgcccagccctcccagctggtgtcactctgcctctaaggccaaggcctcaggagagcatcaccaccacacccctgccggccttggccttggggccagactggctgcacagcccaaccaggaggggtctgcctcccacgctgggacacagaccggccgcatgtctgcatggcagaagcgtctcccttggccacggcctgggagggtggttcctgttctcagcatccactaatattcagtcctgtatattttaataaaataaacttgacaaaggaaaaaaaaaaaaaaa

SEQ ID NO: 1037 - DNA, 1669 bp, Homo Sapiens
  NM_001035005
ggctcggctgcggatcgtccctccctccggaagtgcggacattgtcagctgcgtttccgcggtcgcgggtgagtgtgcccgggctagcggcctgggttgggctttgtagctgctccgcaggcccagcccgggccgcgctcgcagagtcctaggcggtgcgcggcctcctgcctcctccctcctcggcggtcgcggcccgccggcctccgcggtgcctgccttcgctctcaggttgaggagctcaagcttgggaaaatggtgtgcattccttgtatcgtcattccagttctgctctggatctacaaaaaattcctggagccatatatataccctctggtttcccccttcgttagtcgtatatggcctaagaaagcaatacaagaatccaatgatacaaacaaaggcaaagtaaactttaagggtgcagacatgaatggattaccaacaaaaggaccaacagaaatctgtgataaaaagaaagactaaagaaattttcctaaaggaccccatcatttaaaaaatggacctgataatatgaagcatcttccttgtaattgtctctgacctttttatctgagaccggaattcaggataggagtctagatatttacctgatactaatcaggaaatatatgatatccgtatttaaaatgtagttagttatatttaatgacctcattcctaagttcctttttcgttaatgtagctttcatttctgttattgctgtttgaataatatgattaaatagaaggtttgtgccagtagacattatgttactaaatcagcactttaaaatctttggttctctaattcatatgaatttgctgtttgctctaatttctttgggctcttctaatttgagtggagtacaattttgttgtgaaacagtccagtgaaactgtgcagggaaatgaaggtagaattttgggaggtaataatgatgtgaaacataaagatttaataattactgtccaacacagtggagcagcttgtccacaaatatagtaattactatttattgctctaaggaagattaaaaaaagatagggaaaagggggaaacttctttgaaaaatgaaacatctgttacattaatgtctaattataaaattttaatccttactgcatttcttctgttcctacaaatgtattaaacattcagtttaactggtagttcattttcttttaaagtctattgaaatattcaaaagggaaatttttcaccacgtcagaaggcagaatttggatgttgtgatggcatctgtgtagtggtgggacaacaattactattgttgcgtaacaagacactccaaaatttagtggttttcagcagcagtgactcgactgggcagttctttgctgttctgggctcactcatatggctggctgggcctgggtctggacctgggccgctatgtgatttttatcttgggctttgaaaattcagtgtagggacctataaatattcaaagatgatgagatgcatccttatatattttttgtattcactctgaagctgggaaagattaaaaggaactcctgcccttgggtccctaatgaagtctgggtcctaactcaggctctattaagttctgtggctggtcaagtcactgatttaccttgggctttatttgatataaatcatgtaaatcaaaaaaaaaaaaaaaaa

SEQ ID NO: 1038 - DNA, 1730 bp, Homo Sapiens
  NM_001035247
acttccggtgagcctctggggcgtaccggcttggcgcggcggcagcggcagcggcggctgggagagcggtcggcggggtttcttcgttgcattgcctgagaggagcggagtctgccaggtggtgtccatcatgttctctttcaacatgttcgaccaccctattcccagggtcttccaaaaccgcttctccacacagtaccgctgcttctctgtgtccatgctagcagggcctaatgacaggtcagatgtggagaaaggagggaagataattatgccaccctcggccctggaccaactcagccgacttaacattacctatcccatgctgttcaaactgaccaataagaattcggaccgcatgacgcattgtggcgtgctggagtttgtggctgatgagggcatctgctacctcccacactggatgatgcagaacttactcttggaagaaggcggcctggtccaggtggagagcgtcaaccttcaagtggccacctactccaaattccaacctcagagccctgacttcctggacatcaccaaccccaaagccgtattagaaaacgcacttaggaactttgcctgtctgaccaccggggatgtgattgccatcaactataatgaaaagatctacgaactgcgtgtgatggagaccaaacccgacaaggcagtgtccatcattgagtgtgacatgaacgtggactttgatgctcccctgggctacaaagaacccgaaagacaagtccagcatgaggagtcgacagaaggtgaagccgaccacagtggctatgctggagagctgggcttccgcgctttctctggatctggcaatagactggatggaaagaagaaaggggtagagcccagcccctccccaatcaagcctggagatattaaaagaggaattcccaattatgaatttaaacttggatgaagctggaggcagattcgtcgctttctctggagaaggacagtcattgcgtaaaaagggaagaaagccctaagtgaggactgttggctgattggaaaataataaaagaatcatttgcaacatcttggcttttagttactggcactgacagggacgagcctcatcagagaatactctgttacttaagatttatttagagttacctaagaattattaagtttgacttggaagtggagcagcaggactttgtagttgtatgcttgatttggggaaagacaaagagctgtccctgagggcctgtagatagctgcctcctcacctcttcacgctttcagcttgaggggagctcccactgcctcagcaggagcaattctgcatccctaattctgtcaaaacctatgaaggtgactaaattgtctaacatgaagtgttctttctttttcttcatttatcctttcttttcctacatcaattgcataggtgtcagtctttggcctaaaaaaaggctttaaatagacatgtgttctataagtagtggctgtcccactactgtggctgcaatttaagtatttgacaaagaatgtttctatttttattttacatatttttttcaaaaacaccactcagaagaacctgatctgaatgagtttgcacttttattctcatttcatatggacataactggctccttagtgaacctgttcatagtgaaacaactccatggagaagcaaacatgtgaatgttagaatgaacaaatgctaaagagatgttcctctccttcttccctactccccaactccc

SEQ ID NO: 1039 - DNA, 4161 bp, Homo Sapiens
  NM_001035254
agtctcaccggtccgcccggccgcgcggcgtgagctccccggacatcgcgtctcgggatgctgcaagccagcgcggccgctcgcgcgcagccccgcacctccgcccctgcctctgcctcctgggccatgccctgctgtttacatgccggtgaggtccccggccgctccgaacccctccgagccccggctccccgagggtgaagcccgccggcccgcgaactggactggtggatctctcagacctggggccccggactccgatctccgccgtctccgccaccatcagggcgggatccggctctggtgttttgaggagggggtgtggtgtagggaaaggaatcccgtccctctccaccttttttcgccttcggggcttcagactcagggaactcgctcatggctttcttgatgaagaagaagaaattcaaattccaaactactttcaccctggaggagctgactgcggttcccttcgtgaacggggtcctcttctgcaaggtccggctgctggatggaggggattttgtcagcttgtcgtcaagggaggaggtacaggagaactgtgtgcggtggcgaaagaggttcaccttcgtgtgtaagatgagtgctaacccggccaccggcctgctggacccctgtgtcttccgtgtgtctgtgcgcaaggagctgaaaggcgggaaggcttattccaagctgggcttcgctgacttgaacctggccgagtttgcgggctcgggctccacggtgcgctgctgcctgctcgagggatatgacacgaagaacactcgccaggacaactccatccttaaggtcaccattggtatgttcctgctctctggagatccctgcttcaagacgccaccatcgactgccaagtccatctccatcccaggccaggattcctccctgcagctgacgtgtaagggtggtgggaccagcagtgggggcagcagcaccaactccctgactgggtcccggccccccaaggctcggcccactattctcagctcagggctgccagaggaacccgaccagaacctgtccagccctgaggaggtgttccactctggccactcccgcaactccagctatgccagccagcagtccaagatctccggctacagcacagagcactcgcgctcctccagcctctcagacctgacgcaccgccgcaacacgtccaccagcagcagcgcctctgggggccttggcatgaccgtggagggccctgagggcagtgagcgggagcaccggcccccggagaagccgccgcggccaccccggcccctgcatctgtccgatcgctctttcaggcggaagaaggactcggtggagagccacccgacctgggtggacgacacgcggatcgatgcggatgccatcgtggagaagatcgtgcagagccaggatttcacagatggcagcaacaccgaggacagcaacctccggctgttcgtgagccgcgatggctctgccacgctgagcggcatccagcttgccaccagggtctcttctggggtctacgagccagttgtgattgaaagccattgaggagcaggtgtccgggctggagaagagtcctgctttctctggagtccagacctgtatcattccatgaggaactttccccttcagatcacctctgcgccacatctcatccatgcctcctccatgcactccagtccacactccccgtagcatcattccattgcccctcccatccatgctgggaccctcctggcccaccaaggcccaggcaccactgtgaatattctcctctgaaccactagagggcaggccaggcaggccaggcgggcccgtgcagcttgtgggcaagaaggagctggcaaggaccggcgctgctggagactgacccagccctctggctgaggacatgcagcggctcctaaatgtagagatgcctgtggctgagggggcctctctacctgtgtccccactcactccaggagcactggctttggtcacgtcttagcagcagggccttgctccgttgttcccttgccctggtggtgggggggccagaccacctccggaatcctgccacctgtgactgtctgactgcttagtgcttcagctgtcccttccttgtgtcctgggggacctgctggcggcctcttcctgggagccatgacctcagaccccacccacactccagatcgagacccctgcctccccccggcaaatgtcctcccgctgccttgcagcctgcactttgcacatgctcacccccagcacagtcccactggcccctcacctccccttccctgagctccttcccaaggactcctggtcactgcctgctgtgcagtcagaggcccagggtccagcagcccggcgggaacgggtgctgcctcttcctccagttagctccagctcaggtctgagacccgtgctgagaaaggtctgagcaccgaccgtgccctctgcccagggctgggtcctgagcagctggttttcctgcaggaaggttggagcaagcaaagtccttctctgccctcagggtcagctgcccagactggggcggatgccagagaggcaggtgggctgtggctggactggtccggagctggcttccttaccagaaaagcctcagccttcctctggaagcatcccccgttctgggcaagggggaagggctcctttaaggggtgtgctttcccagtggggagcagtctggccctgccccctactaaagcctctgctctcagcactttcccccaagtccttgtaacttgcttgaaggtgggttctggctgccagccagtccctggacaaactctcctgccccttttaaatttcactcattttgtataaacccagcaggctggtgtttacttagccctgtagcttttttcattttttctttccgtctttcttcttgagttcacggttcaatattgcctcctcgccctggtgaggggaggtgctgcttttctgccccacctgccggctggttccagcagcgctggggcccagctggggggccgggatgggggcttctctctctgggaggggtgcaggtgccctccccaggctgggagggttccttccctagctccccatctgcccccgctggtgagagttgggcttcttggtcttggaactccctggcattgggaacagagcatttccagcatttgttgttgttttactcacctaacccttagaaaatgaatgttagaaggtgcctgccgaggcgggacagagtgttcgctcgcgctggagaaggctctgctcagccctgagagtcccttcctgccccaccgatactggcactttaaaaaggaagctgaccgcacagtgtccagacgaattggcccccagaagatggggagttctgtcctgcccttctgtgtctgcgtgacctcacccagcctaggagggaggtgcattcagggtagatttgcctctcattcaaagttctggggctttgggtggaaaacagccagctttggcgctgttggggagactcctccagaccaggaaccccagaaggagacagagcctgccacatcctcccacgccaggccctgggccagggtgattggactgagaatttggccacaaccaaattgatgctggctggaaccagaggccagaaagcctggccttgtccccatgtgggagccctgtcctcagccctcttgtccccttgagctcagtgaattcccaccaggtgcccacagctcctggacttcaaattctatatattgagagagttggagagtatatcagagatatttttggaaaggagttggtctatgcaatgtcagtttggaatcttcttgaaagtttaatgtttttattaggagatttaaagaaaataaaggtctacaatatctttaggttttttttttttcctgtttaccgcacaaactgaccacatggcatgtctatcaggatggagggtgtccatgttctcctctgtctttagggaggtgataaggagatgggcggaggggtgtttttttctttgactcccctcctttctaacagaatgttgccaccactgcttgagtgggctgtgtttgttcctctgtcccagcttctgttgtagaaaataacattgttaggggaactcaggctagtgtcagcgtcttggtttggggagaaaaaattaaatgtttcggtttttgtttc

SEQ ID NO: 1040 - DNA, 593 bp, Homo Sapiens
  NM_001035267
acccggcgctccattaaatagccgtagacggaacttcgcctttctctcggccttagcgccatttttttgggtgagtgttttttggttcctgcgttgggattccgtgtacaatccatagacatctgacctcggcacttagcatcatcacagcaaactaactgtagcctttctctctttccctgtagaaacctctgcgccatgagagccaagtggaggaagaagcgaatgcgcaggctgaagcgcaaaagaagaaagatgaggcagaggtccaagtaaaccgctagcttgttgcaccgtggaggccacaggagcagaaacatggaatgccagacgctggggatgctggtacaagttgtgggactgcatgctactgtctagagcttgtctcaatggatctagaacttcatcgccctctgatcgccgatcacctctgagacccaccttgctcataaacaaaatgcccatgttggtcctctgccctggacctgtgacattctggactatttctgtgtttatttgtggccgagtgtaacaaccatataataaatcacctcttccgctgttttagctgaagaattaaatcaaaaaaaaaa

SEQ ID NO: 1041 - DNA, 2699 bp, Homo Sapiens
  NM_001035513
gcgtcacttccgtccagaccggaacccaagatggctgcgctgttgctgagttggtctcttcccatggcgatgtccatctgccaccgtggcactggtattgctttgagtgcaggggtctctctttttggcatgtcggccctgttactccctgggaactttgagtcttatttggaacttgtgaagtccctgtgtctggggccagcactgatccacacagctaagtttgcacttgtcttccctctcatgtatcatacctggaatgggatccgacacttgatgtgggacctaggaaaaggcctgaagattccccagctataccagtctggagtggttgtcctggttcttactgtgttgtcctctatggggctggcagccatgtgaagaaaggaggctcccagcatcatcttcctacacattattacattcacccatctttctgtttgtcattcttatctccagcctgggaaaagttctccttatttgtttagatccttttgtattttcagatctccttggagcagtagagtacctggtagaccataatagtggaaaagggtctagttttccccttgtttctaaagatgaggtggctgcaaaaactccccttttttgcccacagcttgcctactctcggcctagaagcagttattctctctccatattgggctttgatttgtgctgagggtcagcttttggctccttcttcctgagacagtggaaacaatgccagctctgtggcttctgccctggggatgggccgggttggggggtgggttggtgaggctttgggtgccactgcctgtgggttgctggcttaaaggacaattctcttcattggtgagagcccaggccattaacacctacacagtgttattgaaagaagagaggtgggggtggaggggaattagtctgtcccagctagagggagataaagagggctagttagttcttggagcagctgcttttgaggagaaaatatatagctttggacacgaggaagatctagaaaattatcattgaacatattaatggttatttctttttcttggatttccagaaaagcctcttaattttatgctttctcatcgaagtaatgtaccctttttttctgaaactgaattaaatactcattttatctttgactctccttgaaatctagagaaaccaagaaaatggctgttgggaaggaaccaatttcctcctcttccctcgggtctcaggcatttacatcctccctctccccgcaatctgacctttaccaggagggaaacagttctcctacatctcatcattggaaaagttttcagggaatcagatagaacttagccagagatttaaatatcacagaaaagcctcagagaaggaaggagaaaaagaaaagaagtgacgcatgtagagtgcttttgggttataggcaccaaaatcccattaaggactgattataagcttcatggtacagttcagcaaattatgattcattgaggggcacagaggaccagtgttggtgacagctaggggatgatgacctgaggttataggcttggggtgaatgaagcatagagtttttttttaaaaaagaagggattgttgaaaacctggcaaaaatgtataatttaatgagaaaacttgctgcttttaaaatccatataggccaggctttagcaggcatgctgttttgatagtttttgggaactctggaataagagacttatctcatctgtcacttcgagttgttggccagccagttaaagctgtgggtcgaagaggggaaatgttaactggctggtgtcaattggataggaagaccttagttaaggtggggacccgctgttttaacagtcttcattcagggtcccaaatagtatttggctttaagtaatgattggttttccctttttactagaggggccctgggaagtccttgtacctttcctccattttaaaccagctgttctctactttgtccttggaatgagggacaagtgatcatgacagaacactttgtcattgggactgggaaaggtttggcaagggcattaaatttaacagccagtgccaggaaaatataaaatggggtcaatgataaacagctgttagaggctggaaaatgggtagggcagttgaattttttggtggtttcgtaccatttgggtgattgaagcatggtagtgggtgggtggggggtgtgacagagcatcatgtttgttattctgccttaaatttctacttactgtctttttcttctctgtcttccaatcactttaatatcttcaattttcaaactatatttgtacttgggcttagatagaaagtcttacacaagcatagtatcttctactttggttttccctaccttttcttccccaccttctccaaacacacatatacatactctactcaattctatttctgattttgtagttgttagttgtccatgctcaggataaaaaatgagtgggtagggttgagggactggttctttgaggttctgccctttttccatgattcagaccaactttctcttggtcatttctggagtataactgactcaattcttgtaaaaatgtgttccacccaaaccactgtatgttcttttccctactttattttctcctaccttccttctcctaattgtgttacaagaggcagccatagcaagaatggaaaatccagatcagtaaaagattcaacaaaaaaaa

SEQ ID NO: 1042 - DNA, 3859 bp, Homo Sapiens
  NM_001035521
gcagcgtccctggcgccgctgaagacgccctggaactcggctggcttcggagggctcggtgactctggccgcgctgcattatggaatacagagtctaagagaaaactagcccggcaccgactccggaccaagcacacgtgtttaccttgtgcactggggtgggggcgtcagtgaagagcagctaacaagatttcgtcataagaccgcgaccagacaggcggcgccatcttcgaacttagacttccggaaggactttggcgagggggcagccattttggggggtgctgatggatacctgcggggtcggctatgttgccctgggggaggccggccccgtggggaacatgactgtggtagactctcctggacaagaggtgctaaatcagcttgatgtcaagacctcttcagaaatgaccagtgcagaggcttccgtagagatgtcattacctacccctttgcctggatttgaggattctcctgatcagaggaggctccctccagagcaggaaagcctctccagactggaacagccagatctttcttcagagatgtcaaaggtctcaaagcctagggcctcaaagcctggccggaagagaggtggtaggacacgaaaaggccccaaaaggccccaacagcctaatcctccatcagccccactggttcctggtctcttagatcaatccaaccctctgtccacccccatgcctaagaaacgaggtcgaaagtccaaggcagagctgctgctgctgaagttgtcaaaagacctagatcggccagaatctcaatctccaaagaggccccctgaggactttgagaccccttctggggaacgaccccgccgaagggctgcccaagtggcacttctgtatcttcaggaactggctgaagagctctcaacagccctgcctgcccctgtgtcctgtcctgagggccccaaggtgagcagccccaccaaaccgaagaagatccggcagccagcagcctgtccaggtggagaagaggtggatggtgctccacgggatgaagacttttttctccaggttgaggctgaagatgtggaagaaagtgagggcccaagtgagagctcatctgaacctgagcctgtagtgccccgaagcaccccacgaggatctacttcagggaaacagaaaccacactgccgaggaatggctcccaatggcttaccaaatcatatcatggctcctgtttggaagtgcctccatctcaccaaggacttccgagagcagaaacattcatactgggagtttgctgagtggattcctttagcctggaagtggcacttgttatctgagcttgaggccgctccctacctgccccaggaggagaagtctccattgttttctgtacaacgtgaagggctacctgaagatggcaccctctaccgaataaacagatttagctcgatcacagcacatccagagcgctgggatgtgtccttcttcacggggggaccgctctgggctctggactggtgcccagtgccagagggggcaggagcctcgcaatatgtggctcttttctccagccctgacatgaatgagacacacccactgagccagcttcattcgggtcctgggctgctccagctctggggccttgggaccttgcagcaagaaagctgtcctggcaacagggcccactttgtctatgggattgcttgtgacaacggctgcatctgggacctcaagttctgccccagtggagcatgggaacttccaggcacccctcggaaggctcctctcctgccccggttgggtctcttggctctggcctgctcagacgggaaagtactgctattcagtctaccccatccggaggccctgctggctcagcaacccccagatgcagtgaagcctgccatatataaggtacaatgtgtggcaactctgcaggtggggtctatgcaagctacagacccctctgagtgtggtcagtgccttagcctggcctggatgcctaccaggccccaccaacacctagctgctggatattataatggcatggtggttttctggaaccttcccactaactcacccctgcagcggatacggctctctgatggctccttaaagctctaccccttccagtgtttcctagcccatgaccaggctgtgcgtacccttcaatggtgcaaagctaacagccatttccttgtctctgcggggagtgaccggaaaatcaaattctgggaccttcgacgtccttacgaacccataaactctatcaagcgcttcttgagtacagaactggcctggctgcttccctacaatggtgtcactgtggctcaggacaactgctatgcctcttatggactctgtgggattcattatattgacgctggttaccttggtttcaaggcctacttcactgctcctcgaaaaggcaccgtttggagtctttcaggatccgactggcttgggacaatagctgcaggagatatatccggggagctcattgctgctatattaccagatatggcactgaatccaataaatgtcaagcgacctgtagagcgaagatttcctatatataaagcagatctgataccgtatcaggacagtcctgaaggtccagaccattcttctgcttcatctggggtccccaaccctcctaaggctcgaacttacactgaaactgtcaaccatcactacttgctctttcaagacacagatttgggttcattccatgatctgctccgtagagaaccaatgctgcgcatgcaggagggagaggggcattctcaactctgcctggacaggctgcagctggaggctattcataaggtacgtttcagcccaaacctggactcctatggatggctggtatctggggggcagtcagggctggttcgaatccattttgtccgtggactcgcctccccactgggccaccgtatgcagcttgaaagccgagcccacttcaatgctatgttccaaccatcctcccccactagacggcctggcttctctccaaccagccatcgccttctgcccactccctagccttggcccacaccagatccttggagtgaagtcggtcaagaacaaatggcccctatgcacagagccataggaactgggggccttccctggacagtgatcatgccaggcctggacctttaggcctgcctccccaggactccttagatcccactctttctacagacttctgtgatcacagccccctgcgggcaggggggctctccctccaccaactctcaaggctcctcagcctaagactatggctcatgagaaacactcaggcctgacctaggcttgggagtcaaactgctcatattgagcatattgttaagtgggtaaagccaagtaaaggtactgggtgtttttgtgaccacttgtgaatgggtgtatggagaactgaaaagggtatctgcatgaaggctcctgtctgactattccaggatccaatattactgccttctgaaacttcctctttagggtaaccatcatgtatgcccacgagggtgatagtaattcgtgagactgaagttgcttagagtacttctttgaccaaggaataccacagacaccctaccgatagaacagtggctcagatcttacttgctcctgcttacgaagtattcccaatcactggtcatctgaccctacttgaacactcctgaacagtcatgttttttaaaatcttcctttatatcaagtcagagagtatacttctataaatttcactcatggatgttaggaaatctagtcatcttccctgtgattgccctgttaagtatttaaccatagctatcatgtgtttcccaaatcttctctagattaaatatcttcagttacttcaaaaaaaaaaaaaaaaa

SEQ ID NO: 1043 - DNA, 1620 bp, Homo Sapiens
  NM_001037126
ttccttggagcctagcggctctccccgcgtccaagatggcggcagaagcagctggtgggaaatacagaagcacagtcagcaaaagcaaagacccctcggggctgctcatctctgtgatcaggactctgtctactagtgacgatgtcgaagacagggaaaatgaaaagggtcgccttgaagaagcctacgagaaatgtgaccgtgacctggatgaattgattgtacagcactacacagaattgacgacagccattcgcacataccagagcatcacagagcgcatcactaactcccgaaataaaataaagcaggtaaaagagaacctgctttcatgcaagatgctgctgcactgcaaacgggatgagcttcggaaactgtggattgaaggaattgagcataagcatgtcctgaacttgttggatgaaattgagaatatcaagcaagtgcctcaaaagctggaacagtgcatggccagcaagcactatctcagtgccactgacatgttggtgtcagcagttgagtctttggagggccccctgctccaggtggaaggactgagtgaccttcgactagagcttcacagcaagaagatgaaccttcacttggttctcatagatgaactacaccggcacctgtacatcaaatcgactagccgagttgtgcagcgtaacaaggaaaaagggaaaatcagctccctcgtgaaagatgcttctgttcctctgattgatgttacaaacctccctactcctcgaaaattccttgatacctctcactattctactgctggaagctcaagtgtgagggagataaatctgcaggacatcaaggaagatttagaattggatccagaggaaaacagcaccctgtttatgggtatcctcattaagggcttggcgaaactgaagaagatcccagaaacagttaaggcaatcatagagcgcttggagcaggagttgaagcaaattgtgaagaggtctacaacccaggtggcagacagtggctatcagcggggggagaacgttactgtggagaaccaaccaaggttgcttctagaactgctggagttactgtttgacaagtttaatgctgtagccgctgcacactctgtggtcctgggatacctgcaggacactgtagtgactccactgactcagcaggaagatatcaaactgtatgatatggcagatgtatgggtgaagatccaagatgttctacagatgctattaactgagtacttggatatgaaaaatactcgtacggcctctgaaccatcagctcaactaagctatgccagcactggacgagagtttgcagccttttttgccaagaagaaacctcaaaggccaaaaaattctcttttcaagttcgaatcgtcctcccatgccatcagtatgagcgcctatctgcgagaacagagaagggagctctatagtcggagtggagaactgcaagggtagcggcgaagaaatccaccagaaagacaatcaaagtaacattaaaaagctcaaattttacaaaagttaagttcctgccaacattttcaatttatcatacaattagaaatgtgactcagtctaacaacacccaagaggataaaaggattaaaaaaaaaaaaaaaaa

SEQ ID NO: 1044 - DNA, 1603 bp, Homo Sapiens
  NM_001037161
ctttaagcaagttccagtgtgtctatatttggtctggctgatcggctggactctggccttccccgctcacattagcagacagctctgccctagtgggcgtttagcctgcgacggcagcccgagaggaagagttgggcagagttgcaggggtctccacagctgaggcagtttggccggattatttgggttcctgctcggatggcggcgacgctgatcctggagcccgcgggccgctgctgctgggacgaaccggtgcgaatcgccgtgcgcggcctagccccggagcagccggtcacgctgcgcgcgtccctgcgcgacgagaagggcgcgcttttccaggcccacgcgcgctaccgcgccgacacccttggcgagctggacctggagcgcgcgcccgcgctgggcggcagcttcgcggggcttgagcccatggggctgctctgggccttggagcccgagaaacccttggtgcggctggtgaagcgcgacgtgcgaacgcccttggccgtggagctggaggtgctggatggccacgaccccgaccccgggcggctgctgtgccgggtgcggcacgagcgctacttcctcccgcccggggtgcggcgcgagccggtgcgcgcgggccgggtgcgaggcacgctcttcctgccgccagaacctgggccctttcctggcattgtggacatgttcggaactggaggtggcctgctggagtatcgggctagtctgctggctgggaagggttttgctgtgatggctctggcttactataactatgaagacctccccaagaccatggagacgctccatctggagtactttgaagaagctgtgaactacttgctcagtcatcctgaggtaaaaggtccaggagttgggctgcttggaatttccaaagggggtgagctctgcctttccatggcctctttcctgaagggcatcacggctgctgtcgtcatcaacggctctgtggccaatgttgggggaaccttacgctacaagggcgagaccctgccccctgtgggcgtcaacagaaatcgcatcaaggtgaccaaagatggctatgcagacattgtggatgtcctgaacagccctttggaaggacctgaccagaagagcttcattcctgtggaaagggcagagagcaccttcctgttcctggtaggtcaggatgaccacaactggaagagtgagttctatgctaatgaggcctgtaaacgcttgcaggcccatgggaggagaaagccccagatcatctgttacccagagacagggcactatattgagcctccttacttccccctgtgtcgggcttccctgcatgccttggtgggcagtcctattatctggggaggggagcccagggctcatgccatggctcaggtggatgcttggaaacaactccagactttcttccacaaacacttgggtggccacgaggggacaatcccatcaaaagtgtaaattttatttgatcatgtggcctctctgttgctaatctctcctggaaacatctgccacatttagtgtgtgtatgtgtattcattctttctcataacttcttaaagtttcttcccctcattattaaaatgaatttaccagt

SEQ ID NO: 1045 - DNA, 2229 bp, Homo Sapiens
  NM_001037163
cggccaggctggtacaggcggctgctcgcggaggcacttctccgagcgtgacgtgcggactccgctccactgcggcccgcccgcccgccggtctagccgccgcctccttcgctccctgagcacgccaggcgagggtcagctgccggggcgacgcggcgcggagagggcgggcgggggggctgtgggagcgccggtctctatatggcggcggctctgtcgggcctggctgtccggctctcgcgctcggccgccgcccgctcctatggggtcttctgcaaggggctgactcgcacgctgctcatcttcttcgacctggcctggcggctgcgtatcaacttcccctacctctacatcgtggcttccatgatgctcaacgtccgcctgcaggttcatattgagatccattgaaggccctcccagactgacgaaggcgtgacctcaggcccaccgcatccaagaacacgaagcatgagggacagaagagggcccctcggcacctgcctggcacaagtgcagcaggccggaggaggtgactcggacaaactatcatgcagccttaagaaaagaatgccggagggcccttggcctgcagatgcaccctcctggatgaataagcctgtggttgatggaaattcacaaagtgaggcattatcactggaaatgagaaaggatccgagcggggctggcctctggcttcacagtggcggcccagtgcttccatatgtgagagaatcagtaagaagaaatccagcctcagcagccactccgagcacagccgtgggtttgttccctgctccaacagagtgttttgctcgggtgtcctgcagtggtgttgaagctctggggcggcgagactggctgggaggagggcccagggccactgacggccacagaggacagtgccccaaaggagagcctcgggtgtcacgactgccacgccatcaaaaagtgccggaaatgggaagttttcaggatgacccaccaagtgcttttcccaagggtctgggctctgagttggaacccgcttgcctgcactccatcctgtctgcaacgctgcacgtgtatcccgaagtgctcctgagtgaggagacaaaacgcattttccttgaccgtttaaagcccatgttttcaaagcaaacaatagaattcaagaaaatgcttaaaagcacctcagatggtctgcagataacactggggttactggctctgcaaccttttgaattagcaaatacattatgccatagttaaggtacaagcagaacaataccaatagattaattttaagagttgtcttagaatgatttctttcgcattaagtctggatgcaaactgtgcagcccttaggttcctgctgtagttttgtacgacctggcagacttaaagtaaattgagtttaaattcaaagccagttgatgcggaaggaacttttttggcatgtgttaaattgtgctttaaaagacatataaagaattgggaaacatttcaggagacgatcatagcctgtataaataccagattagaacatacggatttaccatgaagttctgtcttcaacatccattctaaagggctactgtcccaaatcctgtgtgtccttttgacttgtctgatcacccaatggaagtggatacttgtaaagtctacaccactgtacttggcgttaaatcttgctgaattcgtggtaagctgttaccatgtctacattttgtagaatgattttggtctgcagcaaaattcgatttcacttctcatacccctttccttccacttgaaatgcaatttagacagaggccctgtggtgaaagttgcaatattaagtttacctttagaagatcccttctcaaactcagaaccctagcagtgttaccttaaacaaaaatgagctcgagaaaaaagtagctcagttacagagaagcaaatcgagttatttcccacataaaaagtttcccagattctaagaattgcagtatcctgtaccctaaaatttttcaaggtgactcctgttgtcgtctgttgataactttaataaaggtcatttaaggacataagtttttaaagactcccaaagtgaaacttaaacattttcgggattatcgattgcatatatcagtttatgctgtgtgctgaattactatgccatgtgctattttagtgtttggggaaaatgaaaaataaaatttgttctttagcttaataaatatgtcttattttataaaaaaaaaaaaaaaa

SEQ ID NO: 1046 - DNA, 2986 bp, Homo Sapiens
  NM_001037164
aggccggcgcccgggcggcgcgcgggcagggggcggggactgtcgcgtggagctgccgggcgagcaccgttagggcagcctggcgcgcggcgcccgccaggcgcccagtcctctgccatcgcccacgcctccctggtgccagggaacaggtatcagcgcgcctccccagcggctgggagagacgctgaatgaagaagagggaaggacggttagtcagcagtcttatagctggatcagctaccaagagaagttgtaaaccaagaagagaaaagcatttcaatttgggacatttatttgcacctggaaatggggaatgggctgtcagaccagacttctatcctgtccaacctgccttcatttcagtctttccacattgttattctgggtttggactgtgctggaaagacaactgtcttatacaggctgcagttcaatgaatttgtaaataccgtacctaccaaaggatttaacactgagaaaattaaggtaaccttgggaaattctaaaacagtcacttttcacttctgggatgtaggtggtcaggagaaattaaggccactgtggaagtcatataccagatgcacagatggcattgtatttgttgtggactctgttgatgtcgaaaggatggaagaagccaaaactgaacttcacaaaataactaggatatcagaaaatcagggagtccctgtacttatagttgctaacaaacaagatttgaggaactcattgtcactttcagaaattgagaaattgttagcaatgggtgaactgagctcatcaactccttggcatttgcagcctacctgtgcaatcataggagatggcctaaaggaaggacttgagaaactacatgatatgatcattaaaagaagaaaaatgttgcggcaacagaaaaagaaaagatgaatatcaatacctattatatctgtgtggagtaggttttctctggtctgattttgacaaatagaagagtgtctacagcgtggtttgcctgtctgccctcctggatgctattaaagctttgttttgttgaacaatcagatgcccaactctgttgccttgtggaagatgagtaaatgcagtgcttcttaaagtggtctcttctccctaccccacaaatcttttggtactaccatttggggaagccaagcaaggatagtaaattgaccagaacacagttgtgggaatttggtctgaagttagtgaaataaaactttaaagagtgtctgcctagtgttttgtgcttacatctttcggggggaagcctttgcaagaaaattgcatacaaggctttgtaacgatcaagtgctaatcgatggaaatgttaaggtagattaacatatatgcagttatattgatcacattggtccaaccagtccttttttgaagtaagggacaaggagtaagtattttcttttttaagtttctgccaaatgatttttgacgctttctggaatcaagtaatttaatagtatagcttaattctagacaatgtttaagttggtctacctttattaaaaataagatatttggggtatattcaagtgcatggattagttttcctgacaaagcatgttttggtgtgtagtcttactttttagaaatagctatgcatcgttctacacaggtttaaaacaacttttttggggatttagggctattataggaatagtttgttgtcagaagcactttcacttgaagaacctaaaatgattgactcattcatagtaaatatgggcatgtaaactaataaatatgcactggatacatatatggatttatgaagaaggcgatttagtcaagaggatgtaattaaaatatgtggtctctaaaatattccagttacaagatatttgttttattaatatttgctggctaaaaacaaatgtggtttttatatatttttgtagtgtgttgagaagagcaaaagctttataaatatacctgatgcgctgtagaatgaaaatgtaaaagataacctgtatgtgttccgagctttaattttttgtttacaaattgaacagtgttacatgggctgtccagtcctgattatagagaggaagaaatggtaacagtatggcagataagaattacaattatagaaaatgaggggaaaataacaaacctgttttatgaaaattcactggtgctgtttacattggaataaaaagctctataaggaggaaaggcctttatctaattcttatctacagacacttacttccagtgaccatattttactaaatcagcttattttttatgtctaaagcaacagctgttctgaaaaatcaccaaaagaaatgcactttgctagcaggatttgttttggctttgggttttgtttttttgttttttttttttttcagtggcataacagtttttggaaccttgattcttgtgtcacacaaaatgaatgaagtagcttgatgtggagccttcatatgttaaatattcctgcactagtgatggtcacttagaatgtttatagaaatgtggataataactaccaataaactacttgaggcactaggagaacagtatttgactttgaattttaatgtatttccacttttgctgaagcttttaatcagatgtgtaaaaacaattgaccagctaggctatttagtcccatagtagttcagatctgcttagatgtgacaggcattgaaggctgtttttttttttttctcccttcactgatactgaaatcatggtatctgctgcaaacatgagtagatccatgatggattaataaagcttgctgaaaaaaaaaatctgtgtatcaattagatttaccagtttgcctgtactttctgtctacctactatgtaaaatagtgctgtttttaagtatttcaaaagcttgtgtgttgaccctttgtagcctaagtacgtaaacaaattaatgttatctaagtttttcatatttcatggacaacaaaagagaaaatggtatgaacactgtacaaactttgatttataaa

SEQ ID NO: 1047 - DNA, 11191 bp, Homo Sapiens
  NM_001037165
ccgcgcgaacatggccgaagtcggcgaggacagcggcgcccgcgccctgctcgcgctgcgctcggcgccctgcagcccagtgctgtgcgccgcagccgccgccgccgccttccccgcggccgcacccccgccggcccccgcgcagccccagcctccgcccgggccgccgccgccgccgccaccgccgctgcctccgggcgcgatcgcgggcgcgggctcctccgggggctcctccggggtatccggggactccgcggtcgcgggcgcggcgccggccctggtggccgcggcggccgcctcggtacggcagagcccggggccggcgctggcgcggctggagggccgcgagttcgagttcctcatgcgccagcccagcgtcaccatcggccgcaactcgtcgcagggctcggtggacttgagcatgggcctgtccagcttcatctcgcggcgccacctgcagctcagcttccaggagccgcacttctacctgcgctgcctcggcaagaacggcgtcttcgtggacggggccttccagagacgcggcgcgcccgccctgcagctgcccaagcagtgtaccttccggtttcccagcacggccatcaagatccagttcacgtcgctctatcacaaagaagaggccccagcctccccgctgcggccactgtacccccagatctcccctctgaagatccacatcccggagccggacctccggagcatggtcagccccgtcccctccccgacgggcaccatcagtgtccccaactcctgcccagccagtccacgcggtgccggctcctccagttaccgctttgtgcagaacgtgacctcggacctgcagctggcagcagagtttgcagcaaaggccgcgtcggagcagcaggcagacacgtctggaggagacagccccaaggatgagtcaaagccgccgttctcctacgcgcagctgatcgtgcaggccatctcctccgcccaggaccggcagctgaccctgagcgggatctacgcccacatcaccaagcattacccctactaccggacggccgacaaaggctggcagaattctatccggcacaacctctctttgaaccgttactttatcaaagtcccacgttcccaggaggagcctgggaaggggtccttttggcgaatagaccctgcctctgaagccaagctcgtggaacaggcattccggaaacggaggcagaggggtgtctcctgcttccgcacccccttcgggcctctgtcctcaaggagcgctccagcttcgcccacacaccccgggctgatgtcccctcgctccggcggcctgcagaccccagagtgcctgtctcgggagggctcccccattccacacgaccctgagtttgggtccaagttagcttctgtcccagagtaccggtattcccaaagcgcacccggctcccccgtcagcgcccagccagtgatcatggccgtgcctccccgaccgtccagcctcgtggccaagcccgtggcctacatgcccgcctccatcgtaacctcacagcagcccgcgggccacgccatccacgtcgtgcagcaggcccccaccgtcaccatggtcagggtggtcaccacatctgccaactcggccaacggatacatcctcaccagccagggcgcggcggggggctcccatgatgcggcgggcgcagccgtgctggacctgggcagcgaggccagaggcctggaggagaaacccaccattgcgtttgccacaatccccgcggctggtggagtcatccagacggtggccagccagatggcccccggggtccccggacacacggtcaccatcctgcagcccgccacacccgtgaccctcgggcagcaccaccttccagtccgggccgtgacccagaacggaaagcatgcggttcccacgaacagtttagccggcaacgcttacgccctcaccagccctttgcagctccttgcgacccaagcgagttcatccgcgccggtggtggtcacccgggtgtgcgaggtggggcccaaggagccagcagcagccgtcgcggccacggccaccaccaccccagccactgccaccaccgcctctgcctccgcctcttccactggagagcccgaggtcaaaaggtcccgggtggaggagcccagtggggctgtaaccacaccggctggagtgatcgcagctgccggcccccaggggccaggcaccggggagtgaggtcacctgcaacgcgggggagtgggactcacccagcggcgaccccgaagctggacccggcagctcaggcggccgcacccacagacggaggagaacagcccgcggcggcctgtgggcatcggcggcacctggacacacccagccctttccatttgatcgcctgccttcccgtggtttaagacaaaaacacataaacaagttcagacaactgattgtatgattctgggaattctttgctttcctttccttctccctcggcaccacctcctctccccaggcctccctgtcgggcatggggaggaggttggagctcagcatcttgaggaatgtgtcaagacagcccctccgctccgcgctgcacggccagccgcctttgtccgggaggacagacagaaacgcagcaaggcacacaccaaggctgccggggaggcccgggcaccggacagatgcctgttgggaagccaggagctgccgagccacggaccacctaacagcctctccgcccggaacgtgacatagagagtgttggcattaactcggggggtgtccgatttcacttcagaccccaagtttttctttgtttgtttaaacatggaattcagacttcattgtacacctgagacagacacaaaagggatcatgtatttttgaggattttacctgttgacgtctgatgaccggccgtaggtccagggttcccgctgggtttaatcccctcgaagagtaaacctgccgctctgtctgataacttcaagtaagagcagcggcttcctgggttggcgttcgcggtggaaggttcctaggatgaaaggtgagcctggatccgccggccgcagacatcgcgctgctggggacgattggggccgctgctctgcagaccagaccttcccgaattatccgtggctccgatgtcccggtgctgacggccacatggggacctaacagtgccaaacgccatctgctccagctgctttttcacccagttgcagagtcctcaccactcccacattgatctgctgttttcaattggaaccatttctcctgcctgaaactccagggcccctccctgggctgtccgtgagcaggagaccccaccccagcagcagtggtgagcaggcctgtgcctccacgcccagcccccgccaacgcgactggttttgtttgccacacggtgagaaccggaggacgggatgctccagccagttgggtggttctggggtccctgaggaagccccctcctgcacttccattaagacagccagtggttcctggatctttgtcaccaagcagcgttgagccagagctgtctaatgctgagcccagctcaggaaggagagaggagtccttcagtgtgtcttggagatgcgaagtgcgtcctcgtaaaggtcagctgtcagttttgctggccgctccggcgctggctctcctgtccgggaccacaacgagaaacagcgacagattcgacgcagagctccggaagtgcctgaggagcagtggttcttggaaatcgcccgtcctccgcatcacagcctctcaccagcaaagcagcctctgcccaggccctggcgggagagctgcagagggacccaggtgcctggagggcatttgagggaggtggctggacaggtgtctccctgaagaagaagggagaacacttttcaaagtgattccgaggcagtgcgggaggacacacgtgctgtgcagtggagtggggtcgcccgtggcccccatcagagtccccgtcccccaggacaagtgcagaacctctgtgggccccctccttccacctagatagagaaaaccccttgttcggtttccttcccgtgtcccgttgtttttctaagccccccgaattgagtcgtttctatggcactaacctttccatgggaaataagctctttgtggaagtccgtacctgttgccctgggtgaggtttcagagaaacgggggcaggatgaacacagccggctgtcctgggtgcagttacgtccgtggagggtgagagattgcgccccgttccacacttgtgtcgcctgctgttgtctgtgggccttttctttccgtggtgcctggtgtgtgcgtgcatggcgtgagagaacggggggtgggggttggaggtggctccccgacaccggtgcctgtgtggcctgagccggcgccctcccgggagcgcccgtcacggggggcctctgtgattacctgctgctgctctctcccgcgtggtgactatatgtcctcagggctgcctgtggccaccctgatgggagacctctgtttgcttctgggccactgcaggttggcctcctcaatacaagctgatgtctgcagggagcgccgcgtgctgggattgcaccacgtgttggtcacaaatcgaggtcgccttttggcctggtctgctcaggctggccctgacccacgtggtttcctggcttctgagacgcagcgcattcttcctgttagcggtagcgttctctgatttcactgcttcattgccaagggcgtggaaagggggtggtggatggagccgggaggtggcgagcacaggaccccggggctgcattctgccgtgtggggttctgcactgtctagcttctgcggggactgcaaagagggatgaagggacgtggtcctaggggtcggctcagactcggagcagggcagggagaggagggcaaggagaggaggcctgggtcctggatccactgctctgggctcataaccatgagattttgaaagagtttttggtcatctgagcaggtaccatgcctggctcatgccggaacttgtcttggaaccggtagccagaggcccaggaagggacagggcccaaaagggttgcatgtcccggccacaaagccctccctgtgtgccctgagccagcccagcaagcgcctcccagccaggcgctttcgcagaagcaagagcacaggccagggggaccgggagagcctcagcccccagcctgggcggcctgtgaccctgagccgtgtggagccaggacccaagaaccttctctaggttctcaagggtgagctgacccgggcaatgtgcaggaatgtggggagcaaaagtagctgattccagccccgttctggggtcactggggaggcagaggctgagggcctgttctctggtcaccagggactgggggcacggtccacagcggatgagaacagcaggtcacagtagtggctttgggaagggcccctcctgctttgccctgttcggaaaggggctccctcagagcccctgggcccagtaacccgcttctgtctcctgactcctgctggataaattgccaggtttatcaaatacaagaaaacacctgctttggctaggaggtaagtcccaaaaagaacgtcttaagtagagcaaaggcatccaccgaggccatttggtggcccctgggaagtggggaagcagggcctgagcgtccccaggctgctagggcagcagctggctcagggcacactctctcgtgccagcttctgccaccagcccagtgtccacggagccgcggggccagaggagctcagggagacctggctgtctagggcatggtacccagtatcccggtgtgtgcccatcctcagccacttgtgtctttctttccatgtgggagttctcccggtgacacctgccctccgttgagggtggaatctgtcactcatgcctttgagggacccagatggaccatccctcttctgcttgctttctacattcctaaaaacctcaacgttaatccctcaccagtcgggccgagtgtggcctcatggttctgccgcggcccagtcttctcccactggcttcacgctagagggcgccatgcgctctgggtgaaatgagacgctggtgtggggtccccatgtagagaccctcaggtccctatccagagaccctccaggcagtgctgggaagacactggtggcggggaccatgaccaggcgggtggagccatgtgtgtctcacacctgccgcccctcactttccttcccgaggtctggtaggtcctctttgggatttgctgtttatttgtatctcccttttctttgatttaagaacaatgccaagtgaaaaagctgggaatgaatttctgagttgctgagtgttccctgctcctaggtaccacgctctgtgcttctcaggcagggaggagatggattcggtggagttgggccaggacgggggcttcaccctgccccctccagactgccgaagcccccaagaagttttgagcccagctgggcctcgcctccccggctcctgggtccattttctgtactggtttgagatcacaggcatcattcagcgaatgctcttgtgtcctctgcataaagagggccctccctggagcacccccggggagctgggactctccagaaagccccgggtgagggctccgtcttgagagagagagaaatcccttctttgggcgattcagtgagttcaggaggaggaggaagcttttccttggctttgaaatcagtgtttttatggagacaaagaacagacctcagtgggaaaaatgaaaacgtaatggaacacggggaggtgtcggagaagaaaggattttccccttcgctttcagagccggcgggagtgcaggtctgttttgcttcagaagcctcacattctgctttgcccttgagtgacttcatgcgggatgaggaactgttgacccctctagagaggacaccccaagtccatcctgggctcctcctcacccctctgagaaagcccccctaaaaaaaggcttcagagtcaccggcatgccgcctcacgttgcaggacggaatcgcgcgctcctcacgctggagtaagttacgaaacatgatcgtcaggctctttgcaaacgcagagccccagaacgctggatggaggcctcctcggccctgcgggcggcctggctgcggtaggtctgctgcaaggagccaccacggggactgcgccacactcctgatgaaaacgtgtttacccacagcctcgcctcgagcctccttgacaataccgctgcttcaaagcaatattatttaatgagaatactttacattgctcacatgtgctgctatgaagacaggattagtctgtagacgggactcagctccagaggttcctgggtaatgtattgtggctcttggaaatgagggtagaatttgaaatataacaaatggtctctcgcccggttctgtcccttatttttagattgttttcctgcatcttacaatttccttttcttttcaaagttcctttctccaggcctgtttttcagtgctcaggacacggttttcatcacatacttactgtttttttggttgggttttgatacgaaaagctgctacgtttggtgaccagagggagggtttggaatctgtgctttgcaggggatctcggtgggtaccgcggcccctcgcagggtggcgagtggggtccgtgcctcgagaagggggcccttacccacaccgtgcggcttgaattctgtcggagttgaatctgtggaaaggattgtcccattagagctgctgcgtcctttcctctgtcctccctgtcacccaaaccccgaagtcacagctgcttagaagaatgggattttggggatacaaccacacacatttccctctggactgaaattttaaaaacagacccatttcactgacttctttttttttttttttttttttttttttttgagacggagtctcgctctgtcgcccaggctggagtgcagtggcgtgatctcggctcactgcaagctccgcctcccgggttcacgccattctcctgcctcagcctcccgagtagctgggactacaggcgcccgctaccacgcccggctaattttttgtatttttagtagagacggggtttcaccgtgttagccaggatggtctcgatctcctgacctcgtgatccgcccgcctcggcctcccaaagtgctgggattacaggcgtgagccaccgcgcccggcccactgacttctttagggaaaatagtttcagtcttgggttgtcttgtgagcccacgggcatgggaccctgtctctgctgggcttttccggccccgtcccagctcctcctcaggcagaggctgcagccctcagctctgctgctggatggaacatttcaaccccctccgggaaggtgggcagggtggagggcccagggctaggcctgccatgcaccatgagcaggggtgctacctgggtgtgtgaagttgggctggcttttcctggaggtgggtgagaaggctctccgggcaaatcagaaggccacgagagagagaggagcggggagagtggtgaggaggattcgtctctgactgatgaacctcgccgtgcctgtctgtcacatccaagtctgtgccagctgctgggaggtcagactcctgccctgagaaacagcccagtccttggagaatgaaaccctgagggtcagtgagtggaggccttccctcggggccagccattcccgggaggcctgagtgtgacctggaagctctgtgggtcaccaagactggcattttccttgtatttttgtgcagggctgaagtgagcgttcctcctctgaattggtgaggctttggaaattttttgtttcttctactcatcctaatggctggttttggctgcccggagtatcagagaatatcactaagagggcagtcagtttatttttaggcatctttctttctgtccagggagaaacccctcggaagaatcttagtcactctttgcacctgccctgtcattctcgccatggggaaaatgcgttgaaaagaaaaataccggggccagggagaagccgtgaatgtatttatttgctttggtgaagctgctgaacactggctgcggagggccccccgcccccatcccgcttcaggccccagtgacccagttgcgtcttaagttccatcgtccagatttcaggccaccagaggctgccaaaggtgactgaagcggtctccaagtcactctgtcaccactttttttttttttgagatggagtctcgctctatcgcccaggctggagtgcagtggcccaatctcggctcactgcaacctccgcctcccaggttcgagcgaattctcctgcctcaacctcccaagtagctgggattacaggcacctgccaccacacccggctaatttttgtatttctaatagagatgagagtgttaccatgttggtcaggctggtcttgaactcctgacctcaggtgatctgcccacctcaacctcccaaagtgctgggattataggcatgagccaccgcgcctggcctctgtcactttttttgctccttacccagtttttgttttttgttgttttgttttgttttagcgtgatactacaatggaaagactcctagttggttattctttatctcggattcttttttctggaattgtttgctcatttgagtggttggtggtttgccctgtgtcagacacggtgaaaagagtgcaggaaagctggggccaggggaagcgaagtggcttcaatccgggctgacagccaagaagagttttcctcccttcggtgacagggcctgcccctccgagtctagaggtaaaagcagcttctagaactggcccctaagtctccaaatgtgttggctaagctgaaatgagagactctgaattagagtttttgtttgtttgtttgttctctgcatgaagttcacaggcctgtatggatgttaaattgtgtctatagcctctaaatctccaggttaactggtccagattttttttttttaatcagtaacaatgggaatttaaaatcaaatatttggccaggtgcggtggctcatgcccgtaatcccagcactttgggaggccgaggcaggcgcatcacctgaggagtttgagaccagcctgaccaacatggtgaaatcctgtctctactaaaaatacaaaaaattagccaggcgtggtggcgtgtgcctgtaatcccagctaccagggaggctgaggcatgagaatcgcttgaacctgggagatggaggttgcagtgagccgagatcatgccactgcactccagcctgggcaacagagggagactctgtctcaaaaataataatcaaatcaagtattttaagtttggctcttctttttttcaagaaaggctttttggatacctagaataccttcatgtatgtggcttgatttctgtttcaggaaaaggggggcgggaggagagacaacagccgtgttccagagtctgtcctgagatgtcgctgagtccagacacttgggctgcacgtgccctgcagatgacaaaggccggcagctcagcacacgtgcaggaggggttaaagccaatattgagtttttgttcttgttgttttaatctgaacgattattctcctgtaaaaataatttgggaggggcgggtgttgttcggtgtgtgtgtgtgtgtgtgtgtgtgtgtgtgtgtgtgtatttttttttttacagtggcgcctgtctaaagtatttttcacaacatgtttgataatcagtgctttaaaaagcagcagtgtcctatgaagtggaaatgtcagttctagagcattggatgtgaagttctggtcatgtcaccttgcgtgtctcaccctggaggagtgaaggtgggcgcccggcgggggggtgtggctgcaccccagcaccgggagggggcacgcacgacaccagaggaagggacagccccacccatgtcaacagcaggcaacctgtgttttcatttcaagtgggatacagtatttttttaataaggagccatacttttttttaagagtttgagatctgaatgtgatttctaattgtatcagacgttaatgttttaaagctataacaaagtttaaaatttctactttttgtttttcatttattttaactgttcttttatctattaaattgttgtatgtggatggggaagttttgtttctcctcttagcatttgtttctataaccagaaataaaattctatattaaagaaatgac

SEQ ID NO: 1048 - DNA, 1727 bp, Homo Sapiens
  NM_001037171
cgcccccggacaccgctgtccggctcccgggctgtcctcagcaagggcgcggtctggtactcgtgcgtcttttatcgcctcagtttccctccgccgactagcgcgcggggcccggttctccatcgcgcgcacggcagcctagcgcaatgaggcgggcagcactgcggctttgtgccttgggcaaagggcagcttactcctggaagaggactgactcaaggaccccagaaccccaagaaacagggaatcttccacattcatgaagcatgttcatctatacatgtgaatcatgttcgagataagttgcgggagatagtaggagcatccacaaactggagagaccatgtgaaggcaatggaagaaaggaaattacttcatagtttcttggctaaatcacaggatggactgcctcctaggagaatgaaggacagttatattgaagttctcttgcctttgggcagtgagcctgaattacgagagaaatatttgactgttcaaaacaccgtaagatttggcaggattcttgaggatcttgacagcttgggagttcttatttgttacatgcacaacaaaatccactccgccaagatgtctcctttatcgatagttacagccctggtggataagattgatatgtgtaagaagagcttgagcccagaacaggacattaagttcagtggccatgttagctgggtcgggaagacatccatggaagtgaagatgcaaatgttccagttacatggtgatgaattttgtcctgttttggatgcaacatttgtaatggtggctcgtgattctgaaaataaagggccggcatttgtaaatccactcatccctgaaagcccagaggaagaggagctctttagacaaggggaattgaacaaggggagaagaattgccttcagctccacgtcgttactgaaaatggcccccagcgctgaggagaggaccaccatacatgagatgtttctcagcacactggatccaaagactataagttttcggagtcgagttttaccctctaatgcagtgtggatggagaattcaaaactgaagagtttggaaatttgccaccctcaggagcggaacattttcaatcggatctttggtggtttccttatgaggaaggcatatgaacttgcgtgggctactgcttgtagctttggtggttctcgaccgtttgtggtagcagtagatgacatcatgtttcagaaacctgttgaggttggctcattgctctttctttcttcacaggtatgctttactcagaataattatattcaagtcagagtacacagtgaagtggcctccctgcaggagaagcagcatacaaccaccaatgtctttcatttcacgttcatgtcggaaaaagaagtgccattggttttcccaaaaacatatggagagtccatgttgtacttagatgggcagcggcatttcaactccatgagtggcccagcgaccttgagaaaggactaccttgtggagccctaagaacaccacatttgttgaaaactagcactctacccacagtgacgtggtatctgatgaagacctgatcgagtgtattgattttagtattgcttcgtgtcctccacacaggaggaggatgtattcagcctttaggatgatcagaaaagcagaaagagagagtggccggatggggctgaggggagaaagaattattaaacaataaatactttcaagacaattttaattgtgaaccta

SEQ ID NO: 1049 - DNA, 2913 bp, Homo Sapiens
  NM_001037174
cccgcccgcgtggtcgtcgccaccgcagccgcccgagaggagctgggggaggacggtggcccgcgaggctcgtcgcagacaacgcggcggcgatgtccgcgagccaggcgacacaaagttatcattgttgggctggataatgcagggaaaactaccattctttaccaattttctatgaatgaagttgtacatacatctcctacaataggaagtaatgtagaagagatagtgattaataatacacgtttcctaatgtgggatattggtggccaagaatctcttcgttcttcctggaacacttactatactaacacagagtttgtaatagttgttgtggacagtacagacagagagaggatttctgtaactagagaagaactctataaaatgttagcgcatgaggacctaagaaaagctggattgctgatttttgctaataaacaagatgttaaagaatgcatgactgtagcagaaatctcccagtttttgaagctaacttctattaaagatcaccagtggcatatccaggcatgctgtgctctaactggcgagggattgtgccaaggacttgaatggatgatgtcacgacttaagattagatgatctctactgacctcttctcatagattttgtataaatgaagtgctggactttacctgaaagctgcaaaaattaatggtttagatatatttataataaactgatttaaactttttctataagaagaaaaattaagaccacttatttgaaaacaaagatgaagtctcaccttccagtttgctttctcattagttttttccaaagtaagttattgaagctgtgattgacatttttctcataatgaatcctctcaggacattgtgtagcctatggtaagtacaaagggagaggaagacattttgaattttaagagctttattatcagtttaaccctccctagttgaatgttattttcttcttgttccattaagtcagaatacaaatcagcacagatattcgaatgtttccaatattttaaaatgtaatgttacttatgaaaagtattttgcttaaggttgtgtgtgtattgtgtatatacctcaagttcaagttaatggcattgatttatgttccagacaaaaataacacaaataataatatccttcgttataaccacaatgagataagtattggcattagtgttcagtgccattttatactttctctctgtgttctctgtattgtactaaccaacctcccaaatcgctgagctgcttgtttaaaaaaaaaaaaaaggaaaaggaaaaagcatgacattgtgtatcgattttttgttgttgaccaaaatcacacacatggaaacatgtaattcaacagagtgggaaagctagcagattcttggcttagtattactaataggcaggattgtacaatgagcaactatcagattattcctttcagtggttcttatggcatctaaattactgaataaattattaatccattaatcagtgaatcaaattatgattacaattatcaaatgaatgctcagcattaattgaaaactgttttgtgaaacatgtctacccagaaaagtagcattctataaatactattaaacaacttagctatattatttttaagtattaaattatatgtcaagcagttaaagtgaatttcagagtaaaagtaaggcatgtttctgagcaacattgataatttcttaatttgcaaatttcttcttattttggtacttggaatatagtgtgagattttttatttctaaattttgttgtatcttctattacataaatgcattgacaattataaaatgcaagtgttttttgaatgattttaagaatttggcttaaaaattgattgatacaacgtattatttgtactaagaagtaacttgacccaaaacaccttttatgtttgcttagggtatattttttcagtgtctgaaagtcaaaggtattcctgtcacaactgtaaacaaacttatcctaaatgtgttaaaacatattcttgggtactctatttatgtatctttcatgccttgaaaatctgaaggttaatccaaactcacatgttttagcatatttgagaaaaaaaaactaccttcaatatcagccttttaaatttcatgaagattttggtgaggaataatagtatatagtttaagtattgacaaaactttgaaagtttctttctttaaaatgggaaatactcaatatctaaatccaggtcaggcatgggatatcagtatttaacattggatgttttatgttttatatttataatgttcaaaatgcaagcataacatttaatatttgtccacatggttttacaaaagtaaatcttaaattactaagcttttcccatatgttctcgtactttctcaaatccctataaagaattacttgttatctattaaaaatctcctttacccaaatctgtattatggtttcgccagacaaatattatgtgatgtagcccagaaaatccacaccttttgtcctttttatgttttaatttgaataatcatgtgcttagtcccttggattactgccacatcagtttaacacgatatcagcacattcccttgtcatcatcaaggtgttggctcagatttattcttaattggatgtttaaagcatgtactaccttgttacagttggtttagtgtagtggattattgacatgacatcatgagaagatgtgtaattttataccacatttataaaacatgattttgttttctacccttcaaggtaaacattaaaaataaggtggtacttgtgtacttgtacataaaaccaaaattatagttgggaaaaaaataaatttatatatgaaaatgtcaaaatcattttaaaagtattattttcaaataaaatggagaagctggtgaaaagtcatattggcaatttt

SEQ ID NO: 1050 - DNA, 2757 bp, Homo Sapiens
  NM_001037277
cgcgcaaatcctcgtccgcgagaactgcaaggcccgcaatgccctgcgcctgcgtggaccgattagctttgaagtttaaatccaatggagaagactcaagaaacagtccaaagaattcttctagaaccctataaatacttacttcagttaccaggtaaacaagtgagaaccaaactttcacaggcatttaatcattggctgaaagttccagaggacaagctacagattattattgaagtgacagaaatgttgcataatgccagtttactcatcgatgatattgaagacaactcaaaactccgacgtggctttccagtggcccacagcatctatggaatcccatctgtcatcaattctgccaattacgtgtatttccttggcttggagaaagtcttaacccttgatcacccagatgcagtgaagctttttacccgccagcttttggaactccatcagggacaaggcctagatatttactggagggataattacacttgtcccactgaagaagaatataaagctatggtgctgcagaaaacaggtggactgtttggattagcagtaggtctcatgcagttgttctctgattacaaagaagatttaaaaccgctacttaatacacttgggctctttttccaaattagggatgattatgctaatctacactccaaagaatatagtgaaaacaaaagtttttgtgaagatctgacagagggaaagttctcatttcctactattcatgctatttggtcaaggcctgaaagcacccaggtgcagaatatcttgcgccagagaacagaaaacatagatataaaaaaatactgtgtacattatcttgaggatgtaggttcttttgaatacactcgtaatacccttaaagagcttgaagctaaagcctataaacagattgatgcacgtggtgggaaccctgagctagtagccttagtaaaacacttaagtaagatgttcaaagaagaaaatgaataatgttaagccattcttgattggacctcatagcttattttagttaatcttttttttgtcttttagccttaccaccttttaaaaaatttgttattctccagaaacagtaaataggtgagtaggggtggtgcaagtgaattcgttttcatttagaagcccctctgtacagataatcaaaattcaaagttgaaagaatcaaaagcagccacagttatgtaggtctgatttgaatgtcataattgcagtgacaggacattgccaccaactctatcctactaccatcaatgttgtgtttattccgtcaataaaaaagacttgcttccaggaatttttatccatacactttctaactgtactatctgggcagttccaagccagtttctattagctagctggaccaaagaccacaaatctctttttttcctaaacgctgctgtaaggaatatctcacttttccccccggaaacaccctcactgaagtcttctatgaaaaggctgataatgggctgggcgcggtggctcacgcctgtaatcccagcactttgggaggccgaggcgggcagatcacgaggtcaggagatcgagaccatcctgacacggtgaaaccctgtctctactaaaaatacaaaaaattagctgggcgtggtggtgggcgcctgtagtcccagctactcgggaggctgaggcaggagaatggtgtgaacccaggaggcggagcttgcagtgagccgagatagtgcctctgcactccagcctgggtgacagagcgagactccgtctcaaaaaaaagggctgataatgataaacagtgagcactccggtcctttttcttaggttttccttttttccttcctctccaccccacaagttttgctttttaaccaaggtgtctctgcttgatgaaattcacatgctagtctaaatctttttttctcccttgtaacatttatgtgccccaaactggttagtatatgggtacagcattccctttccaattgggaagcggaaaaagagagtatgggatattttagaagggagcctttgaaccttattatatttccccatcattgatagtgacaatcttaaaagggttgttttcttaccttaagtacaaaagcatggaaaaatgcgcttttccttcccgcccacatcaccaccccgacttgaagacagtaggtgcttgaatggaaagtgagtaggcatctttaatcgccctgattaaaggaaagtgttagcctgagagggcctgactgaaaagtaaccaaaggcttaatatcaaacactaattagctttttagtgccttaaccctgacctggttaccagttttctgtagtttctacacccaagccactgaagtcatctgtggcccaagaggtaggacaaaaaaaaaaaaaaaaaaagctgatttcaatatttgatttgttgacatcccaaaatgaaagttttatgtttcccttagaaacatgttttgcttggttctatagtatgttacttaggatctatttaccatatatttgtatgagaaatcctcacccaagcattcaacctaaatctttgaaaagttgggtgctgtctttagtaacttttaaaatagtttaaatctcccattttaatagtgataaggaaacctgttaaaatcatggctattgatgttatagtatggaaagttgaactttatgaacccatacttttaaaaagcatttttaaaaatctaacactgactatagaaacaaattaaaatgtctacctttaagtataaaaaaaaaaaaaaa

SEQ ID NO: 1051 - DNA, 2828 bp, Homo Sapiens
  NM_001037278
gcaacgacgcctgcgcagtgtgaccgggatggcgcattttcttgcaccaactaatgcggtgtcgctggcggctgaggagggcggagagttctgtggtgaaatagtgggaaggattcatgtaggcatcgggaagagcctaagtccacattataaaataggaagttgatgcggggtacagttactcccggaccggcggcgtgaaagtcgtgatatcatcgttgaactgtaaacaagtgagaaccaaactttcacaggcatttaatcattggctgaaagttccagaggacaagctacagattattattgaagtgacagaaatgttgcataatgccagtttactcatcgatgatattgaagacaactcaaaactccgacgtggctttccagtggcccacagcatctatggaatcccatctgtcatcaattctgccaattacgtgtatttccttggcttggagaaagtcttaacccttgatcacccagatgcagtgaagctttttacccgccagcttttggaactccatcagggacaaggcctagatatttactggagggataattacacttgtcccactgaagaagaatataaagctatggtgctgcagaaaacaggtggactgtttggattagcagtaggtctcatgcagttgttctctgattacaaagaagatttaaaaccgctacttaatacacttgggctctttttccaaattagggatgattatgctaatctacactccaaagaatatagtgaaaacaaaagtttttgtgaagatctgacagagggaaagttctcatttcctactattcatgctatttggtcaaggcctgaaagcacccaggtgcagaatatcttgcgccagagaacagaaaacatagatataaaaaaatactgtgtacattatcttgaggatgtaggttcttttgaatacactcgtaatacccttaaagagcttgaagctaaagcctataaacagattgatgcacgtggtgggaaccctgagctagtagccttagtaaaacacttaagtaagatgttcaaagaagaaaatgaataatgttaagccattcttgattggacctcatagcttattttagttaatcttttttttgtcttttagccttaccaccttttaaaaaatttgttattctccagaaacagtaaataggtgagtaggggtggtgcaagtgaattcgttttcatttagaagcccctctgtacagataatcaaaattcaaagttgaaagaatcaaaagcagccacagttatgtaggtctgatttgaatgtcataattgcagtgacaggacattgccaccaactctatcctactaccatcaatgttgtgtttattccgtcaataaaaaagacttgcttccaggaatttttatccatacactttctaactgtactatctgggcagttccaagccagtttctattagctagctggaccaaagaccacaaatctctttttttcctaaacgctgctgtaaggaatatctcacttttccccccggaaacaccctcactgaagtcttctatgaaaaggctgataatgggctgggcgcggtggctcacgcctgtaatcccagcactttgggaggccgaggcgggcagatcacgaggtcaggagatcgagaccatcctgacacggtgaaaccctgtctctactaaaaatacaaaaaattagctgggcgtggtggtgggcgcctgtagtcccagctactcgggaggctgaggcaggagaatggtgtgaacccaggaggcggagcttgcagtgagccgagatagtgcctctgcactccagcctgggtgacagagcgagactccgtctcaaaaaaaagggctgataatgataaacagtgagcactccggtcctttttcttaggttttccttttttccttcctctccaccccacaagttttgctttttaaccaaggtgtctctgcttgatgaaattcacatgctagtctaaatctttttttctcccttgtaacatttatgtgccccaaactggttagtatatgggtacagcattccctttccaattgggaagcggaaaaagagagtatgggatattttagaagggagcctttgaaccttattatatttccccatcattgatagtgacaatcttaaaagggttgttttcttaccttaagtacaaaagcatggaaaaatgcgcttttccttcccgcccacatcaccaccccgacttgaagacagtaggtgcttgaatggaaagtgagtaggcatctttaatcgccctgattaaaggaaagtgttagcctgagagggcctgactgaaaagtaaccaaaggcttaatatcaaacactaattagctttttagtgccttaaccctgacctggttaccagttttctgtagtttctacacccaagccactgaagtcatctgtggcccaagaggtaggacaaaaaaaaaaaaaaaaaaagctgatttcaatatttgatttgttgacatcccaaaatgaaagttttatgtttcccttagaaacatgttttgcttggttctatagtatgttacttaggatctatttaccatatatttgtatgagaaatcctcacccaagcattcaacctaaatctttgaaaagttgggtgctgtctttagtaacttttaaaatagtttaaatctcccattttaatagtgataaggaaacctgttaaaatcatggctattgatgttatagtatggaaagttgaactttatgaacccatacttttaaaaagcatttttaaaaatctaacactgactatagaaacaaattaaaatgtctacctttaagtataaaaaaaaaaaaaaa

SEQ ID NO: 1052 - DNA, 1270 bp, Homo Sapiens
  NM_001037281
gggcggggcggcgcgggcgggccggccgggctgtgcacctgcgcctcggcgggccgcctggggcaccgtccccggcccgcccggccccgccatggcccggccgcagaggactccggcgcgcagtcccgatagcatcgtcgaggtgaagagcaaatttgacgccgagttccgacgcttcgcgctgcctcgcgcttcggtgagcggcttccaggagttctcgcggttgctgcgggcggtgcaccagatcccgggcctggacgtgctacttggctatacggatgctcatggcgacctgctgcccctcaccaacgacgacagcctgcaccgggccctggccagcgggcccccgccactgcgcctactggtgcagaagcgggaagctgactccagcggcctggcttttgcctccaactctctgcagcggcgcaagaaagggctcttgctgcggccagtggcacccctgcgcacccggccacccttgctaatcagcctgccccaagatttccgccaggtttcctcagtcatagacgtggacctactgcctgagacccaccgacgggtgcggctgcacaagcatggttcagaccgccccctgggcttctacatccgagatggcatgagcgtgcgtgtggctccccagggcctggagcgggttccaggaatcttcatctcccgcctggtacgtgggggtctggctgagagtacagggctgctggcggtcagtgatgagatcctcgaggtcaatggcattgaagtagccgggaagaccttggaccaagtgacggacatgatggttgccaacagccataacctcattgtcactgtcaagcccgccaaccagcgcaataacgtggtgcgaggggcatctgggcgtttgacaggtcctccctctgcagggcctgggcctgctgagcctgatagtgacgatgacagcagtgacctggtcattgagaaccgccagcctcccagttccaatgggctgtctcaggggcccccgtgctgggacctgcaccctggctgccgacatcctggtacccgcagctctctgccctccctggatgaccaggagcaggccagttctggctgggggagtcgcattcgaggagatggtagtggcttcagcctctgacagtcaggatgaagccccatgccactccacactgctgggacatggcagggacttcacagtgggggtttttagctggctcacagggctccctcagcctggggaacattaaaggttttctacaaatacagtcaaaaaaaaaaa

SEQ ID NO: 1053 - DNA, 1121 bp, Homo Sapiens
  NM_001037288
gttagagaagggggacacaaatgtcttcaggcttaggtccctgggggctcccagtcctgcccctgttcctctactcacatcccagctcctcccagtttcttttcggacctcctcctctccccttccttctctattccaggctgggttgggctctaagcaaggggagggattagagcctccttcctctctgcccctccccatgggtctctagggggctggtgcaggcagcagcagaggcactctgggcagctgggtgagggcccatctgggcaaggcccccagcgcctgccttctctcccggggccctgtgggcaagcctcctgcttcactttcaggtttctcgaagtgccttcttgctcctgtctgtttccccatcctgccagatttctgtttctcttgctgggcttttggcagtagggggctgtgttggtgggccctacgaagatgctcagtgctcgagatcgccgggaccggcaccctgaggagggggtagttgcagagctccagggcttcgcggtggacaaggccttcctcacctcccacaagggcatcctgctggaaaccgagctggccctgaccctcatcatcttcatctgcttcacggcctccatctctgcctacatggccgcggcgctactggagttcttcatcacacttgccttcctcttcctctatgccacccagtactaccagcgcttcgaccgaattaactggccctgtctggtttttggcatcatcctggtttccatctttgcctatgatgccttcaagatctaccggactgagatggcacccggggccagccagggggaccagcagtgactctggggctacctggctcctaggcccagccagccagagaggacagtggagcccagacacgtctccttgggattcactagcccccagcccgccaaaccccaccccagccctacacagcagtctggcctgagacgtcactggggacttatctgtggagcctggtgctccaggatgtggcttctcatgaagctctggccagaggaggggaacttattgggggagggggggtggaggggaggaatctggacctctaagtcattcccaaattaaaatattcaaattctaaaaaaaaaaaaaaa

SEQ ID NO: 1054 - DNA, 6498 bp, Homo Sapiens
  NM_001037333
cggggccggggcggggccgagcgcggcgcagcggagcggggcagagcatcctgcgccccggcgcggggccctgcggtagcctcaggcccctcccctggacccgccgcagagccagtgcagaatacagaaactgcagccatgaccacgcacgtcaccctggaagatgccctgtccaacgtggacctgcttgaagagcttcccctccccgaccagcagccatgcatcgagcctccaccttcctccatcatgtaccaggctaactttgacacaaactttgaggacaggaatgcatttgtcacgggcattgcaaggtacattgagcaggctacagtccactccagcatgaatgagatgctggaggaaggacatgagtatgcggtcatgctgtacacctggcgcagctgttcccgggccattccccaggtgaaatgcaacgagcagcccaaccgagtagagatctatgagaagacagtagaggtgctggagccggaggtcaccaagctcatgaagttcatgtattttcagcgcaaggccatcgagcggttctgcagcgaggtgaagcggctgtgccatgccgagcgcaggaaggactttgtctctgaggcctacctcctgacccttggcaagttcatcaacatgtttgctgtcctggatgagctaaagaacatgaagtgcagcgtcaagaatgaccactctgcctacaagagggcagcacagttcctgcggaagatggcagatccccagtctatccaggagtcgcagaacctttccatgttcctggccaaccacaacaggatcacccagtgtctccaccagcaacttgaagtgatcccaggctatgaggagctgctggctgacattgtcaacatctgtgtggattactacgagaacaagatgtacctgactcccagtgagaaacatatgctcctcaaggtgatgggctttggcctctacctaatggatggaaatgtcagtaacatttacaaactggatgccaagaagagaattaatcttagcaaaattgataaattctttaagcagctgcaggtggtgccccttttcggcgacatgcagatagagctggccagatacattaagaccagtgctcactatgaagagaacaagtccaagtggacgtgcacccagagcagcatcagcccccagtacaatatctgcgagcagatggttcagatccgggatgaccacatccgcttcatctccgagctcgctcgctacagcaacagtgaggtggtgacgggctcagggctggacagccagaagtcagacgaggagtatcgcgagctcttcgacctagccctgcggggtctgcagcttctatccaagtggagcgcccacgtcatggaggtgtactcttggaagctggttcatcccacagacaagttctgcaacaaggactgtcctggcaccgcggaggaatatgagagagccacacgctacaattacaccagtgaggaaaaatttgccttcgttgaggtgatcgccatgatcaaaggcctgcaggtgctcatgggcaggatggagagcgtcttcaaccaggccatcaggaacaccatctacgcggcattgcaggacttcgcccaggtgacgctgcgtgagcccctgcggcaggcggtacggaagaagaagaatgtcctcatcagcgtcctacaggcaattcgaaagaccatctgtgactgggagggagggcgagagccccctaatgacccatgcttgagaggggagaaggaccccaaaggtggatttgatatcaaggtgccccggcgtgctgtggggccatccagcacacagctgtacatggtgcggaccatgcttgaatcactcattgcagacaaaagcggctccaagaagaccctgaggagcagcctggatggacccattgtcctcgccatagaggactttcacaaacagtccttcttcttcacacatctgctcaacatcagtgaagccctgcagcagtgttgtgacctctcccagctctggttccgagaattcttcctggagttaaccatgggccgacgaatccagttccccatcgagatgtccatgccctggattctaacggaccatatcctggaaaccaaagaaccttccatgatggagtatgtcctctaccctctggatctgtacaacgacagcgcctactatgctctgaccaagtttaaaaagcagttcctgtacgatgagatagaagctgaggtgaacctgtgttttgatcagtttgtctacaagctggcagaccagatctttgcttactacaaagccatggctggcagtgtcctgttggataaacgttttcgagctgagtgtaagaattatggcgtcatcattccgtatccaccgtccaatcgctatgaaacactgctgaagcagagacacgtccagctgttgggtagatcaattgacttgaacagactcattacccagcgcatctctgccgccatgtataaatccttggaccaagctatcagccgctttgagagtgaggacctgacctccattgtggagctggagtggctgctggagattaaccggctcacgcatcggctgctctgtaagcatatgacgctggacagcttcgatgccatgttccgagaggccaatcacaatgtgtccgccccctatggccgtatcaccctgcatgtcttctgggaactgaactttgactttctccccaactactgctacaatgggtccactaaccgttttgtgcggactgccattcctttcacccaagaaccacaacgagacaaacctgccaacgtccagccttattacctctatggatccaagcctctcaacattgcctacagccacatctacagctcctacaggaatttcgtggggccacctcatttcaagactatctgcagactcctgggttatcagggcatcgctgtggtcatggaggaactgctaaagattgtgaagagcttgctccaaggaaccattctccagtatgtgaaaacactgatagaggtgatgcccaagatatgccgcttgccccgacatgagtatggctccccagggatcctggagttcttccaccaccagctgaaggacatcattgagtacgcagagctcaaaacagacgtgttccagagcctgagggaagtgggcaatgccatcctcttctgcctcctcatagagcaagctctgtctcaggaggaggtctgcgatttgctccatgccgcacccttccaaaacatcttgcctagagtctacatcaaagagggggagcgcctggaggtccggatgaaacgtctggaagccaagtatgccccgctccacctggtccctctgatcgagcggctggggacccctcagcaaatcgccattgctcgcgagggtgacctcctgaccaaggagcggctgtgctgtggcctgtccatgttcgaggtcatcctgacccgcattcggagctacctgcaggaccccatctggcggggcccaccgcccaccaatggcgtcatgcacgtcgatgagtgtgtggagttccaccggctgtggagcgccatgcagttcgtgtactgcatccctgtgggaaccaacgagttcacagctgagcagtgtttcggcgatggcttgaactgggctggttgctccatcattgtcctgctgggccagcagcgtcgctttgacctgttcgacttctgttaccacctgctaaaagtgcagaggcaggacgggaaggatgaaatcattaagaatgtgcccctgaagaagatggccgaccggatcaggaagtatcagatcttgaacaatgaggtttttgccatcctgaacaaatacatgaagtccgtggagacagacagttccactgtggagcatgtgcgctgcttccagccacccatccaccagtccttggccaccacttgctaagcagaagatcctgcagacccttatctggaggaggaagagaagcaggagagagaaagccacagccagcctgccataggatccaactggacaacgtgtgggatggacctggaaacaagcacctccccaaacacatcaccactccctagggcggggcctgtgcatgctctcccatgacatctccatgctggtttctccatagcataaatgaaaaaaaaaaaaaaaaagtaaacagggcagtgtgtgctttttcttttctcccccctcaactatattaagaactcctagtttcaccctttctccatcccatcatcccacctatctgtggttgcttcccaagacctcctcccaagatagacatctcctacccagtgcccttgtgtgaccccaggactcaagtctcagactgtgaacagatgtggccatgcccagagacgccagcctggccagaagggcatgcctcagcttactacttcatctctcctggttccctccctgcagtgccccgggtgtcatcttctcccactctgggtaccagggattctaccacataggcttcccaaagccccattctaactcccctctctcagggaagccctagagagaggtccaaaaagcattcacagctgtatcacactctatgcaggtggggtaggagactgatcaggcctgctgtggggaagcagtatgtatgaacacagccagaaatgtcatagtccaaacaggatgctttcaggccatctcagctgcttgatggtgagatggttcccttattccttcaggaaaggcttagcattgggccacataggggaagcagctttgaacaaatcagtcatagcactgcctatagcattagccagtgaccaaattagggacaacgtcttggcacagaattgcttatcaaggaacatttccacaagaaagaaaatattaaggggttatttccacagaagcccaaaacgtcttggaaacacagaggtgaggaggaggaatagtaattgtcaatgagcttttaataccaagatacaccccctgcccccaaagaagagtcctcttttagggaatcagaaccttcattgtcctagaagctgaaagattcttggaacattttagcttttactctcaacttgctgttctctttacattccttaagttagactttcgggtgtggcttctctcccaggggtaacatttacttccattttctagactgaaccaaaagtcttctgcagaatctcccaccgagtgtggtaagaaggaaggacaaaaggctttaggatataaatttcatgttacagagcatgtcattgtcaaaggaaatctgtggccctgagattttaagaacataaaatgtgacatttgatatttctccagcccagggaagtaagatggttagcaatggttgccttaatcaaatggtcccatttttaaccccaaaggaagtgcccacagcaagaggtttgtgtgatgcacttatgtcctccggtgaggaaagggggccacatatgaaaggccccttaggtcagatcctgagagtagcacatttgagtgcagattcctgggccccacctcaaacctactaattctgaatctctgggaatagggccaggaaatctgccctttctacaaactacccaagttgttctgttgcacatcaatgtttgggaaccactgctgtaagggaatcattctggtcaccttgagctttgagctaccactaagccatgaaagaaaatacatcatacagggaagagagaagggaggaggttccaagtagtaactggcagatcctcctgtctggaggtaccaccttctattctggtttctgacttttccttcttgatgaccatagatgtgttccagaggcaaaagagacacattatcccagatggcagaacatgctttcaaaacatataaaatgtcaaagttccagatccttctacatctttagtcctgtctgaggatggtagctggctctctgtagctgatagatggctagagttccatccaaatccttgaccacgacttcatggagatttgaataatctatttgatgagatttctatttcaataacccacctctctcaccccacattcatatccctaaatttgaccctctgggccgagtcacattaccttcaggagacttgatcccagtagactgaggtcttccctttcagcagaaagatttcatttccctggcttgccagtggcactgatttccgaacacccaatgagtttaatattctttcctccttggcattactgccccagcctctttttattttttttgtgtgtgtctaataaccaggaaaaaaataaagcttaggttttaaaaagttttaaaaataatctgtttcagaaactgtcaaatgtaccatatttgtattaagagttgttgggaatttttgtacaatgaatttacatttatttatggtgacatatttacgcttgtgatcaaataatgatgttaaattcttaaatcatatttgctatgcagctgaagatgatattttgatttgtattttgggggtacctgtgttgagttgataaacatttccatcttcattaaaactgcttccaaactagtaaaaccagcaa

SEQ ID NO: 1055 - DNA, 4051 bp, Homo Sapiens
  NM_001037334
gtctcctcgctgcagtcgctccggagctgcacgggtgttttgcgtgttgctgcgtcatcgccagtggccggtttgaatgagactcgtcgcaccgaagccgccgccaccaccgcgcctccgcctcggccgccgccgcagctgctcctggtccccgtccctttgccgccctcgtcaggcccagctctcctgcgccgccgcctcccgccgcgccccgccatgccgctctactccgttactgtaaaatggggaaaggagaaatttgaaggtgtagaattgaatacagatgaacctccaatggtattcaaggctcagctgtttgcgttgactggagtccagcctgccagacagaaagttatggtgaaaggaggaacgctaaaggatgatgattggggaaacatcaaaataaaaaatatggagttaccatgtggattgacaaaccttggtaacacttgttacatgaatgccacagttcagtgtattcgttctgtgcctgaactcaaagatgcccttaaaaggtatgcaggtgccttgagagcttcaggggaaatggcttcagcgcagtatattactgcagcccttagagatttgtttgattccatggataaaacttcttccagtattccacctattattctactgcagtttttgcacatggctttcccacagtttgccgagaaaggtgaacaaggacagtatcttcaacaggatgctaatgaatgttggatacaaatgatgcgagtattgcaacagaaattggaagcaatagaggatgattctgttaaagagacagactcctcatctgcatcggcagcgacaccttctaaaaagaaaagtttaatcgatcagttcttcggtgttgagtttgaaactaccatgaaatgtacagaatctgaagaagaagaagtcaccaaaggaaaggaaaatcaacttcagcttagctgttttatcaatcaggaagtcaagtatctttttacaggacttaaattgcgacttcaggaagaaatcaccaaacagtctccaacgttgcaaagaaatgccttgtatatcaaatcttccaagatcagccggctgcctgcttacttgaccattcagatggttcgatttttttataaagagaaggaatctgtgaatgccaaagttcttaaggatgttaaatttcctcttatgttggatatgtatgaactgtgtacaccagaacttcaagagaaaatggtgtcttttcgatccaaattcaaggatctagaagataaaaaagtgaatcagcagccaaatacaagtgacaaaaagagtagtccccagaaagaagttaagtatgaacccttttcttttgctgatgatattggctccaataattgtggatactatgacttacaagcagtactaacacaccagggaaggtctagttcttcaggtcattatgtatcatgggtgaaaaggaaacaagatgaatggattaagtttgatgatgacaaagtcagcatcgtaacaccagaagatatcttacggctttctggtggtggagactggcatatcgcttacgttctactctatgggcctcgcagagttgaaataatggaagaggaaagtgaacagtaatcttcattttagtatttatgcttagatgtgaaaataaatgttatttgttgatcatttctataatccagagctttagaggaagacacataggtgggtttatgtttcacctcatttggaacaaaagaggacagaagcagaccactctgtgcaccaacctaaaaaattacagagaagagaaaattatctttggattgtgctgccctatataaaggtggcagaaagacatttttaaaaagcttattatttcttgcattattttaaaaagttcagagttgaaatgcctttcaaccatttccttctgtggtcatttttcttgctgcctttttcacccaagattcagcagtcagatgtttactgcacacctattacctattatttgctgttcttgcatggttcaaaccaccattctgtagccacccatcctttgccttatctaacaaacatttttccaggaaggtggaaaaggaagtgttgctctcattgtgtgactcagtgctgctgtccatcccatggaaacatgggcacaatcaagtatttgtccagcctattgcaggcttttcctgactttaaaataaattgtgatcaataatagtacctttgattatacatttattattgtgtctctctctgatgtactgtggattgtacatttaactttggaatggctttgtaataatcagtcttaagaaaatgttgacaagctctggttgcttatttttagaaaatgaggacatttaataataataaaaaaaaagggattaatagcttttgacctcaagtcttttgtcttctgagtgttggagcttggctgaagacatgtttaatactgtacaatttctgaagatggttattaacactgtgctgttaagcatccatttaaaaatatttgttatcttctttgcctgcctgtattttaaaaagaaatacaaagttgtaaaagtaatggatttctttggatgctgaatgcagtgatgttatcagtcagattctttccttggctcagttgtgtttgtatttcctttcttaattccccaaatcttggctgggcacggtggctcacgcctgtaatcccagcactttgggaggctgaggcaggtggttcactggaggttgagttcgagaccagcctggccacatggtgaaaccctgtctctactaaagatataaaaattagctggatgtggtggtgcacacctgtgatcccagctacttgggaggctgaggtgggagaattgcttgaacctggaaggcagaagttgcagtgagctgagatcacaccactgcactccagcctgggtgacagagagactctgtctcaaaaaaaaaaagaaaaaattcccaaatcttaatgtctgtttcagaattttagtgattttaaagtgatagtagaaaataccaagcatatgaggtatttcaatatgataggcttcttacattttaatagttactcatctttgttccaggacccttgactgatgctagggaaaggataaagcatagaataccagccagtttggctctgattttgagttatttataataaagtttggggattatcataacatctcatatctttgtgtatgttgttttaatgctcggcagagcacaacactgatgataactattaaaaatagaaaataacagccattttactttcaaatctgatgtgatgcaatctgtgaacactaggaggggataaaataagcattgcagggaaacttatttgtaaatagcttcctcacctaaactttgacttggcaatcaatactttctactttgtggaggggattaagaatagaatgggcaggatgagaccatgaaaattataatgattcatgtatatttgtatgatgcttgtaactttgcaaagtcttttttattcattgtctcatttggtcagaacaattttattgaggacatgaatttaacaattagaatttagattttctgactgtagctactaaatgttgtagctactagaccaggtgagctaggtttagagcaaagtatataagccttgtatggactatattagaattttaaaaattgtaattaattccttatcatcattataaaaagcttgatttttttatttgatctaaaaaagcattattccaaagaattttttcaagtagaaatgggagttagttataccagtgttgtttttaactaataaggctattttagaattcagccttgcctgtaaggtctttgagaagggagaggagtaggccaaaaaaaaaaaagtcttgattcctgaatgtgccttatatgctgtgccactcacaccgaggccatcatctcaacattagagttgtgctagattactgcttgactgactagctaggttaggcctaagagtgtttaccgaataatctgcactcactcagtagcccttcttcaggattaaaaacgatgatgacctcatcttagagccctaaagggaaatgcttat

SEQ ID NO: 1056 - DNA, 4435 bp, Homo Sapiens
  NM_001037442
cattttggtcaacaccctgcttactgcgcacggccaatcctatgagaactcagcatcccagctcatctgagcagatcctggaagtgatttctgcagctcaggattttttttttaagctacattgaaaatataggtttattttttgttcaggtttttcttttatattttttttctgcacaaaggaggaggatttttcacttactcatatcgaggccagatttttaaagccagctaaggcagcatcagctgtgcgggatttaaagcctatagctcagctgaaaaaaaaggtggggggcagggaagggaagataaaaggagaggaagctgggagaagacaagcatcatcttattttgctatgtggtaggaactgtctataagatagtgtagaattgtttatcttgagcagtttgttcttaacctataaggtatttttccttttttttttttttaaacctcccccacccttttcctgaaagctttgtttcagagctttgtattgggtttttttggtgaggaggttgtatttatttttttggtgtgtgtgtgtgagtgtgtgtgtgtctgtgtgtgtgttgtggtcccagctgagtcatcatgtctgctctgacgcctccgaccgatatgccaacccccaccactgacaagatcacacaggctgccatggagaccatctacctttgcaaattccgagtgtccatggatggagaatggctctgcctgcgagagctggatgacatctcacttacacctgacccagagcctacccatgaagatcctaattatctcatggctaatgaacgcatgaacctcatgaacatggccaagctgagtatcaagggcttgattgaatcagctctgaacctggggaggactcttgactctgactatgcacctctccagcaattctttgtggtgatggagcactgtctgaaacatggcttgaaagctaaaaaaacttttctcggacaaaataaatccttctgggggcctctagaactggtagaaaagcttgttccagaagccgcagagataacagcaagtgttaaagatcttccaggacttaagacaccagtaggtagaggaagagcctggcttcgtttggcattaatgcaaaagaaactttcagaatatatgaaagctttgatcaataagaaagaacttctcagtgaattctacgaacccaatgccctcatgatggaagaagaaggagccataattgctggtctgttggtgggtctgaatgtcattgatgccaatttctgtatgaaaggagaagacttggactctcaggttggagttatagatttttcaatgtatctcaaggacgggaacagcagtaaaggtactgaaggagacggtcagattactgcaattctggaccagaagaactatgtagaagaactgaacagacatttgaatgctactgtaaacaaccttcaggcaaaagtagatgcattagaaaaatccaacactaaactgacagaggagcttgcagttgcaaacaacaggatcattaccttacaagaagaaatggaacgagttaaagaggaaagttcctacatactggaatccaatcggaagggtcccaagcaagacagaactgcagaagggcaagcactaagtgaagcaagaaagcatttaaaagaagagacacaattacgattggatgttgagaaagaactggagatgcagatcagcatgaggcaggagatggaattggctatgaagatgctggagaaggatgtctgtgagaagcaggatgccctggtatctcttcggcagcagctggatgacctcagagctctcaagcatgaacttgcctttaagctgcagagttcagacttaggagtaaaacagaaaagtgaactaaacagtcgcttggaagagaagactaatcagatggctgctaccattaaacaacttgaacaaagattgcgccaggctgagcgaagccgccaatctgctgagttggacaaccggctcttcaaacaggactttggagacaagatcaacagtctgcagctggaagtcgaggagctcaccaggcagcggaaccagcttgagttagaactaaaacaggaaaaagaaagaagattacaaaacgacaggagcatcccaggaaggggttcccagaagtcagaatccaagatggatgggaagcacaaaatgcaagaggaaaatgttaaactaaaaaagcccctggaagaaagccacaggctgcaaccccaccctatggatgaacaggatcagctgctgctctctgaaaagccacagttgtgtcagctatgccaggaagacggcagcctaacaaagaatgtgtgtaagaactgcagcggaaccttctgtgatgcctgttcaacaaatgaactgcctcttccttcaagtatcaagcttgagcgagtttgcaatccctgtcacaagcatctgatgaagcaatattctaccagcccatcataagactggaggccaagacctggaccaaaacgtttatgcaggctcctctgtacctgtgttttagctgtcaggatctcatagagcccagttcttagagtcaactaaagagttgataggaatttactaggtccagggagaaaaggcagtggttggggttactggaaattttgctcattttctctaatgactgtatgaataaaagtgaacttacttgagcctttctcttctaaatctaaacaacctgatattgaaggtttgctttatagcatatctttggaaaggcaactcatttttatgattagtgatactggggtggatttaataggagagagaatccaggcagataagaataaaaaggaaaatgatcatctccttctatagcatttgcagattcaagggggagaggtagatgctgagatcaaaatgacagttgttacttatttttccaggtgctgttagtataaacattgtttcctcttcacccctgctaactacctctttaaagtatttctaccaaactgtgaacccaatctcagggaaaagaaattaaaaagtaatataaattctgcatatattaaaaacaatattgtaatatgttataatttcaggaccagaattttctggtctttacctacaagggttttcattatcaaaaaaaagaacatttgtttttctactttatgacttcaaagtaaataactgcccttttcagaatctccttccacaaaacaagccaactcttccccattccctccatcttcctttccaagtcataatggaaattgtaaggagttttaaaaatagggtttggcttttgcaaatagaagatattgattaaagcaaagtcaaatatagagtaaaataagtttaatttgttttcttaagacagggtcttgctctgttgcacaagctggagggcagtagtgcaatcacagctcactgaatccctgttctcccgggcctcaagcaatcttcccaccttagcctcccaagtagctgggactggctttttttttttttttttggccggggagggggtctcattggttgctcagcctggtctcaaactcctgggcttaagcagtcctcccaccttgacttccacagtgccgagattacaggcatgagccaccacacctggccaagtttaatttgttcatggctgagaacagttagctcggaatacttacattgttttttgaataaggaattccttattctgagtgagtcacgaatgagagctgatagatgctttcttgaaaagggcaatacagtcatcccttggtatccatgggggattggttccaggaacccaacttgatatcagaatccatgggtgctcaagtcccattatagagaatgggttatatggtatttgcatataacctacatacatcctcctgtgtactttaaatcatctgaagatgattacttatacctaataaaatacctacacatcacttcatttgcatggattcaacatagtgcttggtgttcagtaaattcaagttttgcttttttggaactttgtggaatttttctttttctgaatatttttgattggcagttggttgaagccatggatgcagaacccatggatatggagggctgactgtacttacttacatatctatctatctttgagtaacaaactctttgggggaaaagagggaagtgtattgagcaagagaaggcaaaaaacattacataatattttgattctgttacgtgtgtctatagattgtttcattctaatcaagacctaagaaggtatgattctgtgactgatttagaattctggggtggaaatatcctggaaccatgttttttaataaattctgtctcttggaaagagttaacaacagcctgggaaagagttgttattccaaaagtcagcctgttacttggtgaagctgaagtttaagagttctggggaaaaataaaatctagtaattccagcctaaaaaaaaaaaaaaaaaa

SEQ ID NO: 1057 - DNA, 7637 bp, Homo Sapiens
  NM_001037533
tttccgtggaatcaggccggctgaatggaacaaaagtgggacttttaaaatgttgccctgtaagaagagaagaactacagtgacagagtccctacagcataaaggcaatcaagaggaaaacaacgtagacctagaatcagccgttaaaccagaatctgaccaggttaaggacttgagttcggtgtcactatcctgggatccaagtcatggcagagtagctggcttcgaagtacagtctttgcaggatgcaggaaatcagcttggtatggaggatacatctctgagctctggaatgctcacccagaacacaaatgtaccaattctagaaggtgttgatgtggccatctctcagggaatcaccctaccttccttggagtcttttcacccccttaatatacacattggtaaaggaaaactccacgctactggctcaaagagagggaaaaaaatgacactcaggcctgggccagttacccaagaagacagatgtgatcatcttaccctaaaggagcctttttcaggagagcctagtgaagaagtcaaggaagaaggagggaaacctcaaatgaattctgaaggggagataccttccctgccatcaggcagccaatctgcaaaaccagtaagccagcccaggaaatcaacccagccagatgtttgtgcctctcctcaagaaaagccactcaggactctgtttcaccaacctgaggaagagatagaagatggtggactcttcattccaatggaagaacaagacaatgaagaaagtgagaaaaggagaaaaaagaaaaagggtaccaagaggaaacgagatggaaggggtcaagaagggaccttggcatatgacctgaaactggatgacatgcttgaccgtaccttggaggatggtgccaagcagcacaatctaacagcagtcaatgtccgaaacatccttcatgaagtaatcacaaatgaacacgtggtagctatgatgaaagcagccatcagtgagacggaagatatgccaatgtttgagcctaaaatgacacgctctaaactgaaggaagtagtggaaaaaggagtggtaattccaacatggaatatttcaccaattaagaaggccaatgaaattaagcctcctcagtttgtggatatccaccttgaagaagatgattcctcagatgaagaataccagccggatgatgaagaagaagatgaaactgctgaagagagcttattggaaagtgatgttgaaagcactgcttcatctccacgtggggcaaagaaatccagattgaggcagtcttctgagatgactgaaacagatgaggagagtggcatattatcagaggctgagaaagtcaccacaccagccatcaggcacatcagtgctgaggtagtgcccatggggcccccgccccctccaaagccgaaacagaccagagatagtactttcatggagaagttacatgcggtagatgaggagctggcttccagtccagtctgcatggattctttccagcccatggatgacagtctcattgcatttcgaacgcgttctaagatgcccctgaaagatgttcccctgggccaattagaggcagagctccaagctccagacatcactccagatatgtatgaccccaatacggcagatgatgaggactggaagatgtggctggggggacttatgaatgatgatgtggggaatgaagatgaagcagatgatgatgatgatccagaatataatttcctggaagacctcgatgaaccagacacagaggatttccggactgaccgggcagtgagaatcaccaaaaaggaagtaaatgagctgatggaagagctgtttgaaactttccaagatgagatgggattctccaacatggaagatgatggcccagaagaggaggagtgtgtagctgagcctcgtcctaactttaacacccctcaagctctacggtttgaggaaccactggccaacctgttaaatgaacaacatcggacagtgaaggagctatttgaacagctgaagatgaagaaatcttcagccaaacagctgcaggaagtagagaaggttaaaccccagagtgagaaagttcatcagactctgattctggacccagcacagaggaagagactccagcagcagatgcagcagcacgttcagctcttgacccaaatccaccttcttgccacctgcaaccccaacctcaatccggaggccactaccaccaggatatttcttaaagagctgggaacctttgctcaaagctccatcgcccttcaccatcagtacaaccccaagtttcagaccctgttccaaccctgtaacttgatgggagctatgcagctgattgaagacttcagcacacatgtcagcattgactgcagccctcataaaactgtcaagaagactgcgaatgaatttccctgtttgccaaagcaagtggcttggattctggccacaagcaaggttttcatgtatccagagttacttccagtgtgttccctgaaggcaaagaatccccaggataagatcgtcttcaccaaggctgaggacaatttgttagctttaggactgaagcattttgaaggaactgagtttcctaatcctctaatcagcaagtaccttctaacctgcaaaactgcccaccaactgacagtgagaatcaagaacctcaacatgaacagagctcctgacaacatcattaaattttataagaagaccaaacagctgccagtcctaggaaaatgctgtgaagagatccagccacatcagtggaagccacctatagagagagaagaacaccggctcccattctggttaaaggccagtctgccatccatccaggaagaactgcggcacatggctgatggtgctagagaggtaggaaatatgactggaaccactgagatcaactcagatcgaagcctagaaaaagacaatttggagttggggagtgaatctcggtacccactgctattgcctaagggtgtagtcctgaaactgaagccagttgccacccgtttccccaggaaggcttggagacagaagcgttcatcagtcctgaagcccctccttatccaacccagcccctctctccagcccagcttcaaccctgggaaaacaccagcccgatcaactcattcagaagcccctccgagcaaaatggtgctccggattcctcacccaatacagccagccactgttttacagacagttccaggtgtccctccactgggggtcagtggaggtgagagttttgagtctcctgcagcactgcctgctgtgccccctgaggccaggacaagcttccctctgtctgagtcccagactttgctctcttctgcccctgtgcccaaggtaatgctgccctcccttgccccttctaagtttcgaaagccatatgtgagacggagaccctcaaagagaagaggagtcaaggcctctccctgtatgaaacctgcccctgttatccaccaccctgcatctgttatcttcactgttcctgctaccactgtgaagattgtgagccttggcggtggctgtaacatgatccagcctgtcaatgcggctgtggcccagagtccccagactattcccatcactaccctcttggttaaccctacttccttcccctgtccattgaaccagtcccttgtggcctcctctgtctcacccttaattgtttctggcaattctgtgaatcttcctataccatccacccctgaagataaggcccacgtgaatgtggacattgcttgtgctgtggctgatggggaaaatgcctttcagggcctagaacccaaattagagccccaggaactatctcctctctctgctactgttttcccgaaagtggaacatagcccagggcctccactagcagatgcagagtgccaagaaggattgtcagagaatagtgcctgtcgctggaccgttgtgaaaacagaggaggggaggcaagctctggagccgctccctcagggcatccaggagtctctaaacaaccctacccctggggatttagaggaaattgtcaagatggaacctgaagaagctagagaggaaatcagtggatcccctgagcgtgatatttgtgatgacatcaaagtggaacatgctgtggaattggacactggtgccccaagcgaggagttgagcagtgctggagaagtaacgaaacagacagtcttacagaaggaagaggagaggagtcagccaactaaaaccccttcatcttctcaagagccccctgatgaaggaacctcagggacagatgtgaacaaaggatcatcaaagaatgctttgtcctcaatggatcctgaagtgaggcttagtagccccccagggaagccagaagattcatccagtgttgatggtcagtcagtggggactccagttgggccagaaactggaggagagaagaatgggccagaagaagaggaagaagaggactttgatgacctcacccaagatgaggaagatgaaatgtcatcagcttctgaggaatctgtgctttctgtcccagaactccaggaaacaatggagaaactgacttggctggcatctgaaaggcgcatgagtcaggagggtgagtctgaagaagagaattctcaggaggagaactctgagccagaagaagaggaggaagaagaagcagaaggaatggaaagcctgcagaaagaggatgaaatgacggatgaagcagttggagactctgctgagaagcctcctacttttgcttcacctgagactgctccagaagtggagaccagcagaactccaccaggagagagcatcaaagctgctggaaaaggccggaacaatcatcgagctcgcaacaagcggggaagtcgggctcgggccagcaaggacacctccaagctgctgttgctgtatgatgaggacattctcgagcgagatccactcagggagcagaaggacttggcctttgcccaagcttatctgaccagggtgcgagaagccctacaacatatccctggcaagtatgaagacttccttcaagtcatctatgaatttgagtcaagtacccagagacggacggctgtagatctctacaaaagcctgcaaattctgctccaagactggcctcagctgttgaaagactttgctgctttcctgttacctgagcaagctctggcctgtggattatttgaggagcagcaggcttttgagaagagccgcaagttccttcggcagctggagatttgctttgcagagaacccctcacaccaccagaagattatcaaggtcctccaaggctgtgcagactgccttccccaggagatcaccgagctcaagacacagatgtggcagctcctcaagggccacgaccacctgcaggatgagttttctatcttctttgaccacttgcgcccagcagctagccggatgggtgactttgaagagatcaattggactgaggaaaaggagtatgagtttgatggctttgaagaagtggccctgcctgatgtggaagaagaggaggagcctcccaagatacccacagcctcaaagaacaagaggaaaaaagagatcggggtccaaaatcatgataaggagactgaatggccagatggggccaaggactgtgcctgctcctgccatgaaggaggtccagattccaagctgaagaagagcaaaaggcggagctgtagccactgtagcagcaaggtctgtgacagcaaatcctacaagagcaaggagccccatgagttggtgggcagcagcccccaccgagaggctagtcctatgcctggtgctaaggaagctgggcagggcaaggatatgatggaagaggaagccccagaggagcgggagagcactgaggccacccagagcaggactgtcaggaccaccagaaagggagagatgcctgtttcaggattggcagtggggagcactttgccatcccctcgagaagtgactgttacagaacggctcctcctggatggcccaccacctcattcaccagagactcctcaatttccccccacaactggagctgtactgtacactgttaagagaaaccaggttgggcctgaggttcgctcctgccccaaggcatcccccagacttcagaaagagagggagggccaaaaggcagtgagtgagtcagaggctttgatgctggtctgggatgcatcagaaactgagaaattgcctggtaccgtggaaccccctgcttccttcctgagtcctgtttcctcaaagaccagagatgcagggagaagacatgtgtccgggaaaccagacactcaagagagatggctgccctcaagcagagctcgggtgaagacaagagacaggacgtgccctgtccatgaatctccatcaggaattgacacctcagagacttctcccaaagcccctagagggggtttggctaaagacagtggaacacaggccaagggtccagagggggagcagcagccaaaggccgcagaagctacggtgtgtgccaacaacagcaaggtcagctccactggggaaaaggttgtcctgtggacaagggaagctgaccgtgtgatcctcaccatgtgccaggagcaaggggcacagccacagaccttcaacatcatctcccagcagctgggaaataagacccctgctgaggtttcccaccgttttcgagaactcatgcagctcttccacactgcctgtgaagccagctctgaggatgaggatgatgcaaccagtaccagcaatgcagaccagctgtctgaccatggggaccttctgtctgaagaggagctggatgaatgagactctgggaatcatctacacaggaccaaacccaacaggcgccctggcaccggggagggggtagttgtactctgcttgtacagtccttgagcccagtttacagatctggagagcaggaggccaggacaaggacaaaggctggaggatggagtaggacccaggggctctgccatcctaggcatcattcaaggtcttttatgaagactttacagatgtcctctgtaaatagcatcgagagtggagttcagctcctttctctacttttttttggtctgatggcacatatttattgttctgtggtctaatcacagtgtttctaaatgtaaaaagtgcatatgttggtgtagctagtcccgcgacattgagctcctctgcatgaagacactgggctcctgcatccagctgtttttattgcaaactagctcctttctcccacactgggaactttagtccacgaggctgtcaccaccctggtagcactgggccaggctttgtagctcctgcagcagctctgctacgtcatcgtgctccactccagcatccatgaagctggcccagcgccgcaagtcgagtttggtgaggtctctggccaaggcttccagggtctggtgcagggacgaagaggaacacagtgccccaaacactgggatgctctccactgctgtggagggagaggaaacagagacctgtagatggatgattattctgccctgggactcgccaaactgataaggaagtccaaccttagtagacttgattgtaaactcaacaaatttggtgtattgtccccttagtacaccagtactccagaggaagaatgcttttcttgggagccatagggtgaataaaggaatgtttaactgtg

SEQ ID NO: 1058 - DNA, 1725 bp, Homo Sapiens
  NM_001037537
gggcaattgccgcgttgccctgccctccgggatccctgggggcctctgctcctctctttgtggagacgtcgtttcaccggcggcgcgtgaccccggcagctgtccagagacccagagatgtccaatcacaggcgcacggtgcacaggcgcgcagggctgcctggaaccggcccaggcaggcagtgaccgggacctctccggaggggagaggacggtgccctcccgggcaggagctggccaggcaggcgctgcccagggcggcctccctgctggactacggcattgccactgagttatataaagacactatttggggaaggacagcgggtatactctggataataacgttctaaccctggaacagagaaaattttatgaagaaaatgggtttctagtaatcaaaaatcttgtacctgatgccgatattcaacgctttcggaatgagtttgaaaaaatctgcagaaaggaggtgaaaccattaggattaacagtaatgagagatgtgaccatttcgaaatccgaatatgctccaagtgagaagatgatcacgaaggtccaggatttccaggaagataaggagctcttcagatactgcactctccccgagattctgaaatatgtggagtgcttcactggacctaatattatggccatgcacacaatgttgataaacaaacctccagattctggcaagaagacgtcccgtcaccccctgcaccaggacctgcactatttccccttcaggcccagcgatctcatcgtttgcgcctggacggcgatggagcacatcagccggaacaacggctgtctggttgtgctcccaggcacacacaagggctccctgaagccccacgattaccccaagtgggaggggggagttaacaaaatgttccacgggatccaggactacgaggaaaacaaggcccgggtgcacctggtgatggagaagggcgacactgttttcttccatcctttgctcatccacggatctggtcagaataaaacccagggattccggaaggcaatttcctgccatttcgccagtgccgattgccactacattgacgtgaagggcaccagtcaagaaaacatcgagaaggaagttgtaggaatagcacataaattctttggagctgaaaatagcgtgaacttgaaggatatttggatgtttcgagctcgacttgtgaaaggagaaagaaccaatctttgaaatagccatctgctataactctttcaacagaaaaccaaaaccaaacgaaatgtctaaggaaaatgttttcttaatgagatgatgtaaccttttctatcacttgttaaaagcagaaaacatgtatcaggtacttaattgcatagagttagttttgcagcacaatggtgttgctttaatggaaaaaaaaaacagtaaaagtgaaatattactgttttaaggaaaactaatttagggtggcagccaataaaggtggttggtgtctaatttaagtgttaaatcaatttctttcattcagttagctctttacccaagaagaagtgaatgatttggagcttagggtatgttttgtatcccctttctgataaacccattccctaccaattttatgtcataagagatttttttcccccaaatctagaacaatgtataatacattcacatctagtcaagggcataggaacggtgtcatggagtccaaataaagtggatattcctgctcggacaaaaaaaaaaaa

SEQ ID NO: 1059 - DNA, 2923 bp, Homo Sapiens
  NM_001037540
gtcgcgggagctctctgatccactcaggggtcagggcatcactggtctcgcgtgcgcgtgaccaggcccggtttccggtgccaggacctttccgaagcgtcgagtggcctaacggtcacagctgtcgcccatcggagaggcaggactactgcgagcagttttaccgcgacctccggaggccggcgtgacaggctctgtcactaaaataggagtagaggtttaccactcttaggtgactaagcagtatcacaaataaaccctccagcaagtttaaaaataattaggtccaactcagaggaagtggagtttctcctgttgcacaaaaatgatgtctaacagctccagtgaaatcgatgtgataaaaacaagaatacctacttacgatgaagatgacaacactattctttatgcgtatgaaacaaaacctgaatttgtcaataaagaaccgaatattgtatctgacgcatcctgtaatactgaagagcaactgaagacagttgatgatgtccttattcattgccaggttatatatgatgctctgcaaaacctggataagaagattgatgtgattcgtagaaaggtttcaaaaatccaacgtttccatgcgagatccctgtggacaaatcataagcgatatggatataaaaagcattcttaccggcttgttaaaaagcttaaactccagaaaatgaagaaaaatgaggtttacgagacattctcctaccctgaaagttacagccccactttaccagtgtcaaggcgtgagaataattccccgagcaaccttccaaggccatccttttgcatggaagaataccagcgagctgagctggaggaggacccgatcctcagccgcactccgagtccagtgcatccctcagatttctctgagcataattgtcagccgtattatgcatctgatggtgcaacgtatggttcttcttcagggctctgccttggcaaccctcgggctgacagcatccacaacacttactcaactgaccatgcttctgcagcaccaccttcagttacaaggtcaccagttgaaaatgacggttacatagaggaaggaagcatcactaagcacccttcaacctggtcggtggaagcagtggtcctatttctaaaacaaacagatcctcttgcattatgccctcttgtcgacctcttcagaagccatgaaattgacgggaaggctctgctcctactcacgagtgacgtgttgctgaagcacttgggggtgaagctgggaacggctgtgaagctatgctactacattgaccgacttaaacaaggaaaatgctttgaaaattgaaaaaatccttgtgcaaatttagattgggccaacttctagaggcaccaatgccttcttagtgtggaatcatttttctgccctttagtcgtttttgttttgtagaaagtatctctcaaaatatattatagctagaattgtagaactatgttatagtccagtctacttctttaaaaaccatttaaactgctagatagtattagaatagtccaatagaaaattcattctttataggtctttaaaaattacttttattatattgtttacaaatatatttcatgcaagaaacagaaaaaaaaaaaaaccctttgattctggttcatctcgatacagagaaccaaaacagctaagagaggtattatcagggttgacaactcctatgattgaatctatgggaattattcctcagaagagaatttaaaggtgtacccatatatatctctttctggagtattttatctgtctgatgttgcagtattctacaagtttccagaaagagaatagccatataaattattttcctttctgctattatttctctatatgttttatttattcagatttagagtaaaaaataagcatataaacttttattatgtgctcttaacagttttaagataaactataggatagatagaatggttattttatgcaagaaatattgtaccgcaagggtggtttggatgaagtctgactactttttttcaaacaaactattatattaaaactgtcatattttggctaagtttggacctataactacactttcattgtttgcatctctctatgaagatacgtctgtccaaacttttaaaaggcataactgtattttatgtgtttattctttatatagatagtattttatattttattctcacccgaagtattcacacaatctttttaaaaaaaatttgaaatggcattttgtattgccacagaggtaggatgagccatatattagtgaaatgttttattttgtaaaatataaatggattatttgccatcattagtacctctcaacttactttttagaggacaagaaacaatctgtagattggtttccatacagggaagttctccgtcctatgcaatgtttctaattaatttgcttaattctgagccattaatcctgctacactttgaatgatacattaattcagactaatctttgggggctttattttgtaagttagaactttcaagggaaacatgttcaacactattattttgttataaatttataactttgttattacattgtgtaacaaatataaggtttacgagctatgagaattggtgctatcaccattagctatttgctgtaatgtcaagaaaatgttcaccagatgcaagaatgtaccttttctttttagaaagccaaatgtactttagacatgaatgcaactatttaaagaatagcttcatcaatgttattccttacatgtcataagattcttacttaaacttggtcttctttcaaattgtttgtatgaagatgctgtacccacttgaacagtcctcaggtgtttacataaatactatgttttacagttttcatattttaaaatattaataaagttaaatcacaatagttcaaaaaaaaaaaaaaaa

SEQ ID NO: 1060 - DNA, 1996 bp, Homo Sapiens
  NM_001037633
accggctcagacggtcgccgccgcgtttgcgcagggggagctggtcgccgccgcggccgcctggaattgtgggagttgtgtctgccactcggctgccggaggccgaaggccagctattacttctctactgaggccaactgtgagccctggtgtgtttcattggcaggagaagaggctaattaagtgaaactgaaaggtccctgactatggctccccagagcctgccttcatctaggatggctcctctgggcatgctgcttgggctgctgatggccgcctgcttcaccttctgcctcagtcatcagaacctgaaggagtttgccctgaccaacccagagaagagcagcaccaaagaaacagagagaaaagaaaccaaagccgaggaggagctggatgccgaagtcctggaggtgttccacccgacgcatgagtggcaggcccttcagccagggcaggctgtccctgcaggatcccacgtacggctgaatcttcagactggggaaagagaggcaaaactccaatatgaggacaagttccgaaataatttgaaaggcaaaaggctggatatcaacaccaacacctacacatctcaggatctcaagagtgcactggcaaaattcaaggagggggcagagatggagagttcaaaggaagacaaggcaaggcaggctgaggtaaagcggctcttccgccccattgaggaactgaagaaagactttgatgagctgaatgttgtcattgagactgacatgcagatcatggtacggctgatcaacaagttcaatagttccagctccagtttggaagagaagattgctgcgctctttgatcttgaatattatgtccatcagatggacaatgcgcaggacctgctttcctttggtggtcttcaagtggtgatcaatgggctgaacagcacagagcccctcgtgaaggagtatgctgcgtttgtgctgggcgctgccttttccagcaaccccaaggtccaggtggaggccatcgaagggggagccctgcagaagctgctggtcatcctggccacggagcagccgctcactgcaaagaagaaggtcctgtttgcactgtgctccctgctgcgccacttcccctatgcccagcggcagttcctgaagctcggggggctgcaggtcctgaggaccctggtgcaggagaagggcacggaggtgctcgccgtgcgcgtggtcacactgctctacgacctggtcacggagaagatgttcgccgaggaggaggctgagctgacccaggagatgtccccagagaagctgcagcagtatcgccaggtacacctcctgccaggcctgtgggaacagggctggtgcgagatcacggcccacctcctggcgctgcccgagcatgatgcccgtgagaaggtgctgcagacactgggcgtcctcctgaccacctgccgggaccgctaccgtcaggacccccagctcggcaggacactggccagcctgcaggctgagtaccaggtgctggccagcctggagctgcaggatggtgaggacgagggctacttccaggagctgctgggctctgtcaacagcttgctgaaggagctgagatgaggccccacaccaggactggactgggatgccgctagtgaggctgaggggtgccagcgtgggtgggcttctcaggcaggaggacatcttggcagtgctggcttggccattaaatggaaacctgaaggccatcctctttctgctgtgtgtctgtgtagactgggcacagccctgtggccggggggtcaggtgagtggttgggtgatgggctctgctgacgtgcagggctcagcccagggcatccaggaacaggctccagggcaggaacctgggcccaggagttgcaagtctctgcttcttaccaagcagcagctctgtaccttgggaagtcgcttaattgctctgagcttgtttcctcatctgtcaggagtgccattaaaggagaaaaatcacgtagaaaaaaaaaa

SEQ ID NO: 1061 - DNA, 1644 bp, Homo Sapiens
  NM_001037666
agcctcgcagcgggcggcgtggacgcggcagcgcagcggctcctttaaggctcgggcaccacccccgccgccccgcctcccgtgcggcctgggtctagttggcggcggggtcgggtccgcgcgagccgcgatggagctgcacatcctagaacaccgggtgcgggtgctgagcgtcgcccgtcccggtctctggctctacacccacccgctcatcaagctgctcttcctgccccgccgcagccggtgcaagttcttcagcctgacggagacccctgaggattacacgcttatggtggacgaggagggctttaaagagctgcccccatctgagttcctgcaagtagctgaggccacatggctggtgctgaacgtgtcgtctcacagcggtgcggcagtgcaggctgctggggtcaccaagatcgcccgttcggtcatcgcgccactggccgagcaccacgtgtctgtgctgatgctgtccacttaccagacggacttcatcctggtgcgggagcaggacctgtccgtggtgatccacacgctggcccaggagttcgacatttaccgcgaggtgggcggagagcctgtgcctgtgacgagggatgattccagcaatggctttccccgcactcagcatgggcccagccccacggtgcatcccatccagagcccacagaaccgcttctgtgtcctcacactggaccctgagacgcttccagccatcgccaccaccctcatagatgtcctcttctactcgcacagcacccccaaggaggcagcctctagcagtcctgaacccagctccatcacgttctttgccttctccctcatcgagggttatatctccattgtcatggatgctgaaacacagaaaaagttccccagtgacctcctgctgaccagctcctcgggggagctgtggaggatggtgcgcatcggtggacagcccctgggctttgatgaatgtggcatcgtggcacagattgcaggtcccctggctgccgctgacatctctgcctactacatcagcaccttcaacttcgaccacgccctggtgcccgaggacggtatcggcagcgtcatcgaggtcctccagcggcggcaggaaggcctggcttcctgaggcccatgggcaacagagcagcctccctgctctcccctcgacccaggcttccaaagacttctctaagctatttccttaagctctggaacgagccccctgttctgctggggaccctcgttccgctctctgtatgtaagctgcgtgcaggcaccggcttttacgcggacacctgtgtacactcacaggtggagtgggcaggtgctagcctgactgcgtgtctgcccatgcaggggaacacggtgctcggggcttaagcccccaacccatcactccctgcgcagcctcggcgtttgcacagtccctgcctgaggcctgagccattccccaaaggcttcctgggccagctgccccgctgacctccgttctgcctctggtggggttgccttccctggccaggtgagtcctgacagtgcctctccctcctggggcctccaaggaaagtattttgacatctctctctcttctgtttttattgacttgttaataaaggactttgtagtgaaaaaaaaaaaaaaaaaaaaaaa

SEQ ID NO: 1062 - DNA, 4748 bp, Homo Sapiens
  NM_001037872
agagccaccgcggagcgcgcgcggggttggttgccgcgagcgtgggggagcgtggaccgcggcgctgctcagcggtggggctgccttcccccggccctcctccctggtccctggcgagggcactggcggcggcggggccggggtccgcaaggccggagaaggccgccgggcccgggcatggtggtctggggcaacgcggaagaagctccaccatgaggcgaggtggatggaggaagcgagctgaaaatgatggctgggaaacatggggtgggtatatggctgccaaggtccagaaattggaggaacagtttcgatcagatgctgctatgcagaaggatgggacttcatctacaatttttagtggagttgccatctatgttaatggatacacagatccttccgctgaggaattgagaaaactaatgatgttgcatggaggtcaataccatgtatattattccagatctaaaacaacacatattattgccacaaatcttcccaatgccaaaattaaagaattaaagggggaaaaagtaattcgaccagaatggattgtggaaagcatcaaagctggacgactcctctcctacattccatatcagctgtacaccaagcagtccagtgtgcagaaaggtctcagctttaatcctgtatgcagacctgaggatcctctgccaggtccaagcaatatagccaaacagctcaacaacagggtaaatcacatcgttaagaagattgaaacggaaaatgaagtcaaagtcaatggcatgaacagttggaatgaagaagatgaaaataatgattttagttttgtggatctggagcagacctctccgggaaggaaacagaatggaattccgcatcccagagggagcactgccatttttaatggacacactcctagctctaatggtgccttaaagacacaggattgcttggtgcccatggtcaacagtgttgccagcaggctttctccagccttttcccaggaggaggataaggctgagaagagcagcactgatttcagagactgcactctgcagcagttgcagcaaagcaccagaaacacagatgctttgcggaatccacacagaactaattctttctcattatcacctttgcacagtaacactaaaatcaatggtgctcaccactccactgttcaggggccttcaagcacaaaaagcacttcttcagtatctacgtttagcaaggcagcaccttcagtgccatccaaaccttcagactgcaattttatttcaaacttctattctcattcaagactgcatcacatatcaatgtggaagtgtgaattgactgagtttgtcaataccctacaaagacaaagtaatggtatctttccaggaagggaaaagttaaaaaaaatgaaaacaggcaggtctgcacttgttgtaactgacacaggagatatgtcagtattgaattctcccagacatcagagctgtataatgcatgttgatatggattgcttctttgtatcagtgggtatacgaaatagaccagatctcaaaggaaaaccagtggctgttacaagtaacagaggcacaggaagggcacctttacgtcctggcgctaacccccagctggagtggcagtattaccagaataaaatcctgaaaggcaaagcagatataccagattcatcattgtgggagaatccagattctgcgcaagcaaatggaattgattctgttttgtcaagggctgaaattgcatcttgtagttatgaggccaggcaacttggcattaagaacggaatgttttttgggcatgctaaacaactatgtcctaatcttcaagctgttccatacgattttcatgcatataaggaagtcgcacaaacattgtatgaaacattggcaagctacactcataacattgaagctgtcagttgtgatgaagcgctggtagacattaccgaaatccttgcagagaccaaacttactcctgatgaatttgcaaatgctgttcgtatggaaatcaaagaccagacgaaatgtgctgcctctgttggaattggttctaatattctcctggctagaatggcaactagaaaagcaaaaccagatgggcagtaccacctaaaaccagaagaagtagatgattttatcagaggccagctagtgaccaatctaccaggagttggacattcaatggaatctaagttggcatctttgggaattaaaacttgtggagacttgcagtatatgaccatggcaaaactccaaaaagaatttggtcccaaaacaggtcagatgctttataggttctgccgtggcttggatgatagaccagttcgaactgaaaaggaaagaaaatctgtttcagctgagatcaactatggaataaggtttactcagccaaaagaggcagaagcttttcttctgagtctttcagaagaaattcaaagaagactagaagccactggcatgaagggtaaacgtctaactctcaaaatcatggtacgaaagcctggggctcctgtagaaactgcaaaatttggaggccatggaatttgtgataacattgccaggactgtaactcttgaccaggcaacagataatgcaaaaataattggaaaggcgatgctaaacatgtttcatacaatgaaactaaatatatcagatatgagaggggttgggattcacgtgaatcagttggttccaactaatctgaacccttccacatgtcccagtcgcccatcagttcagtcaagccactttcctagtgggtcatactctgtccgtgatgtcttccaagttcagaaagctaagaaatccaccgaagaggagcacaaagaagtatttcgggctgctgtggatctggaaatatcatctgcttctagaacttgcactttcttgccaccttttcctgcacatctgccgaccagtcctgatactaacaaggctgagtcttcagggaaatggaatggtctacatactcctgtcagtgtgcagtcgagacttaacctgagtatagaggtcccgtcaccttcccagctggatcagtctgttttagaagcacttccacctgatctccgggaacaagtagagcaagtctgtgctgtccagcaagcagagtcacatggcgacaaaaagaaagaaccagtaaatggctgtaatacaggaattttgccacaaccagttgggacagtcttgttgcaaataccagaacctcaagaatcgaacagtgacgcaggaataaatttaatagcccttccagcattttcacaggtggaccctgaggtatttgctgcccttcctgctgaacttcagagggagctgaaagcagcgtatgatcaaagacaaaggcagggcgagaacagcactcaccagcagtcagccagcgcatctgtgccaaagaatcctttacttcatctaaaggcagcagtgaaagaaaagaaaagaaacaagaagaaaaaaaccattggttcaccaaaaaggattcagagtcctttgaataacaagctgcttaacagtcctgcaaaaactctgccaggggcctgtggcagtccccagaagttaattgatgggtttctaaaacatgaaggacctcctgcagagaaacccctggaagaactctctgcttctacttcaggtgtgccaggcctttctagtttgcagtctgacccagctggctgtgtgagacctccagcacccaatctagctggagctgttgaattcaatgatgtgaagaccttgctcagagaatggataactacaatttcagatccaatggaagaagacattctccaagttgtgaaatactgtactgatctaatagaagaaaaagatttggaaaaactggatctagttataaaatacatgaaaaggctgatgcagcaatcggtggaatcggtttggaatatggcatttgactttattcttgacaatgtccaggtggttttacaacaaacttatggaagcacattaaaagttacataaatattaccagagagcctgatgctctctgatagctgtgccataagtgcttgtgaggtatttgcaaagtgcatgatagtaatgctcggagtttttataattttaaatttcttttaaagcaagtgttttgtacatttcttttcaaaaagtgccaaatttgtcagtattgcatgtaaataattgtgttaattattttactgtagcatagattctatttacaaaatgtttgtttataaagttttatggatttttacagtgaagtgtttacagttgtttaataaagaactgtatgtatattttgtacaggctcctttttgtgaatccttaaaaactcaactctaggaagcaactactgtttattatactaaaaggctgaaaaacctccaggccagactgctaagctctgaaattcctgagaggtctcagaccgggattctacttgttccaagaaagggtaaagcttctaaaccatcttattcttgtctccaagcatgaacacaggagcatgttaagaaaatctttactacttcttccatgcggagaaatctacatattttgaattagaaacaccctcacacccacttgaagatttttttcctgggaacattatgtcccgtagatcagaggtggtgttgtctttttgcttctactggccattgagaaactttgatgataaaaaagaacggtatagatttttcaaacgtatataaaatatttttatgttatatgttatgccataactttaaaataaaaatagtttaaaattctaaaaaaaaaaaaaaaaaa

SEQ ID NO: 1063 - DNA, 1796 bp, Homo Sapiens
  NM_001038618
ctactccgccgagcctacgtgacacgacgtcaagtggcaatggcggcggacgagggctgtgcccccggcccgccccgttaggagccgcgagtaaggcgagtgtccaacgccgagctggctgacagagcccggccgcggcctccgcgggcccaggggcctccaggccccgtgaccaccggaccgagcaccctggaacggccccagcttggcctcgggacagtccgcgcgctcaccgactccctggtgaacgccgcttggccgccgccgccgccgcaggacccacgagaagcggaaaccggcgcaaggacccggtccccccggcgccgaatgtagtaagaaaacaaaaactgatgaccaagagaatgtgtcagccgatgcaccgagtccagcccaggaaaatggagagaagggagaattccacaagttggctgatgccaagatatttttgagcgactgcctggcatgtgacagctgtatgactgcagaggaaggagtccaactttcccagcaaaatgccaaggacttcttccgcgttctgaaccttaacaagaaatgtgatacctcaaagcacaaagtgctggtagtgtctgtgtgtcctcaatctttgccttattttgctgctaaattcaacctcagtgtaactgatgcatccagaagactctgtggtttcctcaaaagtcttggggtgcactatgtatttgatacgacgatagctgcggattttagtatcctggagagtcaaaaagaattcgtgcgtcgctatcgccagcacagtgaggaggaacgcaccctgcccatgctgacctctgcctgtcctggctgggtccgatacgccgagcgggtgctgggtcgccccatcactgcccacctctgcaccgccaagtccccccagcaggtcatgggctctttggtgaaggattatttcgccagacagcagaacctgtctccagagaagattttccacgtcattgtggccccttgttatgacaagaagctggaggctcttcaggaaagccttccccctgctttgcatggctcccggggcgctgactgcgtgttaacatcaggtgaaattgctcaaataatggagcaaggtgacctctcagtgagagatgctgccgtcgacactctgtttggagacttgaaggaggacaaagtgacgcgtcatgatggagccagctcagacgggcacctggcacacatcttcagacatgcggccaaggagctgttcaacgaggatgtggaggaggtcacttaccgagccctgagaaacaaagacttccaagaggtcacccttgagaagaacggagaggtggtgttacgctttgctgcagcctatggctttcgaaacatccagaacatgatcctgaagcttaagaagggcaagttcccattccactttgtggaggtcctcgcctgtgctggaggatgcttaaatggcagaggccaagcccagactccagacggacatgcggataaggccctgctgcggcagatggaaggcatttacgctgacatccctgtgcggcgtccggagtccagtgcacacgtgcaggagctgtaccaggagtggctggaggggatcaactcccccaaggcccgagaggtgctgcataccacgtaccagagccaggagcgtggcacacacagcctggacatcaagtggtgaagtcaggccagggccttccagctgctcttggggccagagccaagagcctctcagtagagggaggggctgccctgagtggagtattaaagacacttaagaaaaccgctcaaaaaaaaaaaaaaaaaaa

SEQ ID NO: 1064 - DNA, 2558 bp, Homo Sapiens
  NM_001039091
tcctccccctccgctcctccccttccctacatctagccgccgcgctttcccgctcccgcagcagcagcctcccgcgtcgctgtcgctgttgcctccgccacctcctccgccgccgcgcgcccctcggagttccgcgccccaccatgcccaacatcgtgctgttcagcggcagctcgcatcaggacctgtcccagcgcgtggccgaccgcctgggcctggagctgggcaaggtggtcacgaagaagttcagcaaccaggagaccagcgtggagattggtgaaagcgtgagaggggaagatgtctacatcatccagagcggctgcggggaaattaacgacaacctgatggaactcctcatcatgatcaatgcctgcaagattgcgtcatcatccagagtaactgccgtgatcccgtgtttcccatacgcccgacaagataaaaaggacaaggtaggagagagtcgtgccccaatttctgcaaaacttgtggccaatatgctgtcggtggctggggcggatcacatcatcaccatggacctgcatgcttctcagatacagggattctttgatattcctgtggataatttgtatgcggagcccgcagtcctgcagtggattcgggaaaacattgccgagtggaagaactgtatcattgtttcacctgacgcagggggagccaaaagggttacatcaattgcagacaggttgaatgtggaatttgctttgatccacaaagagaggaagaaggcgaatgaagtggaccggatggtcctggtgggcgacgtgaaggaccgtgtggccatcctcgtggatgacatggctgacacttgcggcaccatctgccatgctgcggacaagctgctgtcagctggagccaccaaagtgtatgctatccttacccatgggatcttctctggaccagctatttccagaataaataatgccgcctttgaggctgttgtcgtcacaaacacaattccgcaagaggacaaaatgaaacactgcaccaagattcaggtcattgacatttccatgatcttggccgaagcaatccgaaggacacacaatggggaatccgtgtcctacctgttcagccatgtcccgctataaatccagaatgggaagtgtccagcaagcctactctgacttctgacttgtttttgttttctggatttttagctgtaggtattcagcaatgataggttaatcactggcaaaagcatcagatctttgtatatgctaagatttattgtttccccttctaaagctcaagatcatttctttccagtttttggggaaatggtggtggttatttggtctttaagtgaactgtcttaaatgagaaacgtttttgtcattttgacttttaacaggtacaggtgatctcttcctttgttctttcagtactttgaggcgacaactttcaagtatataatttcattgtggaagtcatagtttatatatttcgaggttgccaaaggtgacttcagattaaagccttctgtgtaaatatatactgataatgcctatggacatttgggtaaaaccctgtatagaattaattatccttttactttggagtgaaccttggaaaatttataattataataccatggattttgaattttccttttttttttttttttggataactcagtttcagataaaccatcttggttactgtgcttaatttggaccaaattttatttagcttaatatggacactgacacattttggggggtatacattagacatatcagagcagtgtatttctggatcattttttaaatgacctcttctaaaacataactgtcacttacctgaaatgctgcatcctaaaattccaaaattatattgagcaatcgccaaggcctaaagccaactgacttaaaggtaatcatttcagctaagattaaatttaaagcctaagaatgtatagagctagttttaaaataatgatctcagatttttaaaaaggatataggaacctgcattgtcattctctgaattaagaactgatggtttctatcattatttagccccacctttgtattttaaaatccttcagaatacatttatgaaccaatgcgactggacttagccacacacaatggaaattcagaccttgactatttggtgtttccagttcacaaaggtgatgaagactgtcttgggagcagcttaatcccaaaatttgtacatttcttgctgctcctggcgtggaaacttaagtgagaccaccaaatacattggtcctgtccaattctactgaatgggggtggacctggcatttatctggccaaaaacaggagccagagaaatatgaatataccaaagttgtttgtttagcctccaacttaaattacattagtcaacttatagatactcatatgatcacttttctttttagatactacatcaactagattcaggagtatatcatttgcagtgcttgtattggtttaaaatgtaagattttaagatcctctaacactgtactaaaacatttcaataaaatcattctgactgcgttcatagttaaaaaaaaaaaaaaaaaa

SEQ ID NO: 1065 - DNA, 1376 bp, Homo Sapiens
  NM_001039140
aatgggcggaggcgggggcgtgccgacgggagggcggccgcggcgcggggctcccttcctcgtgctcggcgttgagctcctgcagccgccgccgctgcagtggtcgtccctgccctccccggccccggggtgcaccccgcaaggctcccgctggtgtccctggagcatgggaggctgctgagcgtgagtggcggtgtctggcaggagctgcgtggcagggagggcgtccatggctgcagccaacaagggtaagtgccttcctggcgtggtaggacttgcacaagctcttccggtgggccctggtaggagggccattgctgcaggcaacaagcccagagtccggagtatccgctttgcggcaggccacgatgcagaaggatcccacagccacgtccactttgatgagaagctgcatgactcggtggtcatggtcacccaggagagtgacagcagctttctggtcaaggttggcttcctgaagatcctgcacaggtatgagattaccttcactctgcccccagtgcacaggctgagcaaggatgtccgcgaggcacctgtccccagcctgcacctcaagctcctcagcgtggtgcccgtccctgaaggttatagtgtcaagtgtgagtactcggcgcacaaagagggcgtcctcaaagaggagatactgctagcctgcgaaggtggcactggcacctgtgtgcgcgtgacggtgcaggcccgcgtcatggaccggcaccacggcacgcccatgctgctggatggtgtcaagtgtgtgggcgccgagctggaatacgactcagagcacagcgactggcacggctttgactgaggcccgaggccccgcctgccccgggcccctcagccttaaaccccgccttgtccccccgacatgctgcgtgatggtgtggcttcctcgcccctctctggggtgggtgtgggggtggagtggccttgcccacgcctctcacctctgccttcatttgtgctgccaccctgcccctccctcgtcctcctctcccacttcctcctctctgtgtgcctcagtctcctgccggaagaaatgggttgagcccgaaaggaggctgtctgaggaagggagagggagggcctggggtgggtcccccactccccaccccaagccacagggactcccaccagggtctgggagaggacggagctggctctgtggcgtcgtggccccattactgctgccttgcttcagccacctctcctgcccctccctagtccccactgctgtccaccatgagtaggagggaggtgcagtccccagcccccacccctcaggtctgtgttacttggtttttaagcgactggttgggatagaaccctaaagaaataaacttccagtggatacc

SEQ ID NO: 1066 - DNA, 2934 bp, Homo Sapiens
  NM_001039210
acggatttccgcctccctcacagaaggcagtcactgcaacgtgcgtggcctcagttgcgtcatatccggcccttgcgatcagggcttgaggaacccgcgccatgaagtgcgtgtttgttaccgtagggaccaccagctttgacgacctcattgcgtgtgtgtcggcgcccgacagtctgcaaaaaatcgagagccttggttacaaccgacttatcctgcaaattggtagaggaacggtggtacctgaacccttcagtactgagtcgtttactctggatgtttacaggtgcaggaagctgtttggagactctggaaaaaggaaagccactcgtagtggttataaacgaaaagttgatgaacaatcatcagctggaactggcaaagcagctacacaaagagggtcatctcttctattgtacctgcagcacgcttcctgggctgttacagtcaatggacttatcaacactgaaatgttatcctcctggccagccagaaaaattttctgcatttttggataaagttgttggattacaaaaataaacactaaactctcaacactttaaaagcaacccccaaattcaacctatgtaatgtgattaaatcaaattaaatacataatatatatttacaaaataatataattaataaacttcctacatctatagaatgtataggaaattttatgttgtgcacatttgcattgggtccaaatcctaattgcagtttagtgaaattactagatttttttctaatcttcagtatgtagtgagcattcacaggttttctcctagaatctcaagtggaattggaatcataaaaatgaatgagatttgaaaactttcacaaagattataaatgtagttagtttgatactccttagaataaaaaaatgaaacagtaacaacttttatgtaaaaaaattttacataagagttagcatctttagctttataatctaaggaaccaaatttaaaaaatgatggattatgctctgtgaaatgaaaagttcaatcattgcctaaaaaagatgatcaagttagttgatctcttgtacttggaaaagctacttttttcctaaagaacagagtggagtggatatattcactttttttttctaaaacatacaaagtgataaaataatcgtgcctaatgtcaaaactttactggtttgagaagaataatcaaaaaggacttataccaataggacttactattgttttttaaggatctcctctcacagtggtaatgaaacattaactgtaacagaaatttacaatttatgtgcttataaaattagttttatgaatgaacaataaactgatgcatataatggcttaaatatatggttttaaaattgacttaacttgagcaagatacattatgaagttctttctgattagagtgtgtggtctcaagacctttacagtagattatccttaagtgtccatagctctctggtacaatgtttagatatagtttatctatcaaaatagaacattcactataaagacctctcttccattccaatcatattatcccaacatgctaaatgttccaaacattttatttggaatgcattttatcatgtttttataggtttatttttctgattgtgttttatttaggctaatattaaaaaaatgcttactagtggtagaaggtggtgacaaagaaatactctgggtagcaggaggaagccaacttggattaaaattttgctgagaataatctaaaaagtgagtaatctggttgagaattcacagcaccataatcataattgtatatcaatgttatgttttaggaaaggtcctattcaaatccagggagagaatctttagtgttttctgggccctcataaatacgtttttctcatttgagaaaattgtgactttatgttggtcacttagtttttatagtttatgatgaagaattaaagagaaacaaatgaaaggcaaggtctactcaaatatcagacaactaaaaggctatacagcccctaaatcctttgctatctacttccccagaataatgcataacctaaattccattatttcatttagcagaggtttaagccgttgttgtcaattgtgtgcagtaacgcctctgacttcccttttgtggaattttgtatcgattttggatttttaagtcaaaggagactttaaaatcattttgatttggcacggattcttgagattatctagtccaattccatcatattcagattttaccatttgcttaaagtatagcttttggcagaactgcccctaggagcagctccttgattcccagtcccctgctctttctaccctgcataatatatgttgtaagctttttgtttctttatagttgtttgcctagtgttcattttagttactcgaattccttgcaaggtaggttttgtttgtttatttatggaagttatttagtaggaatttcacacttaactgggttttcctttggcgtatgacaaccttacctaggacttagaaatctgtgatttctgagtttttggaatttaggaaaatgctctgggtaggattgatagtagattgaataaattaagactttaagacagaattgtagacttttggagttgggagataatttaaagaatattttaaaccaccagttttacagatgaggaaacatgctaaattaatcaccacatttacatcttattagtccttattaaagaatggtaaccaaaagtctgtttgaaatgtttgctctatttgtttggtttcattacatgacagagctgcaggttcttgatattaatgagtaagtggaatgcagtttatttagcagtgttctattagaggtactgaaattttcagggataaggaaatgaaagagagtttagcattgggaaatttgcaccatggatagattaagaggtagacagttaatagaacatttacgggttggagt

SEQ ID NO: 1067 - DNA, 1316 bp, Homo Sapiens
  NM_001039367
ctcttcccattggctgagaagggtcatgaggatgaactgtgcagtcacctggcaggaaccggaacccgcggttataaagtaaaggaacccgagatctgcgcaggggttccctttgccgatttctctcacctcacctttcaaacctaaactcgagcctactgttcaccggcctagcattgctctcgccatggctctcagcgatgctgacgtgcaaaagcagataaagcatatgatggctttcattgaacaagaagccaatgagaaagcagaagaaatagatgcaaaggcagaagaagagttcaacatagagaaaggtcggcttgtgcaaacccaaagactaaagattatggaatattatgagaagaaagagaaacagattgagcagcagaagaaaattcagatgtccaatttgatgaatcaagcgagactcaaagtcctcagagcaagagatgaccttatcacaggtttgtaccagttgctggagccccgaatgattgttcgttgcaggaaacaagatttccctctggtaaaggctgcagtgcagaaggcaattcctatgtacaaaattgccaccaaaaacgatgttgatgtccaaattgaccaggagtcctacctgcctgaagacatagctggtggagttgagatctataatggagatcgtaaaataaaggtttccaacaccctggaaagccggctggatctcatagcccagcagatgatgccagaagtccggggagccttgtttggtgcaaatgccaacaggaagtttttggactaagccttcaggaggtggagctcgtcgtcagctctcctgctgtgatgtggaagcttctgatatttgaagaaacacgaatgtctctgtagcttcctcttcactgccccagtattgctctgtatttatcagcgatgcccctctgtcactcatgccttgcctaattgttcacaatggtggaaagcttcatgtaatatgatcaggacccacctccagttcttctgaaagtgtgacagtgtccagccggttctgcagcactaggggagggggcagatggtggttgcatgggcttcctgggtctccactctccgtctggcctaaaggtgatgtatttggtgtttggccctgcagtccccactcttgaggcttaaggcgcatgtggcacaccactccttccagcagtagtcgctttactgttacctgtttaggcctagaagttttccctcatctgtaaatgtgatttaaaatctaagccatgaatatgctttatttattaaaagagttatgcggatttaatgtgatttctagtgtaaggcactacaaa

SEQ ID NO: 1068 - DNA, 1483 bp, Homo Sapiens
  NM_001039473
tgcggtccctccccctcacgttctctcttcctctgctccgccatgatgagaagcgcctgcttccccttccccttccgccatgattgtgtttcctgagacctcccagccacgcttcctgtacagcctgcagaactacgctgtcagagatggattggggacaatcctgcggggaggtgctgaggagggcagctacgacaactggccccacaccaggaaaagctgggggccgctgagcccaggccaccaacgggagctgtggacccagcctgacccctggaccgaggtgctttcagggcacaagggggatgcgggagcctgtggctgctgttgcttctgctctcagttcataaacgcacgctgtgcacatcccctgtgcttggcaaggggcctggatagaagggccagtgaggagatgcccatcctccaggcactgtgcctcctcccaaaggaaaatctccatgatgccagcaggcgtgtccacagaggaaggggcgaagaaaatgtcgaatggacaggcgacctgcatcctgcccagctcggaagaggaggacgtcctgagatttgccacagcctggaggcgattgcgctcgtgacaaaagccagacacagaaagacaaataccacgttctaatttgtgcatgggagctaaaatagttgagttcatagaggcagagggtggggaagggctgggcaggggggaactggggagaggttggtcgaatggcaccaaggctcacttgggaggtgacaagcttgggacagcagggtggccgtggtgaaggagaacgtgttgggtacatggatttgctgtgacctgacctcaagtgctcttgccacagaacccaggtgctccctgctggaaagccacacgcggcagaggagagctggcaggaggaaaagcgggttcgagtcagcagcctttggagacggcagactgagagtgtcacagagaccatctcaagtctgcacgaattccaggctcttttatgttaagggcagggggacggggagggggttgggatcaagaggtgacaggtgaccgcacacatgtgggtgccagcgagggtccgaggaggctggcgatgccttcgtccttggtcaggtcacgagcacctgtgaatccacagcagaacagctgttcacagcttcccctttcatcccggagtgagtttcaaaacctgcatcacgactgcctctgtgtattttctccgtcctctagaagatcctaggctccgtgcaggaatgggtgaaggccccttacacaaaaacaaagtcaggtcctgagttcttttgctgtttctttgctttctcctgcaaagtcactcgaaaggtgactggcggaggtgaggctgcgctaattagcttgattgtggtgacccttccacaaagcacgtgtatgtcggcatattcactgggtcatgcacctcgaatacatatttttacttgtcaaatacatgataataaaaaaaaaaaaaaaaaaaaa

SEQ ID NO: 1069 - DNA, 910 bp, Homo Sapiens
  NM_001039481
ccagcgtcaggccagccccggcatgctctgcggccgcccgcggtccagctccgacaacaggaattttctccgagagcgggccgggctcagttcagctgctgtccagacccggatcggcaacagtgccgcctccagacgttctcctgccgctcgcccgcccgtcccagcgcccccagccctcccgcgagggcgccccgggacggaaggatccaccagtctgtcggcgcccgccgttctcgtggtcgccgtcgccgtcgtcgtggtggtagtctccgccgtcgcctgggccatggccaattacatccacgtccctcccggctccccggaggtgcccaagctgaacgtcaccgttcaggatcaggaggagcatcgctgccgggagggggccctgagcctcctgcaacacctgcggcctcactgggacccccaggaggtgaccctgcagctcttcacagatggaatcacaaataaacttattggctgttacgtgggaaacaccatggaggatgtagtcctggtgagaatttatggcaataagactgagttattagtcgatcgagatgaggaagtaaagagttttcgagtgttgcaggctcatgggtgtgcaccacaactctactgtaccttcaataatggactatgctatgaatttatacaaggagaagcactggatccaaagcatgtctgcaacccagccattttcagtttatcatcgttgactctttgcaaaggaaaaactacaagatgttttggattaaccggctgcagagggtcaaggcttctgcttagttttttctagttagtgtttgagttgaagtgttatacatttcttactgccgattgcttattacttaattgttcatgttttcagagttcttgcctattaaaattttattaatttggttaacaa

SEQ ID NO: 1070 - DNA, 2028 bp, Homo Sapiens
  NM_001039503
atgaagtggtgctggggcccagtgctgctcatcgcgggtgccacagtcctcatggagggtcttcaagccgctcagcgtgcctgtggacagcgtggccccggcccccccaagcctcaggagggcaacacagtccctggcgagtggccctggcaggccagtgtgaggaggcaaggagcccacatctgcagcggctccctggtggcagacacctgggtcctcactgctgcccactgctttgaaaaggcagcagcaacagaactgaattcctggtcagtggtcctgggttctctgcagcgtgagggactcagccctggggccgaagaggtgggggtggctgccctgcagttgcccagggcctataaccactacagccagggctcagacctggccctgctgcagctcgcccaccccacgacccacacacccctctgcctgccccagcccgcccatcgcttcccctttggagcctcctgctgggccactggctgggatcaggacaccagtgatgctcctgggaccctacgcaatctgcgcctgcgtctcatcagtcgccccacatgtaactgtatctacaaccagctgcaccagcgacacctgtccaacccggcccggcctgggatgctatgtgggggcccccagcctggggtgcagggcccctgtcagggagattccgggggccctgtgctgtgcctcgagcctgacggacactgggttcaggctggcatcatcagctttgcatcaagctgtgcccaggaggacgctcctgtgctgctgaccaacacagctgctcacagttcctggctgcaggctcgagttcagggggcagctttcctggcccagagcccagagaccccggagatgagtgatgaggacagctgtgtagcctgtggatccttgaggacagcaggtccccaggcaggagcaccctccccatggccctgggaggccaggctgatgcaccagggacagctggcctgtggcggagccctggtgtcagaggaggcggtgctaactgctgcccactgcttcattgggcgccaggccccagaggaatggagcgtagggctggggaccagaccggaggagtggggcctgaagcagctcatcctgcatggagcctacacccaccctgaggggggctacgacatggccctcctgctgctggcccagcctgtgacactgggagccagcctgcggcccctctgcctgccctatcctgaccaccacctgcctgatggggagcgtggctgggttctgggacgggcccgcccaggagcaggcatcagctccctccagacagtgcccgtgaccctcctggggcctagggcctgcagccggctgcatgcagctcctgggggtgatggcagccctattctgccggggatggtgtgtaccagtgctgtgggtgagctgcccagctgtgagggcctgtctggggcaccactggtgcatgaggtgaggggcacatggttcctggccgggctgcacagcttcggagatgcttgccaaggccccgccaggccggcggtcttcaccgcgctccctgcctatgaggactgggtcagcagtttggactggcaggtctacttcgccgaggaaccagagcccgaggctgagcctggaagctgcctggccaacataagccaaccaaccagctgctgacaggggacctggccattctcaggacaagagaatgcaggcaggcaaatggcattactgcccctgtcctccccaccctgtcatgtgtgattccaggcaccagggcaggcccagaagcccagcagctgtgggaaggaacctgcctggggccacaggtgcccactccccaccctgcaggacaggggtgtctgtggacactcccacacccaactctgctaccaagcaggcgtctcagctttcctcctcctttaccctttcagatacaatcacgccagccacgttgttttgaaaatttctttttttggggggcagcagttttcctttttttaaacttaaataaattgttacaaaatagactttagaaaataa

SEQ ID NO: 1071 - DNA, 1387 bp, Homo Sapiens
  NM_001039508
agagcagggcctgacatctccccagaacagacgtttgaacagagcaggcttctgaggtctccaaaatgcctgtcccagcctcctggccccatcctcctggtcctttcctgcttctgactctactgctgggacttacagaagtggcaggtgaggaggagctacagatgattcagcctgagaagctcctgttggtcacagttggaaagacagccactctgcactgcactgtgacctccctgcttcccgtgggacccgtcctgtggttcagaggagttggaccaggccgggaattaatctacaatcaaaaagaaggccacttccccagggtaacaacagtttcagacctcacaaagagaaacaacatggacttttccatccgcatcagtagcatcaccccagcagatgtcggcacatactactgtgtgaagtttcgaaaagggagccctgagaacgtggagtttaagtctggaccaggcactgagatggctttgggtgccaaaccctctgcccccgtggtattgggccctgcggcgaggaccacacctgagcatacagtgagtttcacctgtgagtcccatggcttctctcccagagacatcaccctgaaatggttcaaaaatgggaatgagctctcagacttccagaccaacgtggaccccacaggacagagtgtggcctacagcatccgcagcacagccagggtggtactggacccctgggacgttcgctctcaggtcatctgcgaggtggcccatgtcaccttgcagggggaccctcttcgtgggactgccaacttgtctgaggccatccgaggcccggcatcatcccttactgcgctgctcctcatagctgtcctcctgggccccatctacgtcccctggaagcagaagacctgactctccttccttcctcccctgccacgtgggaccctcatctctgctgcctccttcctttcctgagaggctcagcttgagagaatgagccagtgagaagcttctctagacttggctccaaacatctcccctcccaagacatctgcctgcccacaggctcctgttgctccttcacacagacctggatgccccagagcaaggtcttcattcatggtcctgagcaggtgccatgggattgggctctgggcactgacttaacggcacctccctagaaggcgagaaacatgccaaatctaaacacaccaggactcccatccatcgccttgagactgaccgtaaaccacagacgctctccaggttctcaagagttatcctgccttccagattcctgcctatcccaactccccagccttgttgaggttctctattgcctcttgaatacaaatgcactcccaaagtggttttaagaaaataaaaagattatccttccaaaa

SEQ ID NO: 1072 - DNA, 9855 bp, Homo Sapiens
  NM_001039547
ggtggagccggcggcaggggccaggcctctctaggctctccggctgagccgggttggggcccgggttgggccgcccggggactctggagcattgggatttgtagcgcgccctctgggtaggcggctgtagcggagaggcgtgcgggatcgggatgtcggggctgctcacggacccggagcagagagcgcaggagccgcggtaccccggcttcgtgctggggctggatgtgggcagttctgtgatccgctgccacgtctatgaccgggcggcgcgggtctgcggctccagcgtgcagaaggtagaaaatctttatcctcaaattggctgggtagaaattgatcctgatgttctttggattcaatttgttgccgtaataaaagaagcagtcaaagctgcaggaatacagatgaatcaaattgttggtcttggcatttcaacacagagagcaacttttattacgtggaacaagaaaacaggaaatcattttcacaactttataagttggcaagacttaagagctgttgaacttgtaaaatcttggaataattctcttcttatgaagatatttcacagttcttgccgagtgcttcactttttcactagaagtaaacgactttttacagccagtttgttcactttcacaacccagcagacttctttgagattggtctggattttacagaacttgactgaggtgcaaaaggcagttgaagaagaaaattgctgctttgggactattgatacctggttgttatataagctcacaaaaggttctgtatatgccacagatttttcaaatgctagtacaactggactttttgacccatataagatgtgttggagtgggatgattacctctctaatttcgataccactttctctcctacctcctgtgagggacacaagccacaattttggatcagtggatgaagagatatttggtgtgcctataccaatagttgccttggttgctgaccagcaatcagccatgtttggagagtgctgcttccagacaggtgatgtgaaattaaccatgggaactgggacatttttggatattaacactggaaatagccttcaacagactactggaggcttttatccattaattgggtggaagattgggcaagaagtcgtatgcttagctgaaagcaatgcaggagacactggtactgccataaaatgggctcagcagttagaccttttcacagatgctgctgagactgaaaaaatggccaaaagtttggaggattctgaaggagtttgttttgttccatcttttagtggattacaggctccattaaatgacccctgggcatgtgcctcttttatgggtttgaagccttctaccagtaaataccatcttgtacgagcaatattggagtcaatagctttcagaaacaaacagttatatgagatgatgaagaaagagattcatattcctgtaagaaaaatccgggcagatggaggagtttgtaagaatggttttgtcatgcagatgacttcagacctgattaatgagaatatagacagacctgccgacattgacatgtcatgcctgggtgcagcttctctagctggccttgctgttgggttttggactgacaaggaggaactaaagaaactgagacaaagtgaagtggttttcaagccacagaagaaatgtcaagaatatgaaatgagtctggaaaactgggccaaagcagtgaaacgctccatgaattggtataacaagacataacactaaatgaaatgatcaaaaccataggtagctggtttatgtgacgtgcagatgagatgaagctcagggataacccatatgacaatgactaagaggagaaaattttaaataagcttcataacttaagaagcattgcttttaaaaaaacaaaacggaacaaaaaactcttatttttttcccctaaaccatggtaaggcagcaatacctcaaaactttatatcttctattttgtagcaaattccaaaggacattagtcatttccaaccacattttgacagttatgggtcctcttcctttttatactgggtcagtggtacataggaacataatgatttaccatccaagctaatagttctgggtcaagtaccatgcacatattgttccaaaattatgtgaaacgtatttctttaattctttaagtgggctatttgaagtacatatagctaaaaagaaagaataactgagaaaatgtggaattttgaaacattaatattttatgtttaaagccataatttcctaatattatatccaaatatgagcttaatatgtccctctcagataagcttatgagatagttaatgctttcctttactggtcttaaagacactgccttaatttttccttgttcaaccaaaatctgagcattctttctatgttgaaaacactgaaaaactaattttagttaatgaactagaaagaatattgatttttaagaaacagaaaaatactacttattttccttctcaaataacgtttctttcaaaaacttctggctgaagtataacatgctggtagttaacataaatcttgtctttctcttgttctttatctttctttgttatttagatgcttgtataaatgtcttttgtttttattaagtgcctaattgacagagcttaatttgaagaagtgccctaatttattgaccacttaagaattgcctttattggggtattttatttgttcctgcgtctttttgatgtttgttcagtctactcatccctgtgagtatgtgtgggggacagctgatagaagggaggagagtgtgtctatgctcaggattgccctttagccactcagccagagatccacagggagcaacaaggacagtttcacatgcttagactttcttggaagaaacagtgaggaggagtaagtcgtgagtagtgtcaagctggatgtagaattgtcctaaggcagttgaccccaccttccaacatgttttcactttatttgcccctccctacatttgggttaggttccatttggatttgcagcaataatgactttatttctctcttggtcaggatttggcacataaaatccttttattatagaactagctattttagttacatagtaatgtaactaatggagagatttatagagaattttgtttttgctgtcatatatgtccattttggagacagatatgatagaactagaaattaagttgcatttctgcaagtgccatttgaatgaacttcaagtatcttcttaattattaaattttctgatgaaggcattgtaacaaatatatagtattattaaatctaattaatatttggaaatattaataaataggtattttatttactgtaaaaagtcaaacttcattatgtagataaatcttattcttttcattctttcccctgtttacatcctttttacaaagcttagtcaccaattaaagctttcctatcaaaatcacatggaagctgctctgttgttttactgttacacattctgtttctcagtgggtgtaatttttttttctttttctttttttgtagagacagggtcttgctgtgttgcccagggtagtctttaattcctggcctcaagtgatcctcccaccttggcctcccaaagtgctgggattgcagccgtgaaccactgcacccagccaatgggtgtaatttcataggaaataattctttttgtcagaatgtactgaattgtaatattaatacctgaaaatttgttagttcacttcttttccacgttcttctttcccaacatataaccacaaaataaaggataaatactttgggctgtgtgcagtggctcatgcctgtaatcccagcactttggcaggctgaagtgggcggatcatttgaggtcaggagtccaacctggtcaaacacggtgaaaccctgtctccactaaaaatacaaaaattagctggatgtggtggtgcaagcctgtaatcccagctactcgggaggctgaggcaggagaattgcttgaatctggggggtggaagttgcagtgagccaagatcatgccactgcactgtagcctgggcaacagagcgacactgcgtctcaaaaaaaaaaaaaaaggatcaatacttttcagataatgttggaaagtaactttgaatgtccctcatcggaattgagcatctcctcaagtgtcagtggctatttttttcttctgtgaatctaaaaactaatattttatttttaatatttgtggccatttttagtgataagactttaataaatatttttggacttaactaaaatcagaaacatgaccacatttgcttttgtggttgcagaaacagttgataagatcaattgagcaacaaaattgtcctttcttttttttttttttttttgagacattgtcatgctctgttgcccaggctggagtgcagtggcatgatctcggctcactgcaacctccctctcctgggctcaagcagtcctcctgcctcagcctcccaagtagctgggatttcaggtatacgtcactacgcccagctgatttttgtatttttagtagagacagggttttaccatgttggccaggctggtctcaaactcctgaccttgtgacccacccacctcggcctcccaaagtgctaggattacaggcgtgagccaccatgcctggcttgtcctttctgtcttccaagtttgtttttcatttgtatgctaatatttgaagtttagaaaaatttgtgctacttctcagcatgttttattttcccattatagatctatcagatatttttagaaggtctgcaactgtctgataaaggaagagaatgttcctgttcaatctatcttaaagtgctactaattgcttttatactatagacatactgattttttcatcttttttatccaaccatggcatggtttcctaatctcagcattgacattttggactggataaatctttattttgggatgctatgctgtactttataggatgtttagcaatatccctgacctctgccctctagctacaagtaccatccccctagttgttatggccaaaaatgtcttcaaacattgccattctgagaggcaaaattgcccccagttgagagccactgatacaggctgttagaagaaaatcgaagactcagtgaatatagtgtcatactccttttctttctgcctcattttaccttaggaaatggttgttagcaaaaaaattagttaatcgtatcttgaaataaatagggtatctattttgctgattaataaagaaaaaataaatctcagctgggcacagtggctcacacctgtaatcctagcactttgggaggccaaggcaggcggatcacttcagctcaggagtttgagaccagcctgggcaacctggcgaatccctatctctacaaaaaatacacaaattagctgggtgtggtgacacacacatatagtcccagctaattagggggctgaggtgggaagatcacttgagctccaggaggtggaggctgcagtgagccaagttggtgtcactgtactctagcctgggtggcaaagtgagaccctgtctcaatcaatcaatcaatcaatcaatcaatatctcatgctgtaattgtcttctgatgttttcatccacccagccccacctctgcagccttaattactggagtaggtccatgatttcagtgtagggttaatgtattctgcagatcatctttgatttgacctgcttttttgcttcctttttatctctgaacaaaggagatcatcattctctttaatctgccttctgtgtaaatctctaccagactggaagctccctgaaagcagaaactgtctgcttccccagaacttagcactgtgctttcatgtatgtgggataaatttttactttgttagtgcaactttgtttgtacacgttatccttgatattacatacatttgttgatgggggcaatttatatttgttgtgagtaaaatacttttttgttggattaagaagaactatactcttcccagcactttgggaggccaaggaggacggattacctgaggttagtagcttgagaccagcctgaccaacatggagaaaccccatctctattaaaactacaaaaaaattagctgtgcgttgtggcacatgcctgtaatcccagctagtcaggaggctgaggcaggagaaccgcttgaacccctgaggcagaggttgcggttgagccgagatcgcgccattgcactccagcctgggcaacaagagttaaactccatttcaaaaaaacaaaaacaaaaacaaaaacaaaaaaacaaaagaagaactactctgtagtgagagctagaatcctcatgttgtttatttaaaatttttggccaagtacagtggctcatgcctgtaatcccagcactttgggaggctgaggccagaggatcacttgaagccaggagttcagttacagcttgggcagcaaagtgagaccttgtctctacaaaaaaattttttttaaattagccaggtgtggtggtatgcccctgtagtcccagctactcaggaaaccgaagcaggagaatcgcttgaacacaggagtttgagggtgctatgagctatgattgtgccactgcactccagcctgggcaacagggcaaggccctgtcttaataaaataaaataaaattcttaatatgtttatatatttgaaaaactatttgtgtagagacacatgtctgtaaatacacatagatatattaactttttaagctttaattgaagcctttctcttcacaggttttatatatttgactgcagatgactaacagattgaattttaagagtgcgaaacactctggtgctatagggaaggaacttcataaatagcccctcctgtaagggaccagtctttaatttaaaacagtccagcccaggaatcttgcaagaattttgtaattatttgaggagagatgtagatataccctggagttctttgactttaagttattctagagtcatcccagagatggcctagaagacttgaatgtaccccaaaggattctgaatccctttgggaaatttagactatgattttcagtaagaattaaaagccccaggataagcgtggtggttcacacctgtaatcccagcaatttgtgaggccaaggcgggaggatcgcttgagctcaggagttcgagaccagcctaggcaacatagtgagaccccacccatctcaatttaaaaaaagagagaaaaaggccaggtgtagtggctcacgcctgtaatcccagcactttgggaggccaaggcgggtggatcacctgaggtcaggagttcaagaccagcctgatcaatatggtgaaaccccatctctactaaaaatacaaaaattagccagtcctgatggcatgtgcctgtggtcccagcgacttgggaggctgagacaggagaattgcttgaacccgggacgtggaggttgcagtgagccgagattgggccactgcattccagcctgggtgagagagcgagactctgtctcaaaaaaaaaaaagagagagagagagagagagagagaaagccccaaacataccttgggcctttacaacctacttggtcccagaatcgtcttattgtaaacccaaagccaggtcttctggttcgaaccagtcaaaatgggtaatctaaaaaagttaaatagatgattcaaaatcgtgttggtggttttttctttttaaatcccctttccaagtaaaaggaatcttttttttttttttaagttttgaagcctcatagccataaatattttggcaccagcatctattggcacctaagtcattggctgtatcatattcccatgggacccttgttcctagaggaatgcaggaatgatcttggagtgggaaggacagaaacaggtgcttgcaaaatcagatatttctgaaattctctgttattctatttctactgtctttccccactttactataaatttgatctgttataaaatggctgtgtttagatagatacccgtgatgtttaggaaacaaatgatatagagactcccatttaaatgaatcttatctttataagaaacagccaaactgttttccagactggctataccatcttacattcccaccaggaatgtatgagtgatccagtttctctgcatgctcgccagcatttggtgttgtcactatttcttatttcaaccattctgtttatccttttcagtgaaatatctgttcatatcttttgcccatttgccaattgaggcaggaggatcacttgagcccaggagttcgaggctgcagtgagatatgatcactaaatgtttgcttaatgagccatatctttaaatatcttttttaaagtttttaaaagtcagtccagtggtttatgtgattatgtgggattttttaaatctttccaggcaaaatgtgtatagcattttgaacatatttacactgtactgagcccaagagttctcatattctttctttgctcattatagagtatggtactaatactgtataatagtaaattttcaaagatacctttatttagaatgttagagtatacagatatatactttgtacatagttatcataatgtttctaacctttttatttaaagcaggctgatttgtgtaaaggtttcagaatgattttgttaataagttattagaaactttcctatttgtacaagatggtaaatgtagattccaatttgtatgcctcagtaaattcataatcttatttctctgatgtgagccactgtgcctggccttctgtgatgctcttaatgaattttgcagttttattaaattgtcattgagaacctcataaatcattgttaagatctatacaaaaaatcaaggatccacagtaatagaatatttttcatctgcatatgaatttttcccttccctttttgtctacttttagatttaaaaaaaattaccaggacattcttattaaatactattacctgttttggtttctgcacattaagaaagtcacagagaagccagacacagtggcatgctcttctattcccagctactcaggaggctgaggctggagaatcacttgagcccaggagtttgaggatatcctgggcaacatggtgaaacttggcaaaaacaaaaacaaggccgggcatggtggctcacacgtgtagtcccagcactttgggaggccacggctggcggatcacgaggtcaggagatcgagaccatcctggctaacatggtgaaaccctgtctctactaaaaatacaaaaaattagccaggcgtggtggcgggtgcctgtactcccagctactcgggaggctgaggcaagagaatggcatgaacccaggaggcggagcttgcagtgagctgagatcgcgccactgcactcctgcctgggtgacagagtgagactccatctcaaaaaaaaaaaacaaaaacaacaacaacaacaacaaaaaacaaccagagaaatagcacttgttaactacaattgtgactctaggtaaacttgggccttaatatggttagacaagaagggttttaggtaacttgcctttttagatcctatttaggcttattagtctatattctacattcttgcacgatggaaattactagagaagtgggataattctttgttgtggggaaaataaaatttgttgtgaaaatatactgtattttaaaatatttagaaagattataaataactggagaaaagataatttcatatactaatatgatggaattagcctagcagatgttaaaaatcctttctgaaaattataatctaaaattatttgggaaattacaatggaactgaataatctgtacgttggtatattaaagccatttttatattgtgaaaaaaaaaaaaaaaaaa

SEQ ID NO: 1073 - DNA, 6115 bp, Homo Sapiens
  NM_001039571
gcactgacggcccatggcgccgccagccgcccgcctcgccctgctctccgccgcggcgctcacgctggcggcccggcccgcgcctagccccggcctcggccccggacccgagtgtttcacagccaatggtgcggattataggggaacacagaactggacagcactacaaggcgggaagccatgtctgttttggaacgagactttccagcatccatacaacactctgaaataccccaacggggaggggggcctgggtgagcacaactattgcagaaatccagatggagacgtgagcccctggtgctatgtggcagagcacgaggatggtgtctactggaagtactgtgagatacctgcttgccagatgcctggaaaccttggctgctacaaggatcatggaaacccacctcctctaactggcaccagtaaaacgtccaacaaactcaccatacaaacttgcatcagtttttgtcggagtcagaggttcaagtttgctgggatggagtcaggctatgcttgcttctgtggaaacaatcctgattactggaagtacggggaggcagccagtaccgaatgcaacagcgtctgcttcggggatcacacccaaccctgtggtggcgatggcaggatcatcctctttgatactctcgtgggcgcctgcggtgggaactactcagccatgtcttctgtggtctattcccctgacttccccgacacctatgccacggggagggtctgctactggaccatccgggttccgggggcctcccacatccacttcagcttccccctatttgacatcagggactcggcggacatggtggagcttctggatggctacacccaccgtgtcctagcccgcttccacgggaggagccgcccacctctgtccttcaacgtctctctggacttcgtcatcttgtatttcttctctgatcgcatcaatcaggcccagggatttgctgttttataccaagccgtcaaggaagaactgccacaggagaggcccgctgtcaaccagacggtggccgaggtgatcacggagcaggccaacctcagtgtcagcgctgcccggtcctccaaagtcctctatgtcatcaccaccagccccagccacccacctcagactgtcccaggatggacagtctatggtctggcaactctcctcatcctcacagtcacagccattgtagcaaagatacttctgcacgtcacattcaaatcccatcgtgttcctgcttcaggggaccttagggattgtcatcaaccagggacttcgggggaaatctggagcattttttacaagccttccacttcaatttccatctttaagaagaaactcaagggtcagagtcaacaagatgaccgcaatccccttgtgagtgactaaaaaccccactgtgcctaggacttgaggtccctctttgagctcaaggctgccgtggtcaacctctcctgtggttcttctctgacagactcttcccctcctctccctctgcctcggcctcttcggggaaaccctcctcctacagactaggaagaggcaccctgctgccagggcaggcagagcctggattcctcctgcttcatcgattgcacttaggagagagactcaaagccctggggcccggccctctctgcatctctctctgatctagctagcagtgggggtgtcaggacagtgaggctgagatgacagaggtggtcatggctggcacagggctcaggtacattctagatggctgtcaggtggtgggtagctttagttacattgaatttttcttgcttctctatttttgtccacacacaaatcagtttctcctgatctttatgtcttggaacagggccagacagggagaactctcaggtactcttgggagttggtcccatacaagtgcggactcctggacattagcgaggtgtaaagagggcagtgtctgtgctgccccggcagctttgctctccagatgctggactagggtgggcctccttcagcctgggagggtctgagaataagatctagtgacccccatttatatcaaacctgataccttacacatgggcttctttctagattcttctttccatagctcatggagctgcagggaaagctttaagagctttggtcatataaaacatccattcagctgggcgcgatggctcatgcctgtaatcccagcactgtgggaggctgaggcgggcagatcacctgaggtcaggagttcgagaccagcctggccaacatggtgaaaccccgtctctactaaaaatataaaaattagtcaggcgtggtggcaggcgcctgtaatcccagctactcagaaggctgagacagaagaacagcttgaacccaggaggctgagattgcagtgagccgagatcgcaccactgcactccagcctgggtgacaagagtgagactctgtctcaaaaaaacaaaacacaaataaacaaaaaaaatccattcatttactcatgcaataaattctcctgcaagcttttatgggcactcagtaagtactcaggattggctttatcagccttgccactgagcagctcatggtcctatggaacctgagccaggcctcagtctctccatgattggctcagctaactctcagttcagagtggagagtatcaatcttgtgtttttgcccttaggcagcactatatgagacatggggcctgtggtccttccttctggtgtcccccgtgttaaaagataaaaaacaccccaagggccgggcgcggtggctcatgcctgtaatcccagcactttgggaggctgaggcgggtggatcacgaggtcaggtgatcgaaaccatcctggctaagatggtgaaaccccgtctctactaaaaatacaaaaaattagctgggtgtggtggtgggcgcctgtagtcccagctgctcgggaggctgaggcaggagaatggcgtgaacccgggaggcggagcttgcagtgagcagagatcacgccactgcactccagcctgggtgacagtgcaagactctgtctcaaaaaaaaaaaaaacactccaagggccatccgtgctctctgcccctcctgtggggaccaagtggggttaggaatggctcagtggggaaggagagcactcttgtccccagtcccttgccaccctgtcccttagatagggaggtgggctgcagagattggtgccagaagagggtgggtttgggaattggagctcctccaaggagctcctcctaagattgagtgctgcagctgtagtggctgctggttgggagagtaagtgccatcactaatttaaaagtccttgccatctggaatcaggctttgtcaacagcagctgagaaaagcagcctgtgcctctgctggccaggcctaggccctcgtcagagcgtgcctctccacaaggcacttgggcctgggtgattgttgcgcctctggctttggcgtttcctctttgcagcactttgcctacctcccccaagccctgagccactgcctgctggggctcctactgaggttctggaaacacctctgcacctgccgcccctgggaggaaagagggccacacaggaagtgtctgcagggagaggtggcactcggcagcctgagttcaggagaggtgcttggagcttcaggcagaggggccttcagaggagggaaacggagcaatgtgtcacaggcaggcaggggcaggactgccaccccaggccccgtgggaggcctgctgagggcacagagctgctcggtgcagccttcatgctttgatctggaaagagcagctgtccgcaggcctctgtctccaagaggcctgtcacacaggaggaccgctggaaacataccaacacgtgcagtctcccctccaagctattcatgctgtttgtggaatctctctcaaacataagtgtcaggtgtgtgtcgtcccaacgggtcctgtgctgtgaatagatccatgtgcagcacaaagggaatgtggcacgtggccccaggaagagttcacccggccagggggcagttgttcagttgcctggggctgacactgaccactggcctctggggtgtcctgcagcccaaatgcccaccttgccctcctcacatctcagtcaggggaggccatgcccaagccaatgtgctgtcacagcctgcagcgggggcagcacttcctcggagggcctgggaggtgctggggatgccccagcgcttctcttcctgcctcgccctggcatggcccagcgcctctaggatcaacttacgatccgtggagcagccccgggaaacccaaatctggctcaggacagcgtacgggcaggagggctgtaaatcatcccaggctaagcctccgtgggcactggctcctgccgcagcctggctatggactcagttagaaccaggtagaaagtcagcgacaccccacagaaggccactgcggctaggtaaacacctgagaaagaaactgctccagaagagatgacgtgggcttccaggagcatggaggaggtggcacttgaacttttaggaaactccttagatgagataaagtgggggttggaggtggcgaaaagagggtaaccctgggaaagtcagtcagaacccatggcagaagactgcaggagaggcaggggaggggcttcggggaccactgtggacagagctctgaaagcaccctggccaaagcccctcctgaggtgacagagcgtgggaggaggctgcactgggcctgcgtgccatcctcacccctgttccccgctggcgccaggccctgccttcttggtacctgtgccaacaggagagccctcaccagccgatcttgtcactctccgtggtgacagtgtcttggccagctgtggcccctagtttctagcagcgtttctcagtgtccttggcccttctgagaaggcaggcgggaggcacacggtgccctgttcttccccgtttgtccagttgcttgcaaagcagagaatgagtaggagtgaacccgagtgacttcacccgccctgtcccccacgtcaggacaggcttgaggcctctctgggcgtgagcgaggaaaccaggctgctctaacttctgaagagtgggctctggctcaagactccaatcggccagaagcccacagagatcaaagcactagcaagttcagctgtcctggccctcgggtagaacccacgggcgtgcctgggtgcggctccacccacatgccccactgtcagcccaggcaggagccttcctggccgggctcaggatctgcctgcagcccagccaggccatcacccagccccgatgcatcctggcactgcacgcttactcttcacaagcacttatacgcggatggcctccgagaccctgcctccctggtctgctgaggtcaggccaggtctcccacggagccgggcagctccacaccccaccacctggcaccgttaggtttcagatctcccgtgtggtgtttgatgtcggcttttgttcctaccttgggagtttggattgtttcctctggtgtctttgtttaccttcctcactgttctacctcctggccaggtctcagcttagcttccctggtgtggggtgtttttcaagccttccagccacagctgtctcccctcaggctggacggctccggggtgacagggcttcaccctctgcctgcagacccctggtgggcacatctcacaggcttccgtcttgctgagttgggtacggaggcagaagtggggtgtggaggaaagtcagagggaaatctgcttcagaaaggaagggtctttagacacaaagactggaggcccttccccgcccgcacgggagctgccatcgtgggtctcatgcacgtcaagaccttcccacatccaaactcagcttccagcagggattttgactttggatgacaaggctttatttgtaaatatgctcttaatatgcaactttgagaataaaatagaaacatcatgtattttaaaatataagatgaagtgtgacgcactgtatacaatttaatatatatttttagggttttgttatttaagaaaatggaatgtaatggtacttttacaaaagagaaaaaatgttatttttactttctggaaaaaataaatattctcattgttgtagaaagaaaaaaaaaaaaaaaaaa

SEQ ID NO: 1074 - DNA, 5431 bp, Homo Sapiens
  NM_001039585
gccccgcagtttccgcgctaagggaacgagtgcgcggaggggacgagcggctggaccacagccggcgcccgatcaggatctccgcgctgggatcggtggaacttgaggcagcggcggcgcggggcgccatggcacaccgagcggctccgtcttctgctcctcagagagcccggctggcggcctgggatgacaagatgtctggactgcaatcctgcacagttttgagagggagatgacttgagtggttggcttttatctccacaacaatgtccatgaacaattccaaacagctagtgtctcctgcagctgcgcttctttcaaacacaacctgccagacggaaaaccggctttccgtatttttttcagtaatcttcatgacagtgggaatcttgtcaaacagccttgccatcgccattctcatgaaggcatatcagagatttagacagaagtccaaggcatcgtttctgcttttggccagtggcctggtaatcactgatttctttggccatctcatcaatggagccatagcagtatttgtatatgcttctgataaagaatggatccgctttgaccaatcaaatgtcctttgcagtatttttggtatctgcatggtgttttctggtctgtgcccacttcttctaggcagtgtgatggccattgagcggtgtattggagtcacaaaaccaatatttcattctacgaaaattacatccaaacatgtgaaaatgatgttaagtggtgtgtgcttgtttgctgttttcatagctttgctgcccatccttggacatcgagactataaaattcaggcgtcgaggacctggtgtttctacaacacagaagacatcaaagactgggaagatagattttatcttctacttttttcttttctggggctcttagcccttggtgtttcattgttgtgcaatgcaatcacaggaattacacttttaagagttaaatttaaaagtcagcagcacagacaaggcagatctcatcatttggaaatggtaatccagctcctggcgataatgtgtgtctcctgtatttgttggagcccatttctgggatacagaataattttgaatgggaaagagaaatataaagtatatgaagagcaaagtgatttcttacataggttacaatggccaacattggaataaatggaaatcattctctggaaacctgtgaaacaacactttttgctctccgaatggcaacatggaatcaaatcttagatccttgggtatatattcttctacgaaaggctgtccttaagaatctctataagcttgccagtcaatgctgtggagtgcatgtcatcagcttacatatttgggagcttagttccattaaaaattccttaaaggttgctgctatttctgagtcaccagttgcagagaaatcagcaagcacctagcttaataggacagtaaatctgtgtggggctagaacaaaattaagacatgtttggcaatatttcagttagttaaatacctgtagcctaactggaaaattcaggcttcatcatgtagtttgaagatactattgtcagattcaggttttgaaatttgtcaaataaacaggataactgtacatttttcacttgtttttgccaatgggaggtagacacaataaaataatgccatgggagtcacactgaaagcaattttgagcttatctgtcttatttatgctttgagtgaatcatctgttgaggtctaatgcctttacttggcctatttgccagagaacatcttaatgcagcctgcatagtgaaatggttattttgagatcaccgctctgtagctaacccttataaactaggctcagtaaaataaagcactcttattttttgatctggcctattttgcccctcattgtgtagcctcaattaacacatgcatggtcatgacacccagaattcatgatggtttgttataacaacctctgcatattccaggtctggcagacaggttgcctgaccctgcaatcctatctagaatgggcccattcttgtcatatttgacaaataggactgcctacatttattattatgaaggtcgattgttgttggaagtgttttttcatgtcatagattagcaattttcaaataattattttttctctgaaaattttgtgtgtgattgcacaataaataatttttagagaaacaaaggctctttctcagcacattgatgggcaactagaattacagcagtttcaaaactctaccatggataatgcaaacaaaccgaagctacatgccaatgataggtgcaaagaatattggcaaaaggtgctttaccttgagccattatttgtgtcagagaacaaaagaaacagaatcaatatataaaattcaaagactatctgcagctagtgtgtttcttctttacacacatatacacacagacatcagaaaattctgttgagagcaggttcattaaatttgtaagatggcatattctaaagcctgtgctaccagtactaagaggggaagactggcaatttgccaagcacttggggattattataacaattaactaggagatcaagagataataatctctccccaaattttccaataataattgagactttttctttgcttgtttgtgtaattcaaccaaaagaatttcaatacccattcaaattgtcctaggtctatcagaaattagggaaggtagtcctgctttataataggaaaatgtatttctgtataagagttctttgctttcattaacttggattcatttaaaaattaatcttccctgttaggctgatttcagattctctaggaaatctgtgtaagtaaccagaagacctttcagatggtttatttgctttcagcagagaatttatttcatacagttacttaagagtgttgatgtcttgtgaacagagatataaggaaccattctccatccttccttatcatgctgggtacaatgcttctatgaatatttccatgtattttgactggggagaggcatggagaagaaactctcattcaggggctccaggatccttctccttgaggcttctaaataaatggcagaattcttgctgtattgccatgatgtcaccctggccatgtgtactgacttgaggagatcttgcaacatggccatgtgcaaggctttaaggagtgagagagatgtgtacatatcttaggagggttatctatgttatctgagtatatgtttgggtaaccaaattggtcttaaaaatgatgttaacccaagaagtagacatcaaaaattaaaaaaaaaaaaaggaatgtgttttcattgttttaagtttttcttctgagtaaaacaaaattatagaaaacaaatgcaacaatgtgcacatctgacttaagagtttcatttctgttattatatgtgttgcatgtagcttggcgatttactgtgtaatgaataatagactggaacatctaccaataactttcacataaatgttcaaaatagaagtgtattttttcaggtttctggaaataaatagtaaaataaatggcacaaatagtttcaataaatttaccaatttgagtgttttcagctctatttcaaaactcataactaatcttcagaattactgaatttccttttgaactgggtaaggcattatccaagcaacttcacatactatttaaacatgatttctcggtaattatatattctgggcaaataacataaacatgtcaggatttttacaggtgttagtgaatttttctaaaaagatgagacaaaagcaaaaatatcacacataggtttttatgactatgaatacaaagataatgctgattcacaattagctatgggtaagtccaaaacatcagaccttttactgatgggttaactaggtgaaagaaatgggcccttatttttttttttccctagaggcagaaagttacttctaatgatctatatagctaaaacgaaaaatacctgaaagttaatacatacatatgtagatatattttgttatgtgataaatgtttcttgtttgcacacttttggacttgagaaatctgcttttgttttgtgcctactctgagtttagaacccaaataagaggacttgttaaatatagagtgtactttttgttaaaactattgctagcttcacctgtataccatcattgttccaaattaaataactgttttgggtcagaatataaatgctgggaatatacattttattacttcttaatctgggtgtcaaagattttaccacctggtaaataatgttggacttcaacttgttactggcacattttaatagtagatgaaacatgtttttcttggttatgtgaataaatgtatgttgtgctcttcatacttgttggattgtatagagattaaatagtgatatgtatattttgttgtttgctttggtatgcaactcatgtaattttagtgctttgactagcttaaaacttcaaacaagtaattttataataaagttggactaatgtttttcaagagtgattatttttagaaggaccatataaaacttgaaacgcttgaacctaaactcccgttttatctgctactggatgagaagaatttcaacttaatttccattattaccttttgctctcccaccctgcccaatcttctgtgatatcttctctcttttacctgtgtctcaacttacctaggcaagtcataatttagatagaaatctgatttcccaaacctccaggtttagatatatcattcagaaaagcctcaatgtgtctgtaataagaaacaatctccaaattacagcgccataaacttcacaaaagtttgtatctcccacatggttcctgtccactctgaaggggagctctgctgttgtaatcactcagagaactcaggtgaaaaaacagccaccattatatgtggctgtttctcaaactacagagcatggtgaatcacacacaggctgttagaatatccatctggaggcaacacacatttgcatacacttctccagctaacataaataatgtggctttactaacttcccagggggcagctaagtgcaatactatatgttaggaaaacggaaactaatttgtagacagcactaatgatttccacattaggtaaaaaaaattttcattcttgtcttcctaatagcatttaaacagaaacgatttttaaaagttgttttaaacatttagaaacatcatggcatagaaacatttaggactcactctttgtaagtactgacaagcatggtcttgtaatctgtaaagataaggtagaataaatgaactaaaagaaattttagatgactaaaaggactatataatagaaagagggaaatcttggttcttaaaaattcaggcaattgaaacatttctgtataataccaagcattgttgcagtattgtctgaaatggttgcttttctaataaatgaaaatgactaaaatgta

SEQ ID NO: 1075 - DNA, 12353 bp, Homo Sapiens
  NM_001039591
gcggccgccttagcgcccggtgcttgggtcggcgccgggagcgaggagcgagctacttcaaagccaccaggcctggagcggggacagaggcggcgactaggggaaggtgaagccgtcgctgcaggaggaggagcaggaggaggtgacgcaggagaaacgcaccgcccggagcccgtctgagctcagcgagagccccagcctgaggggagaaggggaagagggccgtcgccggccaaggaggaggaggaggcgggcgcggcgaggagcgagttccggcgccggtgtgcagccttttggttgagacgcccgcagccccgagcccggccgccgcagcctttcgatacactttgttgccggtcacccccgggcctgggatgcacccagggtaggtctcgtcccgggaccgagccccaccgtcgcctggtgcctcccgcctccgtgtgccctggttgtgagaagacgtctgtgtcgtgcggttatgcaatggtctctgcaagatggtttattcttgaattggacctttttaagactgacaaatgctggtacttcatcttctataagtggactataatttcttttctcaagacaactacataagcagacaaaattgcaaagatctgccctgtgtcgagtatgacagccacgactcgtggctctccggtcggagggaatgacaaccagggccaggctcctgatggacagtctcagccccccctccaacagaatcagacttcatcgcctgattcttccaatgaaaattccccggcaactcccccagatgagcaaggtcaaggtgatgccccaccacagcttgaagatgaggaacctgcatttccacatactgacttggccaagttggatgacatgatcaacaggcctcgatgggtggttccagttttgccgaaaggggaattagaagtgcttttagaagctgctattgatcttagtaaaaagggccttgatgttaaaagtgaagcatgtcagcgatttttccgtgatgggctaacaatatcattcactaaaattcttacagatgaagcagtgagtggctggaagtttgaaattcataggtgtattattaacaatactcatcgtctggtggagctatgtgtggccaagttgtcccaagactggtttccacttttagaacttcttgccatggccttaaatcctcattgcaaattccatatctacaatggtacacgtccatgtgaatcagtttcctcaagtgttcagttgcctgaagatgaactctttgctcgttctccagatcctcgatcaccaaagggttggctagtggatcttctcaacaaatttggcactttaaatgggttccagattttgcatgatcgttttattaatggatcagcattaaacgttcaaataattgcagcccttattaaaccatttgggcaatgctatgagtttctcactcttcatacagtgaaaaagtactttcttccaataatagaaatggttccacagtttttagaaaacttaactgatgaagaactgaaaaaagaagcaaagaatgaagccaaaaatgatgctctttcaatgattattaaatctttgaagaatttagcttcaagggttccaggacaagaagaaactgttaaaaacttagaaatatttaggttaaaaatgatacttagattattgcaaatttcttctttcaatggaaagatgaatgcactgaatgaagttaataaggtgatatctagtgtatcatactatactcatcgacatggtaatcctgaggaggaagagtggctcacagctgaacgaatggcagaatggatacagcagaacaatatcttatccatagtgttgcgagatagtcttcatcagccacagtatgtagaaaagttagagaagattcttcgttttgtcatcaaagaaaaagctctgaccttacaggatcttgataatatctgggcagcacaggcagggaaacatgaagccattgtgaagaatgtacatgatctcctggcaaaattggcatgggatttttctcctgaacaacttgatcatctttttgattgttttaaggccagttggacaaatgcgagtaaaaagcaacgtgaaaagctacttgagctgatacgtcgtcttgcagaagatgataaagatggtgtgatggcacacaaagtgttgaaccttctgtggaatctggctcacagtgatgatgtgcctgtagatatcatggacctggctctcagtgcccacataaaaatactagattacagttgctcccaggaccgtgatacacaaaagatccaatggatagatcgctttatagaagaacttcgcacaaatgacaaatgggttattcccgcactgaaacaaattagagaaatttgtagtttgtttggtgaagcgcctcaaaatttgagtcaaactcagcgaagtccccatgtgttttatcgccatgacttaatcaatcaacttcaacacaatcatgccctagttactttggtagcagaaaaccttgcaacttacatggaaagcatgagactatatgctagagaccatgaagattatgacccacaaactgtgaggctgggaagtagatatagtcatgttcaagaagttcaagaacggcttaacttccttagatttttattgaaggatggtcagctgtggctatgtgctcctcaggcaaaacaaatatggaaatgcttagctgagaatgcagtttacctttgtgatcgtgaagcctgttttaagtggtattccaagttgatgggggatgaaccagacttagatcctgatattaataaggacttctttgaaagtaatgtgcttcagcttgatccttctctgttaactgaaaatggaatgaagtgttttgagcgattcttcaaagctgtgaattgtcgagaaggaaaactagtagcaaaaaggagagcctatatgatggatgacttggagttaataggattagattacctttggagggtcgtgattcagagtaatgatgatattgccagcagagctatagatctcctcaaagagatatacacgaaccttggtccaagactacaagtcaatcaggtggtgatccatgaagacttcattcagtcttgttttgatcgtctgaaggcttcctatgacacattgtgtgttttggatggtgacaaagacagtgttaattgtgcaagacaggaagctgttcgaatggttcgagtattaactgttttaagggaatatataaatgaatgtgacagtgattatcatgaggaaagaacaattctccctatgtcgagagcattccgcggtaaacacctctcttttgtagttcgatttccaaaccagggcagacaggttgatgacttggaggtatggtctcatacaaatgatacaattggttcagtacgacgatgtattctcaatcgtattaaagccaacgtagcccatacaaaaattgagctctttgtgggcggtgagctgatagatcctgcagatgatagaaagttgattggacaattaaacttaaaagataaatcgcttattacagccaaacttacacagataagttccaatatgccttcaagccctgatagctcttctgattcctccactggatctcctggaaaccatggtaatcattacagtgatggtcccaatccagaagtggaaagctgtttgcctggagtgataatgtcactgcatcccagatacatctcttttctttggcaagttgcagacttaggtagcagcctaaatatgccaccccttagagatggagcaagagtacttatgaaacttatgccgccagatagcacaacgatagaaaaattaagagctatttgtttagaccatgccaaacttggagaaagcagccttagtccatctcttgactcacttttctttggtccttcagcctcacaagtgctatatctaacagaggtagtctatgccttgttaatgcctgctggtgcacctctggctgatgattcctctgattttcagtttcacttcttgaaaagtggtggcctaccccttgtactgagtatgctaaccagaaataacttcctaccgaatgcagatatggaaactcgaaggggtgcctacctcaatgctcttaaaatagccaagcttttgctaactgccattggctatggtcatgttcgagctgtggcagaagcttgtcagccaggtgtagaaggtgtgaatcccatgacacagatcaaccaagttacccatgatcaagcagtggtgctacaaagtgcccttcagagcattcctaatccatcatccgagtgcatgcttagaaatgtgtcagttcgtcttgctcagcagatatctgatgaggcttcaagatatatgcctgatatttgtgtaattagagctatacaaaaaattatctgggcatcaggatgtgggtcgttacagctagtatttagcccaaatgaagaaatcactaaaatttatgagaagaccaatgcaggcaatgagccagacttggaagacgaacaggtttgctgtgaagcattggaagtgatgaccttatgttttgccttgattccaacagccttagatgctcttagtaaagaaaaggcttggcagacattcatcattgacttactattgcactgtcacagcaaaactgttcgtcaggtggcacaggagcagttctttttaatgtgcaccagatgttgcatgggacaccggcctctacttttcttcattactctactctttactgttttggggagcacagcaagagagagagctaaacactcaggcgactactttactcttttaagacaccttcttaattacgcttacaatagtaatattaatgtacccaatgctgaagttcttctcaataatgaaattgattggcttaaaagaattagggatgatgttaaaagaacaggagaaacgggtattgaagagacgatcttagagggccaccttggagtgacaaaggagttactggcctttcaaacttctgagaaaaaatttcatattggttgtgaaaaaggaggtgctaatctcattaaagaattaattgatgatttcatatttcctgcatccaatgtttacctacagtatatgagaaatggagagcttccagctgaacaggctattccggtctgtggttcaccacctacaattaatgctggttttgaattacttgtagcattagctgttggctgtgtgaggaatctcaaacaaatagtagattctttgactgaaatgtattacattggcacagcaataactacttgtgaagcacttactgagtgggaatatctgccacctgttggaccccgcccacccaaaggattcgtggggctgaaaaatgccggtgctacttgttacatgaattctgtgattcagcaactctacatgattccttccattaggaacggtattcttgccattgaaggcacaggtagtgatgtagatgatgatatgtctggggatgagaagcaggacaatgagagcaatgttgatcccagggatgatgtatttggatatcctcaacaatttgaagataaaccagcattaagtaaaactgaagatagaaaagagtacaacattggtgtcctaagacaccttcaggtcatctttggtcatttagctgcttctcgactgcaatactatgtgcccagaggattttggaaacagttcaggctttggggtgagcctgttaatctgcgtgaacaacacgatgctttagaattttttaattcattggtggatagtttagatgaagctttaaaagctttaggacatccagctatgctaagtaaagtcttaggaggttcctttgctgatcagaagatctgccaaggctgcccacataggtacgaatgtgaagaatcttttacgaccctaaacgtagacattagaaatcaccaaaatcttcttgattctttggaacagtatgtcaaaggagatttactagaaggtgcaaatgcatatcattgtgaaaaatgcaataaaaaggttgataccgtaaagcgcttgctgattaaaaaattacctcctgttcttgctatacaactaaagcgatttgactatgactgggaaagagaatgtgcaatcaagttcaatgattattttgaatttcctcgagagctggacatggaaccttacacagttgcaggtgtcgcaaagctggaaggggataatgtaaacccagagagtcagttgatacaacagagtgagcagtctgaaagtgagacagcaggaagcacaaaatacagacttgtgggtgtgctcgtacacagtggtcaagcgagtggggggcattattattcttacatcatccaaaggaatggtggagatggtgagagaaatcgctggtataaatttgatgatggtgatgtaacagaatgtaaaatggatgatgacgaagaaatgaaaaaccagtgttttggtggagagtacatgggagaagtgtttgatcacatgatgaagcgtatgtcatacaggcgccagaaaaggtggtggaatgcttatatacttttttatgaacgaatggacacaatagaccaagatgatgagttgataagatatatatcagagcttgctatcaccaccagacctcatcagattattatgccatcagccattgagagaagtgtacggaaacagaacgtacaattcatgcataaccgaatgcagtacagtatggagtattttcagtttatgaaaaaactgcttacatgtaatggcgtttacttaaaccctcctcccgggcaagatcacctgttgcctgaagcagaagaaatcactatgatcagtattcaacttgctgctaggttcctctttactacaggatttcacacaaagaaagtagtccgtggctctgccagtgattggtatgatgcattgtgtattctccttcgtcacagcaagaatgtacgtttttggtttgctcataacgtcctttttaatgtttcaaatcgcttctccgaataccttctggagtgccctagtgcagaagtgaggggtgcgtttgcaaaacttatagtctttattgcacatttttccttgcaagatgggccatgtccttcaccttttgcctctcctggaccttctagtcaggcttatgacaacttaagcttgagtgatcacttactaagagcagtactaaatctcttgagaagggaagtttcagagcatgggcgtcatttacagcagtatttcaacctgtttgtaatgtatgccaatttaggtgtggcagagaagacacagcttctgaaattgagtgtacctgctacttttatgcttgtgtctttagatgaaggtccaggtcctccaatcaaataccagtatgctgaattaggcaaattatactcagtagtgtcacagctgatccgctgttgcaatgtctcttcaagaatgcagtcttcaatcaatggtaatcctcctcttcccaatccttttggtgatcctaatttatcacaacctataatgccaattcagcagaatgtggcagacattttatttgtgagaacaagttatgtgaagaaaatcattgaagactgcagtaattcagaggaaaccgtcaaattgcttcgtttttgctgctgggagaatcctcagttctcatctactgtcctcagtgaacttctctggcaggttgcatattcctatacctatgaactgcggccctatttggatctgcttttgcaaatcttactgattgaggactcctggcaaactcacagaattcataatgcactgaaaggaattccagatgaccgagatgggctgtttgacacaatccagcgctctaagaatcactatcaaaaaagagcataccagtgtataaaatgtatggtagctctatttagtaactgtcctgttgcttaccaaatcctgcagggcaatggagatcttaaaagaaagtggacctgggcagtggaatggcttggagatgaacttgaaagaagaccatatactggcaatcctcagtacacttacaacaattggtctcccccagtgcaaagcaatgaaacgtccaatggttatttcttggagagatcacatagtgctaggatgacacttgcaaaagcttgtgaactctgtccagaggaggagccagatgaccaagatgctccagatgaacatgagtcgcctccacctgaagatgccccattgtacccccattcacctggatctcagtatcaacagaataaccatgtgcatggacagccatatacaggcccagcagcacatcacatgaacaaccctcagagaactggccaacgagcacaagaaaattatgaaggcagtgaagaagtatccccacctcaaaccaaggatcaatgaaatgcacataattaactggttccatcaagactgtgcacccaggccttacagtccaacctttttctgtgtctggctaatatttaaaactagaaaaactattcctaatcaacatggagtggagagtttattcactgtcttatctgcagaaatttgctgtcaatatataacccgcctgcagtggaaagtgtatagtgttttgtaataaatggcctgatgctaatgtgtaaatggcaaaggtgtatatagtatattaatgttgactgttaattcttaagcaagaaacttttttcttgatgagactcacagatctacacaaactacaaaagttaattttcttgttacacccactgcactctgcaaccagtgttgcctgcctcatggcagttggatcagctcctttacaaaaaagaaaaaaaaaaaaccaacagcaacaaaacagagcccatccatgtcagccacaccaatagtttcatgttaattctttgccactggagtcaattttgctatgagcaatgtaaggctggtaacctttaaattatttggttgatgtggaaaattggtgatgtaacactgtttctagatttttttcattgcctttttattctgatattaggttaatcactttgaagctatagttatgctgtaacatttagcatggcttcacaccaagttagtgtagccaatgaggaaaaagttaccataatgacagcagttgtccgagaagtgacagctgtattactcagagcttttacttcttacacctagaatattaaaatataaaacaaggggagaaatgtgacagtctattttcagttgcacatatgttccttatatataatgtttgacagttcaatctctgggtggaataaagaacacttacgtatcagtaatgggaatttttaaagatttaaaacaaatatgcaaaaatttgctatgccaagatgctggagcataatataagactgtatttggtgtgcttgttttgtttctttggtagagtttattaggtgaatcttctaaaactttccttctgttggatcccagtgacgtggaagtcatcagaaccccacggtacttggagtacctctctgcaccaagatagctggctgattttctgctcagtcacaattttacttgaaagcaagaattgtcctagctccttttccattattccaaaacgtttaacgttcaaagcagggtctcattaaaaaagaaactactggttgatataattgagatattacaatttcagaataaacatttgattaaaaataaggaaatcctcagttcatactgtatttaaaagagaattggtaacttgaatgtgtgtaattttttggaacctgtctaaaaaccaaatacccctgcaaacagatacagcccaccctattctatttaaatattttgctgttttattttatagaaattattttgctgaattcacaaatagaatttgatttaagaagaactttttgtcctgtggtgtgtttttggttttttttttggttactttttttgtcctttttttttttttttaaaagaggactgcatattaaaattcattctgtgcatagcatgcctaggcatgacactgattcaggatttcagtcacatcaagtttttgtgcacagaaagatttgacctttggccctctactgaagattttgagaaatcaggatgttgacactgtaaaagtttcctaacataatcttgtactttttgtatgttttttatatacatgtatatttaatgagcacaagcttggttgtattttttacaattcagttaatagggaaatgttttgtcaaaaggctacacttggaactgaacaaagcagaaacaaaattgagcattgcattattttgtgattaaaaggggcaggtatttaagataaagctttgggtatcttatttgtagtactgtatagtcaacctgtgcttctaggtgttcctgtaggacattttgacaccgatactttgagtgaaagtcacacacggtgtttgcaattccaactgatttttgttttgtttttatttttttgttgttttcttctttgagatggagtcttgctctgtcacccaggctggagtgcagtggcacaatcttggctcactgcaacgtcgcctcctgggttcaagcgattcttccgcctcagcctcccgagtagctgggattagaggtgcccaccaccacgcccagctaatttttgtatttttgtagagacagggtttcaccacgttggccaggctggtcttgaactcctgacctcaggtgatctggccgcctcggcctcccaaagtgctgggattgcaggtgtgagccaccgcgcctggccccagttgatagtttttttaatttaaaagttcctcaattccaagctctttaaacgagtgaaataggttaactttatttggatgagttaggtgtaccatctcaccatctgagaggagatttatatatttcctgctgctccttaacaaaatatgtaatgtacttaaaaactttaacgacttcctagttgagagaaaacttgacatataaaaggctgtgaatttttctgcttggaggaagagcccaaccttggttgctttgaagttacaagcccccttgtgccaggtgaggggcttgtgagtcatttttgtctccatttgaggaagagtggtattcgttgtgactaggagcaagggaaagtggagttatttttgtttgtgcaaattattttctatatttaactcaagcattaatgtataaccagaaatttaaagatgcatgttgttgcaagagcaacataatggtgattttgaggtctttttctgaacacaagtggcacattttaaatttcaagtcttcaaagtgcctaaggattatttagttctccctcaactgattttttgagccatatatttcctattttaaatgtttgcggaatcgccagtcttcctttgaaagaaacagcccccagaattctaaatgacacgattatagaagacagtagaatgtgttaccataaagactgaagatattttagttgtaaaaccatgtgaacaagggcttttgccctattgtatctaagtatttcagtgcacaacttgttaaaccatgttgctgctgtttctaagccctccaccaactgaactttcatgtttagcattgtagaggcagaaataacatactaggttttttttttctttcattgatttttctcctggtgataatttcccagccttgtgtcttttagctgttgtgtatacaaatttagaattaaaatgttttctatttttttcatgattaacttagtgaataacttaaatccttaatcctcgtagtggttagaaagatgaggagacttttttgacttacatttgtaaatgaaaacaagtctgtgaatattcagatgactacttcgaagtaattcagtttttttattagtatttttccagcttatgttttcccatgagctattttactttgctgaattttgtgggtaatttggtggatatatcctgccttatttaggattatagctggataagaaaattgccttttcattgtaagtgcccagttttggtctctagtttgaaggtactacatactgccgataaaggaaaacactcccctacaccccagtttttgtgttaccaagaaaaaaaaaacagtattggtttcatagtaggactcaaccagaattggtcctacatatatgtgagtgttcagtttttgcaaataaggtttttgagtgtgataaaacactacagaagtgctaagtgtattgagaatttgctgctgattgtatttataacaattacttgacgtttgcagaaatttagcactttccctccaaatttataggtgtaagagaagcgggggcaaggtgcaccacattttaaaactgcaaatgtgtgaaaatttatttagagattcagattcctaaaaggaaatttcaccacccaagtcatgcacttcttagccttttacaagccaacagactgacatgaagattgttcacagttcctaagatttagcacatatacaaaaataaaactttataaattcaa

SEQ ID NO: 1076 - DNA, 1370 bp, Homo Sapiens
  NM_001039617
ctttcaccctgggctgcggctctgaggctgccgtggccatggagctctggaagctgggctgggggaggaagcctggtggctctgacctcccctggaggcgaaggaggcccagccatgacactcttaacggatgccacgccgctggtgaaggagccccatcccctgcctctggtcccacgtccctggttcctccctagcctctttgctgccttcaatgtggtgctgctggtctttttcagtggcctcttcttcgcattcccttgcaggtggctggctcagaacggggagtgggcctttcctgttatcacaggctccctctttgtccttaccttcttcagtcttgtttcactcaacttctcagaccctggcatcttacatcaaggctccgctgagcagggccccttgacggtgcacgtggtgtgggtgaaccacggggccttccgcctgcaatggtgtccaaagtgctgcttccaccgcccgccccggacttaccactgcccctggtgcaacatctgtgtggaggactttgaccaccactgcaagtgggtcaataactgcatcggtcaccgcaacttccgcttcttcatgctgcttgtcctgtccctgtgcctctactcgggcgccatgctggtcacctgtctcatcttcctggtgcgcacaacccacctgcccttctccaccgacaaggccatcgccatcgtggtggccgtgtccgccgcgggcctcctggtgccgctgtccctcctgctgctgatccaggcactgtccgtgagctcggccgaccgcacctacaagggcaagtgcagacaccttcagggatacaaccccttcgaccagggctgtgccagcaactggtatttaacaatttgtgcaccactgggacccaagtacatggctgaagctgtccagctgcagagagtggtggggcctgactggacatccatgccgaatctgcaccctccaatgtccccctctgctctcaaccccccagccccaacctctgggtccctacaaagcagggaagggacccccggggcgtggtgaggctgcagctctccaggagttccacacgggcccagtgctgcccctgctgctgcaggagcccccaggcgaggttcggccttcctctcgcccctgtgcacccggagatgcccacagcaccagcacctgagctcacctccgaacccgcctcctgaacccgcctcctgaacctgcctccttacctcccacttcctgagccctgagtggaagcctttctgtgccttgccctttgcccactcccctggtgggactgccaagaccctcaatgcccattaaatactcttgcctgcctcttaaaaaaaaaaaaaaaaaaaaaaaaaaaaaaaaaa

SEQ ID NO: 1077 - DNA, 7575 bp, Homo Sapiens
  NM_001039618
aaaaccactgacttccggctacgccgttgtctgggtggcgcggtcgagtcatcgcagggcctcaccgcttcgttctcccgtccctccccgcgccttggcgcggggggtcgactagccaagtgaggcgggaggcgactcggacctttccctgcatttcgtttcggccagtgccgggggctacccgccctggggcctgggatccttggggcccgtgaggcccactcttagcggccggggcctaccgcggcccgccgctggccctcatgaggcatagcctgaccaagctgctggcagcctcgggcagcaactccccaacccgcagtgagagcccggagccggctgcaacttgttcgctgccctctgacctgacccgggctgcagcgggggaggaggagacggcggcggccggatctcccggccgcaagcagcagtttggcgacgaaggagagttggaagccgggagggggagccgcggcggcgtggccgtgcgcgcgccctcccccgaggagatggaggaggaggcgatcgccagcctcccgggggaagagacggaggatatggactttctgtctgggctggaactggcggatctcctggaccccaggcaaccggactggcacctggaccccgggcttagctcgccggggcctctctcctcgtctggcggaggctcggatagcggcggcctgtggagaggggacgatgacgatgaggccgcggctgctgaaatgcagcgcttctctgacctgctgcaaaggctgttaaacggtatcggaggctgcagcagcagcagtgacagtggcagcgccgaaaagaggcggagaaagtccccaggaggaggcggcggtggcggcagcggtaacgacaacaaccaggcggcgacaaagagtccccggaaggcggcggcggccgctgcccgccttaatcgactgaagaagaaggagtacgtgatggggctggagagtcgagtccggggtctggcagccgagaaccaggagctgcgggccgagaatcgggagctgggcaaacgcgtacaggcactgcaggaggagagtcgctacctacgggcagtcttagccaacgagactggactggctcgcttgctgagccggctgagcggcgtgggactgcggctgaccacctcgctcttcagagactcgcccgccggtgaccacgactacgctctgccggtgggaaagcagaagcaggacctgctggaagaggacgactcggcgggaggagtctgtctccatgtggacaaggataaggtgtcggtggagttctgctcggcgtgcgcccggaaggcgtcgtcttctcttaaaatgtagggtcaagtaatctgctctttatccgcgtttacccctttcaactcccttacaccatgtcaaacttaccttagtgggacatcttcaccggacacatttcagaggagagaaaaaaagtaatattgaatcttaaagtgtttagctaaaagcatgaatgtgacacagtaaccaactcctaatgataacatgtgactattaaatctctctgacagtttcttttttaggtgatttccttcctgccaggctccgttgtaggggttacagaacagtcgttcccgcctcacaacctggtaaggatccatctcttcccgtaacgctcatgctctgctgctttgtctactttaatgggcaacatctcagtttgtgtgtgtgtgatttttttttttttttctgttttggaaggtgggagggaaatctaatttgggccctgtccaccctggaaacagacttgtgctggtcaagaatgtatttaagatgcctcttctggttgaaatagctattaatgtgtccccttattcagacttgcgtgtacctagctcttctgtccccagtgtggacatggccttggatgacatcggttccaactgtacactgaaacctgcttatagagagacagtttggagacagtgaaacaggtgaagttgaatggaagttccgagttgtacaaggtgcaaattggaattccgattttagggcaacttttcagaggttgacagttaagtatttggggcatgcacaaatgtgatagttattttgctggaggtgacaggtatctcttaaatatcaacaatgccttttagttttcagtatgagatatagaaacagtctataatggagtaacattttaatgtctcaccattagagaagttggaaattaacatacatatgagactcctgcgttttagttaattggagaataagaatggctaatgtttctttgaggaccagcagtgattaccctatcactgagattgaataaattgttgaacatctttatttttgttgtattaaaattttaggttaaatttatatatgtatgattagatattgaaggttgtgaaatgtgaatgaaaacgtgtaaagtgaggcttcacaaagaatcttattctctgtgtttcaaaagtatttgtcctattttaaaataattttttaaattgagtggttctggccacttaaatgacacgattggtactattttcctaaggtgggatttattcccttgaatctattaaccagttgtataaattgaattatggtgtccttcagtgtaagaggcattaagaaattctttgtgaaacatcactgcttgataaagtatatacgtatttagcatccttgtttttctttgtgctaaagtggatacagctgttggggcagaagagacgggaccagctgctggccacatttcctgctttattttaaaaggtagtataagaaatgaggaaaaagaggtaatatcagggcttctgctgttttttatttttaacatgttcataattaaaaagtattttccagcagtccaaagatgtaagttatcttacacataaaatgttttattttgttatttggttatgaaaatggaatccttgttcttgcacaactgtaaatgttttgttgctagataatacgatttgagacctgaattggtctttggtttccagtgcatcacagcatattttgtaaaatcatctactactgcacttgagcatgaatgggtagtagccaaactcacaaattggagtgatgaacctgcttatacctaagggcaggagcaagcccctcacaatgcagctgcatgggtttttagtgcctactgaattatatatatatatacatatatatatatatatataaaccaaaagtagttggaaagattatttgaaatgactaatttgtgctatctttatgaaatatgttaaatgtagcttttttgaaacagaagccttgaattgaaatttaactaatacttgaacattttgtatatatttctttgtatataattttgtgcagtaccaatgacaaaaatatggtgtcataataaaaccaggtttgttgatcttttagttatgggctcaaagaatttattcatctctaacatgatattggaaaataatggatgaaaataggaaaaatgattgttaatgctgactgtgggtcttaaaaggttctggaaagcagtaagttcatttttctaaaaactataacattctgttggagtattttcttccttacgtcaatacttttcctgcattatttgaaattgtgggctggggagaaacagtagtcaaagctttctgaattgagatactttgaaattccaagtgtagatttttagaatgtcattttataaatggcagtttttggaattacttgataagaacttttgaaaatggaaggattagtatggcctatttttaaagctgctttgttaggttccttatgttttattaactgtcttttctcagtttccatttcatttttttttttctagttttggtgacttagtgattttgtcattttttacatcaacttcatggtcttgtttttacatggtaattgcatgtacttaggatctatctaataggggctttaaataaatttggtcatatttatgtgtaagcacattttactgtaaatgtttgggtttctgaatttaaacagatctgtttatttcagtatgtagtaaacaatatcttaaagtgtccgattcactacttgttaattaaaaaagttatgattaatgtgaaactgttgtcttactatttttagaaaattgtgttctggatgattagcacatggataaaggagatttctggaatataaaatggattgtttttgaaatttctaggtttggctctatttactgtaatggttgaaaacaatttagtatttgggtgacccttttgtttttcttctaaatgtgcctctggtaaaatacagaactagactaaagatgtagctttttaatatttgtcttttgatggtggcaggagttcatacattaattgaactaacacatcatattttgacctactatttctatcatattgacttactgtttctgcacttctttgaccagacttatcttaaaaagtccacttttgttaaaatgtagtcacacctctgatataatccaacaagaagtgttcaaaatattttaaatatttgtgcattttataatcactaaattaatctctctctcttctctttgaacagcttagcagtgtctgcaaaaacgaatcttttcctacaacctgttaactgactggactgttggtaacaaagtaattgtgagaaccatgtcggtcaaaaatttggcatctgctgaaaaaaatgaatgccattttcaagttcccaaattacttctatactgatttcactttccagaaatggagatatgaaaagattctctggaatccttgaaagacttaatagagatacatgagactaagttaatcttggaacaaaattatactttttttgtctttcatgggagtgatactcagttattgcatatctttacaaaattgtaacctttggagaattacagtatttcatcaagaaattagagtttttacataatcaagagcatattctatggaattaacatttagtggactagaattacataagcaggccatcagtgatcacaaggcatatgagtttgtatttatttcctggaacatgagagctaatttggagtacagacagacaccctgctgagtagaatataaaagttaatgtaaagttctgaactataaagagtagtccttttaaatagatgcattgatttgtatatctttgaaaaagttgattatgattaaatgtgtgggtagttaattacaatttagggtaacaaccaggatgtatggattcttgaggttttggcttcttgagctttctcttgagtacttgatactgttttctgaatattttgaggtttctaattaatggtatgctagtttctactgttttatataaaaatttatctagtgttgtataaggactttagtattgtggatgatgggagtggctttttgtggcatatggttgttttaattgaaatattttttcagtttattacaagtgtgaaaaaacactcaaaactctggattgttttatttcatttttgttggattatgttaatacattccttcacgtggtttagattgagtcattttatctcacttacttggaaatgtgcagctgatagaagagggattgggtaggagattggcttttacttcataataaatatacagttggttattgtattattcaaaacttattaaatccattcagtttcttaccattttaagtgtattcagtgcctgtgaagccaggcagcagagtattcccactggcttaaaacttaggcgctgatgctcctacagtacagctagttataattccagaaccaaaggcaccaacattatttggtgaccttaactactactttgatagaacagactgggtaattcactgataatgagtcattacctttttaatatgtgattatctagttcagcattttgaatgtgtagtttaaggtctgatttagtaaaattttaaagctaaataatctgatgactcttgaaagtttaattggtagtatgacatttatgtttttttcccccagactcacagccaatacaaagttttgagactcctaaatgttaatatttttgctgtttttctgagctgtttttttatttacttaccacctaagctgcggatcaaaaagggaattcttccattagaaatttgtagtgttgtgtggccagcacagtatttttcagatttgaatttcagtacctctgtgtagcctcagtactctcaacaccagtcactctttattgtcttaaaatattccatactttttgttgacccaaaattgttgaaaatattttgctcagttttcacaatgaactaattgaaaagtgtagttactgtgttgtaaacatttgtgtagttctgttaatacactgatttgaattttatttatctcaacttcctttagcgtctgcctccaaattttgtctttgctgtatacccactgagatcaattccctagacccctctggctcttagtgtactataatttgggctttataaaatatattgtcttaatttaaatagaatgtgagccctctttttttttttttaagccaaataactacacaaagtaaattataaaagatttaaatagtttgtctacagtgactagactgaaatataaaaattgattgagggtagtttacttcaggtgttagctacaaatgactaaatgtccttaaataatgcagatatctgccctctgaacaaaaattttggcaaagtaaatttgtagcaacagacttaacatgatttattgcttatgttgcccatttctgctaatggaaaagataatttaaaaatatgtggcagaggacagatattagaaatactttttggttacagaaaccattgtaaactcatcctcatttataaatggtattatgctagggagtaattggactaggaatgtttaaagataagtaaggaaacaatgtgtgctcaatcgtcaaagaacttagttatatcattgggctttgaattatctaagttgattacataattctatattcttaaggagtcttaactcggtacttgggttaacgccagaaattacttttaattcattgtttttttcactgggatgagtagaactctgcttttagtaaaagtgacagaatataggtaaaatggatgatttgggatcagagcttttcatcttgatattttagcctgtaaaataaacagctatattgttttgccctttaaatgttatatatatttttctgtctttctttccctagttgtaaaagtaaagcatattctttatagaaaacttggaatatcctgaaaggaatcaagaagaaaagaaaaatcacccttataactctataagccatagaatatccacagtaaacattttggcatgcttcctttcagtctcttgtgcacatagattcttttgcctcataactgggatcattttttatataagtttggtagataatatattttatgtgcctgttgaaagaacaaatcatctttgctttctgaaaaattgagattgtattttattaatttcacatgagtttttcatctttggcagcacagctttatgtttttctttaaacagaagctaaaggccagtttcactcacaaagatgccttttctaaattataattttaagtagcataa

SEQ ID NO: 1078 - DNA, 1249 bp, Homo Sapiens
  NM_001039649
cgcgaaaagccgggactggacctcgcggagttgtgcttgtcgccgaagcggggtgggcttgttcgttccgcgcagccgcagccagaaccgggtgacgcttatccccgctgtctttccagtccagggccgctgagagtgggggtggctgggagcagcgcagcctccggaggaggaggcggaggccgaggaccaggaatcaccttcaagcctatgtcgtgaggctttggcagaaattaagaaggaaatatctccattgttcattggcatggaaaaatgttcagtgggaggattagagttgactgaacagactcctgctttattagggaatatggccatggcaactagtctcatggacataggggattcatttggtcatccagcttgtcctttagtcagtagatctaggaactcaccagtggaagatgatgatgatgatgatgatgttgtgtttattgaatctatacaacctccttcaatttctgctccagcaatagctgatcaaagaaacttcatatttgcatcatcaaaaaatgaaaagcctcaaggaaattattctgtaattcctccttcttcaagagatttggcatctcagaaaggaaatataagtgagacaattgttattgatgatgaagaggacatagaaacaaatggaggagcagagaaaaagtcttcctgttttatcgaatggggacttcctggaactaaaaacaaaaccaacgatttggatttctccacttccagtctttcaagaagtaagaccaagactggagtaagaccttttaaccctggtagaatgaatgtggcaggagacttatttcagaatggagaatttgcaactcatcatagtcctgagatgcatctacaaagaaggctaatgtcattcttccagtagaatcaagcaaatccttccaagaattttatagtacatcttgtttgtctccctgtgaaaacaactggaatcttaaaaaaggagtttttaataagtcaagatgtacaatttgtagtaaattagcagaggtctggatttttatacctaagttgttgtttaggctaacagtgataattttaacttttaagtgctattatgtactctttcatctacataatgcacgtgttctggatgtataacatgaagctgaaaggaagaataaggatatgttagaactatcttatgggatattttataaataaaattccatttgcatagcatggaaagtacaaaaaaaaaaaaaaaaaaaaaaaaaaaaaa

SEQ ID NO: 1079 - DNA, 1535 bp, Homo Sapiens
  NM_001039650
cgcgaaaagccgggactggacctcgcggagttgtgcttgtcgccgaagcggggtgggcttgttcgttccgcgcagccgcagccagaaccgggtgacgcttatccccgctgtctttccagtccagggccgctgagagtgggggtggctgggagcagcgcagcctccggaggaggaggcggaggccgaggaccaggaatcaccttcaagcctatgtcgtgaggctttggcagaaattaagaaggaaatatctccattgttcattggcatggaaaaatgttcagtgggaggattagagttgactgaacagactcctgctttattagggaatatggccatggcaactagtctcatggacataggggattcatttggtcatccagcttgtcctttagtcagtagatctaggaactcaccagtggaagatgatgatgatgatgatgatgttgtgtttattgaatctatacaacctccttcaatttctgctccagcaatagctgatcaaagaaacttcatatttgcatcatcaaaaaatgaaaagcctcaaggaaattattctgtaattcctccttcttcaagagatttggcatctcagaaaggaaatataagtgagacaattgttattgatgatgaagaggacatagaaacaaatggaggagcagagaaaaagtcttcctgttttatcgaatggggacttcctggaactaaaaacaaaaccaacgatttggatttctccacttccagtctttcaagaagtaagaccaagactggagtaagaccttttaaccctggtagaatgaatgtggcaggagacttatttcagaatggagaatttgcaactcatcatagtcctgattcttggatctcccagtcagcttcatttcccagtaatcagaaacagccaggggtggattctttatcaccagtggccttacttcgtaagcagaatttccagcctacagcccaacaacaacttactaaaccagctaaaatcacttgtgcaaattgcaaaaagcctttacagaagggacagacagcttatcaacgaaaaggatcagctcacctcttttgctctaccacctgcctttcttccttctctcataaacgtactcaaaacacacgaagcataatatgtaaaaaagatgcatctacaaagaaggctaatgtcattcttccagtagaatcaagcaaatccttccaagaattttatagtacatcttgtttgtctccctgtgaaaacaactggaatcttaaaaaaggagtttttaataagtcaagatgtacaatttgtagtaaattagcagaggtctggatttttatacctaagttgttgtttaggctaacagtgataattttaacttttaagtgctattatgtactctttcatctacataatgcacgtgttctggatgtataacatgaagctgaaaggaagaataaggatatgttagaactatcttatgggatattttataaataaaattccatttgcatagcatggaaagtacaaaaaaaaaaaaaaaaaaaaaaaaaaaaaa

SEQ ID NO: 1080 - DNA, 917 bp, Homo Sapiens
  NM_001039651
ggagggaccagcccgggctgcaccagtgggagtggctccacccttcccacctcagagccatggggagccagggctctggcggggtgcccttggtgcaggctccctacacagtcctgctgctgccgctggggacaagccgccaagacccaggggcccagagcttcttcctttggctacgcaggatgcaggctctggagagagaacaggatgccctgtggcagggtctggagctgctacagcatggccaggcctggtttgaagaccatctgagggaggcacagcgacagcagctgcatctaggggcccttggtgagaattttctaacagatttacactcagagcctggtcgccccccgttagcccagattcaaaaggtgaacatctgtttgcagaatctgattcatgagaagttctccccaagtccactgaacaaggctagttcctgcaccacccaggattcaaaggaaagacgaagggagcagaacttgtggcagcaacaggagttgtcaaggcagcagaaaggagtcacccagccaaaggaggagatggctcagcggggctgcaccaaggggccaagaggccctacccgtgtctaaaccctcctctcactcccctaagcctggtgaaagagtcagaagccccaggctcctttttctgtttcttaactcaacagctaaaaaatggctccaggtagtgagtcaatgaagttcagacatgttggtgtaaagtttctcctctgctcctgaaaacttcatcttcttggtgtctcatgtcctcattctcccctatatgacatgcaaaaacgatctttctttgaaatccctctgggaagaagcatgtttattgaaactgtccttcagccttaaatacaaaaataaaactgaaactgctccagaaagcagctttctccaaaaaaa

SEQ ID NO: 1081 - DNA, 3625 bp, Homo Sapiens
  NM_001039656
acccttcccccttctccaaccgccaacggccgcctgcgcctgaggcccggcccacgccccatcccgctcgctccacgctgcggcagccccggcggccccaggtgcgcggcccccgccatcccgccccgccgccctgcgccatggaggagggccctctgccgggcgggctgcccagccccgaggatgcgatggtgacggagctcttaagccccgagggtccgttcgcttcggagaacatcggcctgaaggcccccgtgaagtacgaggaggacgagttccacgtcttcaaagaagcgtacctgggcccggcggaccccaaggaacccgtcctgcacgcgttcaaccccgcgctgggcgccgactgcaagggccaggtcaaggcgaagctcgcggggggcgacagcgacggcggggagctcctcggggagtaccccgggatcccagagctcagcgcgctggaggacgtcgcgctcctgcaggccccgcagccgcccgcctgcaacgtgcacttcctgtcctcgctgctacccgcgcaccgcagcccggcggtgttgcccctgggcgcctgggtcctggaaggagcctcccacccgggcgtccgcatgatcccagttgaaatcaaggaagcaggtggtactactacaagtaataatccggaagaagcaactttgcagaatcttcttgctcaggaatcctgttgcaagttcccatcgtcccaggaactagaggatgcctcctgctgttctcttaagaaagattccaacccaatggtgatatgccaattgaaagggggcacacaaatgctatgtatagacaattctagaacaagagaactaaaagcactccatttggttcctcagtatcaagatcaaaataattatctacagtcagatgtccctaaaccaatgactgctttagtagggagatttttgccagcatcaacaaaattaaatctcattacacaacaacttgagggagccttaccatcggtagtcaacgggtctgctttcccctcgggatcaactcttccaggaccaccaaaaataactttggctgggtaaggattagaagcaatacattgtcactctaatgtaataatttaagagactcttggatacgttcacgattttcttctatactataaaatgagcttcactgcacaccttcatgacttctgagaaatgtttttaccatcagcaatgccactaacggtgttgctgtctgtgtctggtttcactggggctgcaaaggctgctggaaagtctggcccataacctgcatctgtccctgtcctcctgtccgctgtcctatgttggtgtttctgaggcttgttgccatttatagctctttgtcttcattccatgttgattcaaactgtactggcctctcttttttgctgtcgtccgtggaaataatggtgtggcagccatgcagcatgaacggggggctgcagagtgccctccagctgcctccgcccgctgccttccatgctgagttggctcgagctctatggcaggtgctaatgcatgatctgtcttcacatctccaggtggacataggctgcacttatctgggacctcatcttgctatttcttgcctgtcttgtgtttataatcttgctatttcttgcctgtcttgtgtttataattgttgctaattaaactaatcagctggttgaaattatcaggttaacatttatgtattaacagtggtttgggcaaccctctccattcgttgagccctgtagttgattatggagatcagcatattcctgcctccaagaggtgtttgtttgtttgtttgttttttcttgttttttgtttgtttgtttgttttgtttttttgagacggactcttgctctgtcacccaggctggaatacaatggcatgatctctgctcactgcaacctccgcctcctgggttcaagcaattctccttcctcagcctcccgagtagctgggaccacaggcgcataccactataccaggctaatttttgtattttttagtagagactgggttttaccatgttggccaggctggtcttgaaatactgacctcagatgatccgcccatctcagcctcccaaagtgctgggattacaggcgtgcccggcctgcctgcaggagttctttgggcccacagtctaaggcaaacacataccctgggcctgagagacagcagtcaaacaccttacaggatacagcccgcagcctccagtgctttccaggctcctgcagagttctgccatcgggcatggcttcgtgatggccttggtaagtgtgaggagagtggtttggggctggaatgaaaggccgtgaatctggaaacacactggaaccgatcaacgctatcagccctcatggtcgctgaagggcgttggttgctcctgggcaccgctgcttcagtttctgcagtggctctttcagctgttgtaattctgtgcctaggctgttgacaacttttgctgagttggacagaataagactgtgggccatgctgcttgcttcactctctgggtgtgatggatcggtgagggtgcagttgctatgattgtaattggtcatctcatcatggctgttaacatttctggaccaaacaaaaatgacttcagctacttccagattctgctgatacattacacaggatgatctaaaaggctacagttctgaagatactcatctttcttgtaatctgggggcatctggtcaatagtattgcctctgtgctgtattgtgtctagaacattcaaggacatttgatacttctcatactttaattgcgtgctctcccagttgcagcaccctctgaggcttctatgtgttgcagccgatgggcatttgcacagagcagcagtcatgacagcgttttcagggcagctatttctccttttcccccttttcctctcccccggcttcccattctcctcctcctccttcctcttctcgtcccctcctcctcctctttgttctcctccccctgctcttcttcctctctccttttcctccttctgtgtctatactagattattttcaatcagtcacatgtttttctttattttgaatgttacaaaatatttctctattgtaaacggtgtgccaggaaaaacatgagatgtgtatttgtattttttatgcacataattacttaatccaatgcctctccacttaattgggcctgatgatttttatctcgacatctgcaatactgatgatatactggaatctctaccaatttatttttggtggtaagaaagcagtcagagaacgttttgctggttatttcattccgtgtgagttcccaaccaagactgtcagcccagtgtggttcagccatatctaacctatagaggccatagaagcagttcagcttaggctggaggccagcaggctgagtgtgcgagctgacccgatggtcatttgttagggttggggggtgaactggctaacttattaactagcttatcatattaataaaaactctttaatacaaatccttgtcctgacactctgtagctttaataatcctattaccaatctggtaataaatgtgaattctgacacattgttgatgctactggttttagtaacataatgaacatcataataaagaatattcaagagtc

SEQ ID NO: 1082 - DNA, 894 bp, Homo Sapiens
  NM_001039664
cgggccctgcgggcgcggggctgaaggcggaaccacgacgggcagagagcacggagccgggaagcccctgggcgcccgtcggagggctatggagcagcggccgcggggctgcgcggcggtggcggcggcgctcctcctggtgctgctgggggcccgggcccagggcggcactcgtagccccaggtgtgactgtgccggtgacttccacaagaagattggtctgttttgttgcagaggctgcccagcggggcactacctgaaggccccttgcacggagccctgcggcaactccacctgccttgtgtgtccccaagacaccttcttggcctgggagaaccaccataattctgaatgtgcccgctgccaggcctgtgatgagcaggcctcccaggtggcgctggagaactgttcagcagtggccgacacccgctgtggctgtaagccaggctggtttgtggagtgccaggtcagccaatgtgtcagcagttcacccttctactgccaaccatgcctagactgcggggccctgcaccgccacacacggctactctgttcccgcagagatactgactgtgggacctgcctgcctggcttctatgaacatggcgatggctgcgtgtcctgccccacgtaattcctagctgtcgtgggatggagggaagggcggctgggagcagagcaggggcctggggtggggcaggtgctgctggttcaggaataggaagaggggatagggaggagggagccttggccctgtgatgggtgggccccacttcaggcaaacttagatggcaaaagagcaatctggatccgccttagccagatacataagggtatttgccttcactttcagccagcattccccccagcgatcctagccagatattacagatg

SEQ ID NO: 1083 - DNA, 10697 bp, Homo Sapiens
  NM_001039703
tccctgactccacctcttctgccacaaacgtcagcatggtggtatcagccggcccttggtccagtgagaaggcagagatgaacattctagaaatcaacgagacattgcgcccccagctggcagagaagaaacagcagttcagaaacctcaaagagaaatgttttctaactcaactggccggcttcctggccaaccgacagaagaaatacaagtatgaagagtgtaaagacctcataaaatttatgctgaggaatgagcgacagttcaaggaggagaagcttgcagagcagctgaagcaagctgaggagctcaggcaatataaagtcctagttcactctcaggaacgagagctgacccagctaagggagaagttacgggaagggagagatgcctcccgctcattgtatgagcatctccaggccctcctcactccggatgagccggacaagtcccaggggcaggacctccaagaacagctggctgaggggtgtagactggcacagcaccttgtccaaaagctcagcccagaaaatgacgaagatgaggatgaagatgttcaagttgaggaggctgagaaagtactggaatcatctgcccccagggaggtgcagaaggctgaagagagcaaagtccctgaggactcactggaggaatgtgccatcacttgttcaaatagccacggcccttgtgactccaaccagcctcacaagaacatcaaaatcacatttgaggaagacgaagtcaactcaactctggttgtagacagagaatcctctcatgatgaatgtcaggatgctctaaacattctcccagtccctggccccacctcttctgccacaaacgtcagcatggtggtatcagccggccctttgtccagcgagaaggcagagatgaacattctagaaatcaatgagaaattgcgcccccagctggcagagaagaaacagcagttcagaaacctcaaagagaaatgttttctaactcaactgtccggcttcctggccaaccaacagaagaaatacaaatatgaagagtgcaaagacctcataaaatttatgctgaggaatgagcgacagttcaaggaggagaagcttgcagagcagctcaagcaagctgaggagctcaggcaatataaagtcctggttcacgctcaggaacgagagctgacccagttaaaggagaagttacgggaagggagagatgcctcccgctcattgaatgagcatctccaggccctcctcactccgtatgagccggacaagtcccaggggcaggacctccaagaacagctggctgaggggtgtagactggcacagcaccttgtccaaaagctcagcccagaaaatgacaacgatgacgatgaagatgttcaagttgaggtggctgagaaagtgcagaaatcatctgcccccagggagatgcagaaggctgaagaaaaggaagtccctgaggactcactggaggaatgtgccatcacttattcaaatagccatggctcttatgactccaaccagccacataggaaaaccaaaatcacatttgaggaagacaaagtcgactcaactctcattggctcatcctctcatgttgaatgggaggatgctgtacacattattccagaaaatgaaagtgatgatgaggaagaggaagaaaaagggccagtgtctcccaggaatctgcaggagtctgaagaggaggaagtcccccaggagtcctgggatgaaggttattcgactctctcaattcctcctgaaatgttggcctcgtaccagtcttacagcagcacatttcactcattagaggaacagcaagtctgcatggctgttgacataggcagacatcggtgggatcaagtgaaaaaggaggaccaagaggcaacaggtcccaggctcagcagggagctgctggatgagaaagagcctgaagtcttgcaggactcactggatagatgttattcgactccttcaggttatcttgaactgcctgacttaggccagccctacagcagtgctgtttactcattggaggaacagtaccttggcttggctcttgacgtggacagaattaaaaaggaccaagaagaggaagaagaccaaggcccaccatgccccaggctcagcagggagctgctggaggtagtagagcctgaagtcttgcaggactcactggatagatgttattcaactccttccagttgtcttgaacagcctgactcctgccagccctatggaagttccttttatgcattggaggaaaaacatgttggcttttctcttgacgtgggagaaattgaaaagaaggggaaggggaagaaaagaaggggaagaagatcaaagaaggaaagaagaaggggaagaaaagaaggggaagaagatcaaaacccaccatgccccaggctcagcagggagctgctggatgagaaagggcctgaagtcttgcaggactcactggatagatgttattcaactccttcaggttgtcttgaactgactgactcatgccagccctacagaagtgccttttatgtattggagcaacagcgtgttggcttcgctgttgacatggatgaaattgaaaagtaccaagaagtggaagaagaccaagacccatcatgccccaggctcagcagggagctgctggatgagaaagagcctgaagtcttgcaggactcactggatagatgttattcgactccttcaggttatcttgaactgcctgacttaggccagccctacagcagtgctgtttactcattggaggaacagtaccttggcttggctcttgacgtggacagaattaaaaaggaccaagaagaggaagaagaccaaggcccaccatgccccaggctcagcagggagctgctggaggtagtagagcctgaagtcttgcaggactcactggatagatgttattcaactccttccagttgtcttgaacagcctgactcctgccagccctatggaagttccttttatgcattggaggaaaaacatgttggcttttctcttgacgtgggagaaattgaaaagaaggggaaggggaagaaaagaaggggaagaagatcaaagaaggaaagaagaaggggaagaaaagaaggggaagaagatcaaaacccaccatgccccaggctcagcagggagctgctggatgagaaagggcctgaagtcttgcaggactcactggatagatgttattcaactccttcaggttgtcttgaactgactgactcatgccagccctacagaagtgccttttatgtattggagcaacagcgtgttggcttcgctgttgacatggatgaaattgaaaagtaccaagaagtggaagaagaccaagacccatcatgccccaggctcagcagggagctgctggatgagaaagagcctgaagtcttgcaggactcactggatagatgttattcgactccttcaggttatcttgaactgcctgacttaggccagccctacagcagtgctgtttactcattggaggaacagtaccttggcttggctcttgacgtggacagaattaaaaaggacgaagaagaggaagaagaccaagacccaccatgccccaggctcagcagggagctgctggaggtagtagcgcctgaagtcttgcaggactcactggatagatgttattcaactccttccagttgtcttgaacagcctgactcctgccagccctatggaagttccttttatgcattggaggaaaaacatgttggcttttctcttgacgtgggagaaattgaaaagaaggggaaggggaagaaaagaaggggaagaagatcaaagaaggaaagaagaaggggaagaaaagaaggggaagaagatcaaaacccaccatgccccaggctcagcagggagctgctggatgagaaagggcctgaagtcttgcaagactcactggatagatgttattcaactccttcaggttgtcttgaactgactgactcatgccagccctacagaagtgccttttatgtattggagcaacagcgtgttggcatggctgttgacatggatgaaattgaaaagtaccaagaagtggaagaagaccaagacccatcatgccccaggctcagcagggagctgctggatgagaaagagcctgaagtcttgcaggactcactgaatagatgttattcgactccttcaggttatcttgaactgcctgacttaggccagccctacagcagtgctgtttactcattggaggaacagtaccttggcttggctcttgacgtggacagaattaaaaaggaccaagaagaggaagaagacgaagaccaagacccaccatgccccaggctcagcagggagctgctggaggtagtagagcctgaagtcttgcaggactcactggatagatgttattcaactccttccagttgtcttgaacagcctgactcctgccagccctatggaagttccttttatgcattggaggaaaaccatgttggcttttctcttgacgtgggagaaattgaaaagaaggggaaggggaagaaaagaaggggaagaagatcaaagaaggaaagaagaaggggaagaaaagaaggggaagaagatcaaaacccaccatgccccaggctcagcagggagctgctggatgagaaagggcctgaagtcttgcaggactcactggatagatgttattcaactccttcaggttgtcttgaactgactgactcatgccagccctacagaagtgccttttatgtattggagcaacagcatgttggcttggctgttgacatggatgaaattgaaaagtaccaagaagtggaagaagaccaagacccatcatgccccaggctcagcagggagctgctggatgagaaagagcctgaagtcttgcaggactcactggatagatgttattcgactccttcaggttatcttgaactgcctgacttaggccagccctacagcagtgctgtttactcattggaggaacagtaccttggcttggctcttgacgtggacagaattaaaaaggaccaagaagaggaagaagaccaaggcccaccatgccccaggctcagcagggagctgctggaggtagtagagcctgaagtcttgcaggactcactggatagatgttattcaactccttccagttgtcttgaacagcctgactcctgccagccctatggaagttccttttatgcattggaggaaaaccatgttggcttttctcttgacgtgggagaaattgaaaagaaggggaaggggaagaaaagaaggggaagaagatcaaagaaggaaagaagaaggggaagaaaagaaggggaagaagatcaaaacccaccatgccccaggctcagcagggagctgctggatgagaaagggcctgaagtcttgcaggactcactggatagatgttattcaactccttcaggttgtcttgaactgactgactcatgccagccctacagaagtgccttttatgtattggagcaacagcatgttggcttggctgttgacatggatgaaattgaaaagtaccaagaagtggaagaagaccaagacccatcatgccccaggctcagcagggagctgctggatgagaaagagcctgaagtcttgcaggactcactggatagatgttattcgactccttcaggttatcttgaactgcctgacttaggccagccctacagcagtgctgtttactcattggaggaacagtaccttggcttggctcttgacgtggacagaattaaaaaggaccaagaagaggaagaagaccaaggcccaccatgccccaggctcagcagggagctgctggaggtagtagagcctgaagtcttgcaggactcactggatagatgttattcaactccttccagttgtcttgaacagcctgactcctgccagccctatggaagttccttttatgcattggaggaaaaccatgttggcttttctcttgacgtgggagaaattgaaaagaaggggaaggggaagaaaagaaggggaagaagatcaaagaaggaaagaagaaggggaagaaaagaaggggaagaagatcaaaacccaccatgccccaggctcagcagggagctgctggatgagaaagggcctgaagtcttgcaggactcactggatagatgttattcaactccttcaggttgtcttgaactgactgactcatgccagccctacagaagtgccttttatgtattggagcaacagcatgttggcttggctgttgacatggatgaaattgaaaagtaccaagaagtggaagaagaccaagacccatcatgccccaggctcagcagggagctgctggatgagaaagagcctgaagtcttgcaggactcactggatagatgttattcgactccttcaggttatcttgaactgcctgacttaggccagccctacagcagtgctgtttactcattggaggaacagtaccttggcttggctcttgacgtggacagaattaaaaaggaccaagaagaggaagaagaccaaggcccaccatgccccaggctcagcagggagctgctggaggtagtagagcctgaagtcttgcaggactcactggatagatgttattcaactccttccagttgtcttgaacagcctgactcctgccagccctatggaagttccttttatgcattggaggaaaaccatgttggcttttctcttgacgtgggagaaattgaaaagaaggggaaggggaagaaaagaaggggaagaagatcaaagaaggaaagaagaaggggaagaaaagaaggggaagaagatcaaaacccaccatgccccaggctcagcagggagctgctggatgagaaagggcctgaagtcttgcaggactcactggatagatgttattcaactccttcaggttgtcttgaactgactgactcatgccagccctacagaagtgccttttatgtattggagcaacagcatgttggcttggctgttgacatggatgaaattgaaaagtaccaagaagtggaagaagaccaagacccatcatgccccaggctcagcagggagctgctggatgagaaagagcctgaagtcttgcaggactcactggatagatgttattcgactccttcaggttatcttgaactgcctgacttaggccagccctacagcagtgctgtttactcattggaggaacagtaccttggcttggctcttgacgtggacagaattaaaaaggaccaagaagaggaagaagaccaaggcccaccatgccccaggctcagcagggagctgctggaggtagtagagcctgaagtcttgcaggactcactggatagatgttattcaactccttccagttgtcttgaacagcctgactcctgccagccctatggaagttccttttatgcattggaggaaaaccatgttggcttttctcttgacgtgggagaaattgaaaagaaggggaaggggaagaaaagaaggggaagaagatcaaagaaggaaagaagaaggggaagaaaagaaggggaagaagatcaaaacccaccatgccccaggctcagcagggagctgctggatgagaaagggcctgaagtcttgcaggactcactggatagatgttattcaactccttcaggttgtcttgaactgactgactcatgccagccctacagaagtgccttttatgtattggagcaacagcatgttggcttggctgttgacatggatgaaattgaaaagtaccaagaagtggaagaagaccaagacccatcatgccccaggctcagcagggagctgctggatgagaaagagcctgaagtcttgcaggactcactggatagatgttattcgactccttcaggttatcttgaactgcctgacttaggccagccctacagcagtgctgtttactcattggaggaacagtaccttggcttggctcttgacgtggacagaattaaaaaggaccaagaagaggaagaagaccaaggcccaccatgccccaggctcagcagggagctgctggaggtagtagagcctgaagtcttgcaggactcactggatagatgttattcaactccttccagttgtcttgaacagcctgactcctgccagccctatggaagttccttttatgcattggaggaaaaacatgttggcttttctcttgacgtgggagaaattgaaaagaaggggaaggggaagaaaagaaggggaagaagatcaaagaaggaaagaagaaggggaagaaaagaaggggaagaagatcaaaacccaccatgccccaggctcagcagggagctgctggatgagaaagggcctgaagtcttgcaggactcactggatagatgttattcaactccttcaggttgtcttgaactgactgactcatgccagccctacagaagtgccttttatgtattggagcaacagcatgttggcttggctgttgacatggatgaaattgaaaagtaccaagaagtggaagaagaccaagacccatcatgccccaggctcagcagggagctgctggatgagaaagagcctgaagtcttgcaggactcactggatagatgttattcgactccttcaggttatcttgaactgcctgacttaggccagccctacagcagtgctgtttactcattggaggaacagtaccttggcttggctcttgacgtggacagaattaaaaaggaccaagaagaggaagaagaccaaggcccaccatgccccaggctcagcagggagctgctggaggtagtagagcctgaagtcttgcaggactcactggatagatgttattcaactccttccagttgtcttgaacagcctgactcctgccagccctatggaagttccttttatgcattggaggaaaaacatgttggcttttctcttgacgtgggagaaattgaaaagaaggggaaggggaagaaaagaaggggaagaagatcaaagaaggaaagaagaaggggaagaaaagaaggggaagaagatcaaaacccaccatgccccaggctcagcagggagctgctggatgagaaagggcctaaagtcttgcaggactcactggatagatgttattcaactccttcaggttgtcttgaactgtgtgactcatgccagccctacagaagtgccttttatgtattggagcaacagcgtgttggcttggctgttgacatggatgaaattgaaaagtaccaagaagtggaagaagaccaagacccatcatgccccaggctcagcagggagctgctggatgagaaagggcctgaagtcttgcaggactcactggatagatgttattcgactccttcaggttgtcttgaactgtgtgactcatgccagccctacagaagtgccttttacatattggagcaacagcgtgttggcttggctgttgacatggatgaaattgaaaagtaccaagaagtggaagaagaccaagacccatcatgccccaggcttagcagggagctgctggatgagaaagagcctgaagtcttgcaggactcactggatagatgttattcgactccttcaggttatcttgaactgcctgacttaggccagccctacagcagtgctgtttactcattggaggaacagtaccttggcttggctcttgacgtggacagaattaaaaaggaccaagaagaggaagaagaccaaggcccaccatgccccaggctcagcagggagctgctggaggtagtagagcctgaagtcttgcaggactcactggatagatgttattcaactccttccagttgtcttgaacagcctgactcctgccagccctatggaagttccttttatgcattggaggaaaaacatgttggcttttctcttgacgtgggagaaattgaaaagaaggggaaggggaagaaaagaaggggaagaagatcaaagaaggaaagaagaaggggaagaaaagaaggggaagaagatcaaaacccaccatgccccaggctcagcagggagctgctggatgagaaagggcctgaagtcttgcaggactcactggatagatgttattcaactccttcaggttgtcttgaactgtgtgactcatgccagccctacagaagtgccttttatgtattggagcaacagcatgttggcttggctgttgacatggatgaaattgaaaagtaccaagaagtggaagaagaccaagacccatcatgccccaggctcagcagggagctgctggatgagaaagagcctgaagtcttgcaggactcactggatagatgttattcgactccttcaggttatcttgaactgcctgacttaggccagccctacagcagtgctgtttactcattggaggaacagtaccttggcttggctcttgacgtggacaaaattgaaaagaaggggaaggggaaaaaaagaaggggaagaagatcaaagaaggaaagaagaaggggaagaaaagaaggggaagaagatcaaaacccaccatgccccaggctcaacggcgtgctgatggaagtggaagagcgtgaagtcttacaggactcactggatagatgttattcgactccgtcaatgtactttgaactacctgactcattccagcactacagaagtgtgttttactcatttgaggaacagcacatcagcttcgccctttacgtggacaataggttttttactttgacggtgacaagtctccacctggtgttccagatgggagtcatattcccacaataa

SEQ ID NO: 1084 - DNA, 2171 bp, Homo Sapiens
  NM_001039708
gacggcccaaggcgttcaggcacgcgctttcggtgctcggagcggaagcagcggcgagaggctcggaggcgcgggggcggccgagcggcgggcgacgggggcgggcgacgggggcgggcgacgcgggccgcggcacgggcggagccggggccatggagccgccgctgccgggctaggcaggtcgtgccccgccgggccggcggcgatgtcgggctaccagcgccgcccgggcgccaccccgctgtcccgagcccggagcctcgccattcccgacgatgacagatttgaagatctggaagaggcaaatccattctcttttagagagtttctgaagaccaagaacctcggcctctcgaaagaggatccggccagcagaatttatgcaaaggaagcctcgaggcattccctgggacttgaccacaactccccaccctcccaaaccggcgggtatggcctggagtatcagcagccatttttcgaggatccgacaggggctggtgacctcctggatgaggaggaggatgaggacaccggatggagtggggcctacctgccgtccgccatcgagcagactcaccccgagagggtccctgccggcacgtcgccctgcagcacatacctttcctttttctccaccccgtcggagctggcagggcctgagtctctgccctcgtgggcgttgagtgacactgattctcgcgtgtctccggcctctccggcagggagtcctagcgcagactttgcggttcatggagagtctctgggagacaggcacctgcggacgctgcagataagttacgacgcactgaaagatgaaaattctaagctgagaagaaagctgaatgaggttcagagcttctctgaagctcaaacagaaatggtgaggacgcttgagcggaagttagaagcaaaaatgatcaaggaggaaagcgactaccacgacctggagtcggtggttcagcaggtggagcagaacctggagctgatgaccaaacgggctgtaaaggcagaaaaccacgtcgtgaaactaaaacaggaaatcagtttgctccaggcgcaggtctccaacttccagcgagagaatgaagccctgcggtgcggccagggtgccagcctgaccgtggtgaagcagaacgccgacgtggccctgcagaacctccgggtggtcatgaacagtgcacaggcttccatcaagcaactggtttccggagctgagacactgaatcttgttgccgaaatccttaaatctatagacagaatttctgaagttaaagacgaggaggaagactcttgaggacccctgggtgttctcagcatgaagctccgtgtataccctgaggtcaccaccgctcgatctaaatgtgcagttgtgtccttaaatatgcagtcttcacccagagtaaagtgttgatcgcaagagtccagtgtcgtgccctcagccagttcttggccaccacaatgggagcagccctggccgagttgtctctgtggtttctatgcagcccttcttggcgaaattcctgcgatcttatagattctaatgagctcttggaagacattgtcataaaagccagtgattttaagaaaaagagtggttctggaatcaatgttttccagtcccatcccagaacatcagttgtaagataagtacaattggttgtccttgatttcataagtagaacaaacactaaatgtgcctctgagatggccaccccgggcagggacctgtgccttccgccgatgctcagggctccctctggctcccgggtcactcttgtggccccagtgggtggtccctgcagtcatggcctgagtgcgcaggggccaccgcgtggctgctgctgtcctcctccgggacccacggggaccaaggtcacacgttccgtgctgtgaagctgtccagatgtgcctctttggctgggggttctggtggacgtttcaagtggcattttgtacaatgcaggttagaattcaggaatttcaagtatgtgcccgggtctgtcaggtcccagttgcctttctgacggcccccctcagagggacggcgatgagcactaaatgcttttttgactattttcctatagattttttttaaaacttttttttcctcctgttccaattgatagctttcttatttaataaattctgtagttcaccgcaaaaaaaaaaaa

SEQ ID NO: 1085 - DNA, 2300 bp, Homo Sapiens
  NM_001039712
aggaaagtggagggggaggcggtggcgacgtccagcctgagaacctcaagagagggaggtgacgggacgctgagaggaagagacctgggaaattaagtttcttgcggagtacggtggggattgcagctgctgagcagggattctggaaagcattgcgtacctgagcccccagcatggcgggcctaaagcggcgggcaagccaggtgtggccagaagagcatggtgagcaggaacatgggctgtacagcctgcaccgcatgtttgacatcgtgggcactcatctgacacacagagatgtgcgcgtgctttctttcctctttgttgatgtcattgatgaccacgagcgtggactcatccgaaatggacgtgacttcttattggcactggagcgccagggccgctgtgatgaaagtaactttcgccaggtgctgcagctgctgcgcatcatcactcgccacgacctgctgccctacgtcaccctcaagaggagacgggctgtgtgccctgatcttgtagacaagtatctggaggagacatcaattcgctatgtgacccccagagccctcagtgatccagaaccaaggcctccccagccctctaaaacagtgcctccccactatcctgtggtgtgttgccccacttcgggtcctcagatgtgtagcaagcggccagcccgagggagagccacacttgggagccagcgaaaacgccggaagtcagtgacaccagatcccaaggagaagcagacatgtgacatcagactgcgggttcgggctgaatactgccagcatgagactgctctgcagggcaatgtcttctctaacaagcaggacccacttgagcgccagtttgagcgctttaaccaggccaacaccatcctcaagtcccgggacctgggctccatcatctgtgacatcaagttctctgagctcacctacctcgatgcattctggcgtgactacatcaatggctctttattagaggcacttaaaggtgtcttcatcacagactccctcaagcaagctgtgggccatgaagccatcaagctgctggtaaatgtagacgaggaggactatgagctgggccgacagaaactcctgaggaacttgatgctgcaagcattgccctgacctattccctcttctcactttggggactgttcccatcacccacctctggagcttacactgttctggggtttgttctctacccttccaaccaatcacacccctgcctttttttttttttttttaaagaaaaagacaaaagaaagtggaagtggtattccccacccctccctgcacccatgtgcctgggcttcccctttatttcccttttccatttaccccgtaatgtgtctctacagctaccttaccactgagccgtaagacaaatgtataggaagaagcaaagtctacagcacatagtctttgtaagggattgatgtgaacacttttttttggatgcactaaggagttatcaatacttctggctttatgagagctcttaaattttgtctaaaaaaccaaagggctgtgagtaagggagctatgtggaaagtgggactctgaagtgtattttgaaaattaatcgccaccctcttccaaattatagaattttttaaaaacaagctgtggccctttccactctctcctggcctctggtgctgctcctctctgccgcctttcctccattccatggcttgaaacctctgcctgatgtggctccttcctttttcccatttgtcaaaccctcttcaaaggaggaacagataagactgggtcagcctagtcatgcctcccaactgtggtggtatatgtgtacacacatacacagggtggatggagaagaggttgctgattaaaatacactccccctataaaggggaagggggagtgtgacactttctttccatgttcaagtgaaaataaataatgtaccctgcagcccttttcccctttgctttcttctggcttgggcaaagggcatcataggtgtaagtgaagtaattcctttttccttccccctcctccactcctacgcccactcccatgcttgggagaatggggctgggacatgcactgagtgttgcacttttatttaggtagggaggcatgttgaatgagccaggaggtctagaactggagcttagtccagctggtacaataccaactccccttctagttcccaaaggcgatgtccagacacagactttatgattattatatttttcaatgccagtgctgctcagccctcagcagaacttcagtttccatgaaataaacaatgactatataaaa

SEQ ID NO: 1086 - DNA, 2200 bp, Homo Sapiens
  NM_001039717
agcgcagggcgaaaggaggctgtgtcctcagcctcctccctcggcacgcgcctcccatcctgacggggactgagagcccaggagagctcggggcgtgtccaaactgccgcgccgccctgctccgggtttgtcttcctccctccgtttctccttccgctgtatctagcatttcggttcctggaaaggttaccggagctgcgattggggctgggaccaaagttgagtcctggaaagggagcctggagagcggcggtgctgggaggcccggccagctcgatcgcaggcttccacctggcggccaatgcttgtttgctactgatgggtgtgagcaagttagatattctataccggagacttctcctaacaaaactttttatcagaggatggggaaggccagaagatctcaaaagactctttgaattcagaaagatgattggaaatcgggaaagatgccagaatctggtttcaagcgattatccagtacacattgataagattgaagagcaatcagattgtaagatcttagatggacactttgtttcccccatggctcactatgtgcctgatatcatgccaattgaatctgttattgcaaggttccaatttattgtgcctaaagaatggaacagcaaatatagacctgtatgcattcatcttgctggaacaggagatcatcattactggaggcgacgaacactaatggcccgtcctatgattaaagaagcccgaatggcttctttattgttagaaaacccttattatggctgcaggaaacccaaggaccaagtaaggtccagcttaaaaaatgtgtccgacctttttgtgatgggaggagctcttgttttagaatctgcagctctcttgcactggctagagagggaaggttacggccctttaggaatgactggaatatccatgggaggacacatggcttccttagcggtatccaactggcctaagcccatgccattgattccatgcctgtcttggtccacagcatctggggtcttcactacgacagattctttcaaaatgggacaagagtttgtgaaacacttcactagcagtgcagacaagctaactaaccttaatctggtttccagaactttaaatttagatatatcaaaccaagttgtatcccaaaaacctgctgactgccataattctagcaaaacatctgtcagtgcgacatcagaaggactcttattgcaagatacctctaagatgaagcgcttcaatcaaacactttcaaccaacaaaagtggttatacaagtcgcaaccctcagtcataccacctacttagtaaagaacaaagcagaaacagtcttcggaaagagtctttaatatttatgaaaggagtcatggatgaatgtactcatgtagcaaatttctcagtcccagttgatccaagcctcattatagtggttcaagccaaagaagatgcctatattccacgaacaggagttcgaagtttacaagaaatttggcctggttgtgaaatccgatacttagaagggggtcatattagtgcttatctttttaaacaaggactcttcaggtaagacggctggtctaaacatgtattcgttcatttgttgtttgttttctggattttttgcttcaacaaatgtaaaagatcacatatttttatagtctgtttcaatctttgaattccctcctcacctcccacaaatctcacagagttacttttccctctttcctagaatttgatcttcttattttcttctagagaactaagcatgatgcatattataggcatgctttatcgtgtggctttcccctcttcaaatattaatggccaggtattttaggatgtgagaaggaagatcatggcttgttaaagttgctttggtgcatcaagagttttttcactctattctgatgttttttcagaatggcctgaacatctgtggaataatttagcaatgtttttcagttagcaagtgaatattgaaccttaaataagaagtgcttttaatgtgaacaaccttatatgactccactattttagttagaacttataaaaacttttatgctggctgggcgcggtggcttacgcctgtaatcccagcactttgggaggcggaggcgggtgtatcacgaggtcaggagatcaaggccatcctggctaacacggtgaaaccccgtctctagtaaaaatacaaaaaaaaaaaaaaa

SEQ ID NO: 1087 - DNA, 1602 bp, Homo Sapiens
  NM_001039725
atggaagaacaggtgttcaagggggacccggacacccctcactccatctccttctcgggcagtggattcctctccttctaccaggcgggggctgtggacgccctgcgggacctggccccccggatgctggaaacagcccaccgctttgcggggacatcggcaggtgctgtgatcgccgccctggccatctgcgggattgaaatggatgagtatctcagagtcctcaacgtgggtgtggccgaggtgaagaaatccttcctggggcccttgtccccgtcctgtaagatggtgcagatgatgaggcagtttctgtaccgggtcctgcccgaggactcctacaaggtcaccacggggaagctccatgtgagcctcacccgcttaacggacggggagaatgtggtggtttcagagttcacgtccaaggaggagctcattgaggcagccctatactgcagctgcttcgtcccggtgtactgtggcctcatccccccgacttaccgcggtgtgaggtacatcgatgggggcttcacgggcatgcagccctgtgccttctggaccgacgccatcaccatctccaccttcagtgggcagcaggacatctgtccccgggactgcccggccatcttccacgacttccgcatgttcaactgctccttccagttctccctggagaacatcgccaggatgacccacgcattgttccccccggacctggtgatcctgcacgattactactaccgagggtacgaggatgcagttttgtacttgaggcggctgaatgctgtttatcttaattcttcctccaagagagtgattttcccccgggtggaagtgtactgccagatagaactcgcccttggcaatgagtgccctgaacgcagtcaaccaagccttcgagcacggcaggccagtctggaaggagccacacaacctcacaaggagtgggttcccaaaggggatggaaggggcagccatggtccgcctgtgtcccaacctgtgcagacacttgaattcacatgcgagtcacctgtttcagcaccagtctctccacttgagcagccacctgcacagccactggcctcttcaactccactttctctaagtggcatgccacctgtatcattcccagctgtgcacaagccacccagctccacacctggttcatcactgcccaccccaccacctggactgtcacctctgtcacctcagcagcaggtacaaccgtctggatcaccagccagatccctacactctcaggcacccacttcacccaggccatccctggggccttcaactgtgggggcacctcaaacactgccccgaagttctctttcagccttccctgctcagccacctgtggaggaactaggccaagaacagccccaagctgtagctcttcttgtctcttcaaaaccaaaaagcgccgtgcctctggttcatgtgaaggaaaccgtcagcaagccttatgtaacggagagccctgctgaagactcaaactgggtgaataaggtcttcaagaagaacaagcaaaagacaagtggcaccagaaaaggcttcccaagacattcgggatccaaaaaaccaagcagcaaagtgcagtga

SEQ ID NO: 1088 - DNA, 2360 bp, Homo Sapiens
  NM_001039771
gggctgttgatttgtgggggattttgaagagaggaagagtaggaggaaggggttgaggggctgcctctggcatatgcacacactcacacattctgtcacacccgtcacacacacataccatgttctccatccccccaggtccagccctcagtgctgtcccatccagcagggctgccctgaagctctggctgcagccctcccgtccagtgggcaggcggcttcatccctcctttctctcccaaagcccaactgctgtcactgcatgctctgccaaggaggagggaactgcagtgacagcaggagtaagagtgggaggcaggacagagctgggacacaggtatggagagggggttcagcgagcctagagagggcagacgatcagggtgccggcggtgagaatccagggagaggagcggaaacagaagaggggcagaagaccggggcacttgtgggttgcagagcccctcagccatgttgggagccaagccacactggctaccaggtcccctacacagtcccgggctgcccttggttctggtgcttctggccctgggggccgggtgggcccaggaggggtcagagcccgtcctgctggagggggagtgcctggtggtctgtgagcctggccgagctgctgcaggggggcccgggggagcagccctgggagaggcaccccctgggcgagtggcatttgctgcggtccgaagccaccaccatgagccagcaggggaaaccggcaatggcaccagtggggccatctacttcgaccaggtcctggtgaacgagggcggtggctttgaccgggcctctggctccttcgtagcccctgtccggggtgtctacagcttccggttccatgtggtgaaggtgtacaaccgccaaactgtccaggtgagcctgatgctgaacacgtggcctgtcatctcagcctttgccaatgatcctgacgtgacccgggaggcagccaccagctctgtgctactgcccttggaccctggggaccgagtgtctctgcgcctgcgtcgggggaatctactgggtggttggaaatactcaagtttctctggcttcctcatcttccctctctgaggacccaagtctttcaagcacaagaatccagcccctgacaactttcttctgccctctcttgccccagaaacagcagaggcaggagagagactccctctggctcctatcccacctctttgcatgggaccctgtgccaaacacccaagtttaagagaagagtagagctgtggcatctccagaccaggcctttccacccacccacccccagttaccctcccagccacctgctgcatctgttcctgcctgcagccctaggatcagggcaaggtttggcaagaaggaagatctgcactactttgcggcctctgctcctccggttcccccaccccagcttcctgctcaatgctgatcagggacaggtggcgcaggtgagcctgacaggcccccacaggagcccagatggacaagcctcagcgtaccctgcaggcttcttcctgtgaggaaagccagcatcacggatctcagccagcaccgtcagaagctgaaccagcaccgtatgggctagggtgggaggctcagccacaggcagaagggtgggaagggcctggagtctgtggctggtgaggaaggaaggagggtgtattgtctagactgaacatggtacacattctgcatgtatagcagagcagccagcaggtagcaatcctggctgtccttctatgctggatcccagatggactctggcccttacctccccacctgagattagggtgagtgtgtttgctctggctgagagcagagctgagagcaggtatacagagctggaagtggaccatggaaaacatcgataaccatgcatcctcttgcttggccacctcctgaaactgctccacctttgaagtttgaactttagtccctccacactctgactgctgcctccttcctcccagctctctcactgagttatcttcactgtacctgttccagcatatccccactatctctctttctcctgatctgtgctgtcttattctcctccttaggcttcctattacctgggattccatgattcattccttcagaccctctcctgccagtatgctaaaccctccctctctctttcttatcccgctgtcccattggcccagcctggatgaatctatcaataaaacaactagagaatggtggtcagtgagacactatagaattactaaggagaagatgcctctggagtttggatcgggtgttacaggtacaagtaggtatgttgcagaggaaaataaatatcaaactgtatactaaaattacattttaaaaaaaaaaaaaaaaaa

SEQ ID NO: 1089 - DNA, 2308 bp, Homo Sapiens
  NM_001039802
acttccgcgggcacccaactgtgcgtctcctgcgcgctgacgtcaggtgcgtgcccctgtccggcagccgaggagaccccgcgcagtgctgccaacgccccggtggagaagctgagacggagtctcactgtgttgcccaggctggagtgcagtggcgccatcttggctcactgcagtgcgcctctgccccccgagttcaagcgattctcctgcctcaggctcctgagtagctgggactacaggtcatcatcagatttgaaatatttaaagtggatacaaaactatttcagcaatgcagacaattaagtgtgttgttgtgggcgatggtgctgttggtaaaacatgtctcctgatatcctacacaacaaacaaatttccatcggaatatgtaccgactgtttttgacaactatgcagtcacagttatgattggtggagaaccatatactcttggactttttgatactgcagggcaagaggattatgacagattacgaccgctgagttatccacaaacagatgtatttctagtctgtttttcagtggtctctccatcttcatttgaaaacgtgaaagaaaagtgggtgcctgagataactcaccactgtccaaagactcctttcttgcttgttgggactcaaattgatctcagagatgacccctctactattgagaaacttgccaagaacaaacagaagcctatcactccagagactgctgaaaagctggcccgtgacctgaaggctgtcaagtatgtggagtgttctgcacttacacagaaaggcctaaagaatgtatttgacgaagcaatattggctgccctggagcctccagaaccgaagaagagccgcaggtgtgtgctgctatgaacatctctccagagccctttctgcacagctggtgtcggcatcatactaaaagcaatgtttaaatcaaactaaagattaaaaattaaaattcgtttttgcaataatgacaaatgccctgcacctacccacatgcactcgtgtgagacaaggcccataggtatggccccccccttccccctcccagtactagttaattttgagtaattgtattgtcagaaaagtgattagtactatttttttttgttgtttcaaaaaaaaaatttttgtgtgtgtgtgttttttttttttttttttttgttgtttaaaagcaaggcatgcttgtggatgactctgtaacagactaattggaattgttgaagctgctccctggttccactctggagagtaatctgggacatcttagtgttttgttttgtttttttccctcctcttttttttgggggggagtgtgtgtggggtttgttttttagtcttgtttttttaattcattaaccagtggttagcccttaaggggaggaggacggattgattccacattccacttcctagatctagtttagaaaacatgttccccatctggtgctcttaggaaggagtatagtaaatgcctcatttaataacatactcctttttgaaagttgccttttctctccacccttgagtagatccagtatttgatgaaactcatgaaagtgggtggagcccatcttgcccctcctcttttctaggacgcactatatgtgactgtgactttcaaggacatttgtttgccatttgctgatttttttgggaagttaatttctaacttctttcactgataaatgaagaaaagtattgcacctttgaaatgcaccaaatgaattgagtttgtaattaaaaaaatttttttccctttcagtcattgtcttatatgcttagcatagatttgcagctcagtagtatatggtgttcctagaatgcagctgaagacctgttatgtagaggaaatacgaggggtggtgctagaagacagacatctgtggaatgattcacatcctctcaagttaggaggatggaggcctgcttcattaagaagctgggggtagggtgggggtggggagaacacttaacaacatggggaccagtcaggggaatccccttatttctgttttgcatatgaggaaccctagagcagccaggtgaggctctctagtttaataaaaatcatggaaagactcttaatgcagactcttcttaagtgttaatagggattttttcagcttattttggttgcagtttccaatttttaaaaatgttgaggtaatctttcccaccttcccaaacctaattcttgtagatgcattagtgttgaaccaatgctttctcatgtctcaattctttgtatatgcattcttttcagatgtattaaacaaacaaaaacccttcaaaaaaaaaaaaaaa

SEQ ID NO: 1090 - DNA, 635 bp, Homo Sapiens
  NM_001039842
gtccgcgggcgatgctgctgcggagggtggtcgagggaggccgggcggtagccgccgcggtccgtggctcgggggctcgccggttctccagcccggactgctgccagaggcttcctggaggtggcagctttcttcaaaggcaccatcccggagcgcaagcccctgatgggcgcagaaaattcgggacagaccacgtagaggtgggctcccaagcaggtgcggacggcaccaggccgcccaaggcatcgctgccacctgagctccagccgcccacaaactgctgcatgagtggctgccccaactgcgtgtgggtggagtacgcggacaggctgctgcagcacttccaggacggtggggagcgggccctggctgccctggaggagcacgtggctgatgagaacctcaaggccttcctcaggatggagatccggctgcacaccaggtgcggaggctgagccatccctgctggactccctaccgcaggacggagtccaggacgcagccgcagcctccttccttcacaccccctcacagactccttgtgtccaacgggaataggaagaattagttactgacttcacctgaaaaaaaaataaattctctatggtggtttcacaggaaaaaaaaaaaaaaaa

SEQ ID NO: 1091 - DNA, 3612 bp, Homo Sapiens
  NM_001039888
agcgagtacgcccggaaccgaagcttgcgaagcgggtcgcagagagagatgggcgttgcagaatcagctggggtcacttatttccggtctcactccagatgaaggagccactagccggcgagagttcaccgagggaacgtgacactcatatctcatcgagggaccgtgttgagggagcccctacagagaggccaaaggaggagagggcctacggagaaatgaacctctgtaaaagctgctctttagggatcagtctttttgtgactctagcttcatagcttggtctctccattactccagccttcctttcaatcatacactgcctctctccagcaccaccaatggatacttcttttctaaaaatgtttttctgtgggttgctgccgtgtctgtgagaagctggacacaaactcattcctaaaatatgtggatggaagctatggtaaccatggagacagggcaggtggcaaggagaggcagagacagtgtgagagaccaatagacagataggaagagagaagatataaggaatgtttcagacagagatcgtcaagcaagatggaaaaaataagacgtctaagcaagactgagattaaagagatgcaatgtgagagagtgtattacaagtgtgccatgtgccgtgtatggcaggtcaggtctggcgcacaggagcgcacaaacacaccaagtgcggagaatggggatctgctgaatctcagcgaagaatctggatgatggtccctgtctgggtcgcggaggagtcccctaaggaacacttaggtttgttggggctgaggggaggtcggctgagaaaaggaagtcaggattggagcctctaggtttttgagggtttatgtgtgcatgagtgggggagcagtttggtgcctgacgcccccacccgcagtgactaggctataaatagcacagcagagctccgccccccccccccccccccccgccaagcttctctcctcccgagccggcgctgtgcccggggcgctccgggaggagggaccaggatccggcgccggggcgcagatactgacaccaagggaatccgggtgccccccccccccacgccatgcgggcccccaggaaactggctccgccacctcggctgccccgtggccacggccccaatcctggccaggcggagattctgcggacattcagggatcggcttcgtcactgagacctcaggcctctgccagccactccccctccccatacccctagtcatcctcggcaggtctcagtcccggctccatctgtgccctcgccccagccgcagctatgttgcacaccgagggccacgctcttcttcgggcggtgggtcagggtaagctacgcttggcccgtttgcttctggagggaggcgcctacgtgaatgagggtgatgcgcagggggagactgcgctaatggcagcctgtcgggcccgctacgacgacccccagaacaaggcacgcatggtacgctacctcctggagcaaggcgcggaccccaatatcgcagaccgattagggcgcacggcgctcatgcacgcttgcgccgggggtgggggcgccgcggtggcctcgctgctccttgcccacggcgcagacccctcagtccgagatcacgcgggcgcctcggctcttgtccacgccctggaccgcggggaccgcgagacccttgccacactgctggacgcctgcaaggccaagggtacggaggtcatcatcatcaccaccgatacctcgccctcaggcaccaagaagacccggcagtatctcaattctccaccatccccaggggtggaggaccctgctcccgcctctcctagcccggggttctgcacgtcgccttcggaaatccaactgcagaccgctggaggaggagggcgtgggatgttatcccctcgcgcccaggaagaagaggagaagcgggacgtatttgaattccctcttcctaagccccccgatgacccatccccttccgagccgctccccaaaccaccacgccatcccccaaaaccactcaaaaggctcaactccgagccctggggcctagtggcccctcctcaaccagtcccacccactgaagggagaccggggatcgagcgcttgactgccgaattcaatggcctgaccctgaccggtcgaccccgtctttcccgacgtcacagcaccgaaggccctgaggacccgcccccatgggcggagaaagtgactagcgggggtcctctctctcgccgaaacacagcaccagaagctcaggagtctggtcccccttcagggctgaggcagaaactgagccgcatggagccagtggagctggacacccctggacacctttgccctgactcgcctgagtccagccgcctgtccctggagcgccgccgatacagcgcctccccgttgaccctccctccagccggctcggctccctctccgcgccagtcccaggagagtctgccaggggcagtatctccgctaagcggaaggaggcggagtccggggctgctggagcggaggggctcggggacgttgctcctggaccacatctcgcaaacgcggccgggtttcctaccccctctcaacgtcagtccccaccctcccatccctgacattcgcccacaacccggaggtcgggcgccttcgttgcctgcccctccttatgccggggcgccaggctctcccaggaccaagcgcaaattggtgagacgccactccatgcagactgagcagatccgcctgctggggggcttccagagtctaggtgggcctggggagccagggcgctgagaggagtgagaggagccaaggagggtggggattaggaccttaatgggataggtgggagaaccagctcacacacacaccacgaacaaagggatctcttgcatgtgctcatgggtgcacagtgcacccacacatggttaaacatgtgtccataagcacagtactcttattagcaagaaagaataagtactctatttactgggtatatacacacatgtattcatgccctggtcatttcacatgcatatgggattacttgtgtacctacaggcacagcatatcaataaacacacagggctagggtcccaaactctcttgcatttgttcagaagcagtagggaacccttacttatgggcagtctccgatgtctttgccctcctgcagaagcaatcccttgctttccatgtatgccctgaaacacagcctatcatgattttgcacactctctccgtggacatcccagcccattctgcaggtcttgcttctttctccaggcctggctccttattcacaccctgcttctaaccccaaccacttttcaggatatctttttcactcttcttgggggttcctgcagcaacccccagcctcagttctgctgctgtctttactgctctcaacttcacttctcaacttcctgctttttattcccaccctgttcctccaacaactacaacagattgtctcattttcccagggggtgggtcatgggctctaagctgctcttctgtctgtctgagcttatgaacacccccacaggtagaagtggggagaaaccctaaatcactcctctctccacttgacatatcaaataaatgtgttcagaagtc

SEQ ID NO: 1092 - DNA, 1303 bp, Homo Sapiens
  NM_001039933
ctgcagccggtgcagttacacgttttcctccaaggagcctcggacgttgtcacgggtttggggtcggggacagagcggtgaccatggccaggctggcgttgtctcctgtgcccagccactggatggtggcgttgctgctgctgctctcagcagctgagccagtaccagcagccagatcggaggaccggtaccggaatcccaaaggtagtgcttgttcgcggatctggcagagcccacgtttcatagccaggaaacggggcttcacggtgaaaatgcactgctacatgaacagcgcctccggcaatgtgagctggctctggaagcaggagatggacgagaatccccagcagctgaagctggaaaagggccgcatggaagagtcccagaacgaatctctcgccaccctcaccatccaaggcatccggtttgaggacaatggcatctacttctgtcagcagaagtgcaacaacacctcggaggtctaccagggctgcggcacagagctgcgagtcatgggattcagcaccttggcacagctgaagcagaggaacacgctgaaggatggtatcatcatgatccagacgctgctgatcatcctcttcatcatcgtgcctatcttcctgctgctggacaaggatgacagcaaggctggcatggaggaagatcacacctacgagggcctggacattgaccagacagccacctatgaggacatagtgacgctgcggacaggggaagtgaagtggtctgtaggtgagcacccaggccaggagtgagagccaggtcgccccatgacctgggtgcaggctccctggcctcagtgactgcttcggagctgcctggctcatggcccaacccctttcctggaccccccagctggcctctgaagctggcccaccagagctgccatttgtctccagcccctggtccccagctcttgccaaagggcctggagtagaaggacaacagggcagcaacttggagggagttctctggggatggacgggacccagccttctgggggtgctatgaggtgatccgtccccacacatgggatgggggaggcagagactggtccagagcccgcaaatggactcggagccgagggcctcccagcagagcttgggaagggccatggacccaactgggccccagaagagccacaggaacatcattcctctcccgcaaccactcccaccccagggaggccctggcctccagtgccttcccccgtggaataaacggtgtgtcctgagaaaccacaaaaaaaaaaaaaaaaaaaaaaaaaaaaaaaaaaaaaaaa

SEQ ID NO: 1093 - DNA, 1722 bp, Homo Sapiens
  NM_001039935
gtccaccatcatccttcgggctcatttaacacttactatttctatactgtaaatggcaacaagattttccctacctcaacctgactttgagcaggagctgttgctggctaagcagcctgaacaattcacatgctcagacgcttgtgcttttttcacatggcccctccaggacacctctgcactgggctgcagctgcagggaaggccgaatgtgtccagtcactgctggagttgggaatggacagcaacctgcgggacatcaatgagagcacgcccttggcctatgccctgtactgcggtcacacggcgtgtgtcaaactcctctcccaagagagcagaacagagcctactcgaccccctccctcccagagcagtcggccccagaagaaggagagacggttcaacgtgctcaaccaaatattctgcaaaaacaagaaagaagagcagagagcccatcagaaggatcccagcagggaccgatacagagaggaggacacctcagaagtcaatgacatcatcaccacctttgatagcatcgtgggtaccaactgccaagaacagcctggtgatcaggtggctatggttgaatttaagaagaaaacctcagacaattcaaaatatctcttaccagaaaagaaaccgctggcccgtaaggggcttccaccaatcagaacgcagagtctcccacccatcaccctgggcaataacttcctaacagcctcccatagggccacttcccatgcaggcctgagctctgctcctcatcatatggcccagcgatctcagaaaagtcgaagtgagcaggatttattaaataacagaactggctgccagatgttactagataacccctggaagagtgattctaatcaggtattttcctacaaagtttggactgtgtcttcttctgataagctgctggacagattgctcagtgtccggcctggtcaccaagaggtctccgtgccaccacaccttcgccatctacataatccatcatcaggacaaaattttcagcatctttccccaaacagacacaaaatcagggatcttcctttcactcggaacaacctagctcccctaccagatcaaaaatttctatctggagaacctctgcggacaaaccgagtgcttcctgcaattccaagtcaacgaagacacagcacagcagcagaagagagtgaacattctgccaaccccaccagtgatgaaaattaactgtgggccactcgctgcagaaatgtagatgaatatgtattttcaactctcaaaggacaagattactccagtttgtaagaacgaagaccaatttagtaagctgcattctataagccatcagttttataactcgaaattctttattccaaataaagatactccctaaataagcacttagaatatttgggtgtgcatattaagtctgtgaatttctgtgacttccacatgccaaaattaaaagacaaaatatgttatcagtaggaaaactgagctatgtttggtttgctttgtggcatgtgcactgtttttttgttattgttctttggttgtttttttgctgaatgattttatgttttgggaaaaaaagtacgctttgctgaataaaagcaaaaaacaaaacaaaaaaaaaaccacatcccagacaaacatgtcttcacatttattgtcattctaacttgaactaatgaaacctatttaaaaataaattcctatgatcagtcacaaa

SEQ ID NO: 1094 - DNA, 6973 bp, Homo Sapiens
  NM_001039937
agtagaacggcgaggcggtgtatcacgtggctcggggacgtgtcaggggcggagcctccgcagcccctgcccgagttaaaaccggagtgtgagagagaaaagcgcttcagtagcgagaggggctgagaaagtggtgacaccgccgggacacgtctgcctctatgaaccagcgcagccatctgggcaccacctacctggacacggccaaaggcgcggtagagaccttcatgaagctccgtgcccgggaccctgccagcagaggagacaggtatatgctggtcactttcgaagagccgccctatgctatcaaggctggatggaaagaaaaccatgcaacgtttatgaatgaattgaaaaaccttcaggctgaaggacttacgactcttggccaatccctaaggacagcttttgatttattaaatttaaatagattagtaactggcatagacaactatgggcagggaagaaacccttttttcttggagccagcaataattatcacaattactgatgggagcaagttgactaccaccagtggagtccaggatgagcttcatttacctcttaattctcctttgcctggaagtgaattgaccaaggaaccttttcgttgggatcagagactctttgcattagtgttgcggttgcctggcaccatgtcagtagaatcagaacagttgacaggtgtgcctttagatgactctgcaatcacaccaatgtgtgaagtgacaggcggccgttcatattctgtgtgttctccaagaatgcttaatcagtgtctggagtccttggtgcagaaagtacaaagtggggtggtaataaactttgaaaaagcaggaccagatccttcccctgtagaagatgggcagccagatatatcaaggccttttggatctcagccttggcatagctgtcacaaactcatatatgtcagaccaaatcctaaaactggggttcctataggtcattggcctgttccagagtctttttggccagatcaaaattcgccaacactaccacctcgtacatctcatcctgtagtgaagttttcctgtacagactgtgaaccaatggttattgataaacttccttttgacaaatatgagttggaaccttcaccactgactcaatttatcctggaaaggaaatctcctcaaacatgttggcaggtgtacgtgagcaatagtgcaaaatacagtgaacttggtcatccttttggttacttgaaagccagtacagcactgaactgtgtcaacttatttgtgatgccttacaattatccagtccttcttcccctcttagatgacttgtttaaagtgcataaagcaaaaccaacattgaagtggagacagtcatttgaaagttatttgaagacaatgcctccctactatcttgggcccttgaagaaagctgttaggatgatgggagcacctaacctaatagcagacagtatggaatatggacttagttacagtgtcatttcatacctcaaaaaactgagtcaacaggccaaaatagaatctgatcgagtcattggatctgtaggcaaaaaagtagtacaggagactggaataaaagtccggagccgatcacatggtttatcaatggcatataggaaagattttcaacaactcctccagggaatttcagaggatgtccctcacagactgctagaccttaatatgaaggaatacactgggttccaagttgctttgctgaataaggatttgaagccacagacatttagaaatgcttatgacataccaagacgaaatcttttggatcacttaacaagaatgagatctaatcttttgaagagcactcgcagatttctgaaaggacaggacgaagatcaagtgcacagtgttcctatagcacaaatggggaactaccaggaatacctcaagcaagtaccttctccactaagagaacttgatcctgatcagccacgaaggttgcatacatttggcaacccctttaagctggataagaagggtatgatgatagatgaagcagatgaatttgtggctggacctcaaaataaacataaacgacccggagaaccaaatatgcaagggatccctaaaagacgtcggtgtatgtctccactactaagaggcagacagcagaatcctgttgtaaacaatcatattgggggaaaaggaccacctgcacctacaactcaagcacagccagatcttattaaacctcttcctcttcataaaatttcagaaaccactaatgattcgataatacatgatgtggttgaaaatcatgttgcagaccaactttcatcagacattacaccaaatgctatggatacggaattttcagcatcttctccagccagtttactggaacggccaaccaatcatatggaggctcttggtcatgaccatttaggaaccaatgacctcactgttggtggatttttagaaaatcatgaggagccaagagataaagaacaatgtgctgaagagaacataccagcatcttcactcaacaaaggaaagaaattgatgcattgcagaagccatgaagaggtcaatactgaactaaaagcacaaataatgaaagagatccgaaagccaggaagaaaatatgaaagaatcttcactttactgaagcatgtgcaaggcagtttacaaacaagactaatatttttacaaaatgtcattaaagaagcatcaaggtttaaaaaacgaatgctaatagaacaactggagaacttcttggatgaaattcatcgaagagccaatcagatcaaccatattaatagcaattaaaagaaaatagaatgtggccacttatttcactatcttcttcaaatacaaagtaaatacaagactgttgtgatcttgcattcattttctgacatgcattgttggctatttgaaatactaaaagcaaatctacagatcctttttccatcattttacagtgaccttttcttcattttggtttatttttgtaatgtgaaaagtatcactctaaaaaacatttttaatttaacaaactaaaaatattcctccaaatctcttgcttgtcattgactcttgcgtgtcaatttccctcaggttctattttcttaaaccaacctttaaaattgtcacctctgttaaggttgaactttgccaaaaaaaaaagaagttactttgtaatttttggggaaaaaagcacatacattaaaactaggtaatgttttgtatatacagttattttggatatattattgtaagttgtacaaatgtattttgaagaatatttaagaaaagcacttttgttattccatcaataaatgctctattttactcttgtgtggtttaggaaataatcacatttaaagtaatcatttaaaaacatcctaagataatggaattttaaaggccttgctttttagcattggaaaaatacaccacttgaagttcatgtttgttaagcctaactgtaattacatgttacataatctgcattgcctttttactatatgttcgtagtttttgttggccatgccaacatactcccatttctgcctagattatgggaatgactttgtatggggcagatagacagatactttaaaagctatttaaaaagcaaacaactttggatattattggtttccttacttcaacaccttttcctttatcactaggattgtggatggcacgaagctgaagctgttagggagtggtaggtttggagtacagtacatgctctgaaatatctagcctttagcagcttcatgccatgcttgcaaaagcccacaacaaattggaggcctccttgttctgctctgctgttctcacacttaaactctgttttatttataagctaaatggaaaggaaacacctttaagatgactttgctcattttgcatcccccctgagtttcacaggataaggaaaaccacgctattcattctccaccctcaattcaacatggcctagagtatccgtactgaggaagcaatcttatggcctgactcactcaccattcatgatcactgctgtgccttttagtggtttggggggtaagcagtagaaaagaaggtcaaaatagatttggattaagagtaggcaaaataaacttataacatttaaaaactgaagtatttttaggtttataatattgaaaatcacatacccttagctttttacactttatcagacatttttttaaatttcaagggtatagcaaaatgaaattataactttatgaagaaaagcattgatgaaagtggagaacatgcatttagtctaggggatttgaaactctcccaatactgaagacaaaccctgtcaagaaaaagaagaatttaatattatatagtattttcatatgcagttctttaagctttgtttacttctatacaaatacttttaagtaatgcaagataacatttaatagatggaattgttaaggtaattgcctgtagtcacattgctaaattcattgagagttacacaaaatccagaatatattgtctgttcctaaattatatatatttagattctggaattactaggaggaattagaagtcattcagataaaaattcatacttaacaagagtatctaggaaagagattcagcccatcccaatattgagcagctttccttatcagaaagttttattttctgtttcacagattgctcatgacctttaatacatttttctgaatgaaccctggagggaggtgagaagtagcagttttgttcatctcttctttttgtcctttatctctctgccactgttctcacctcatcctaaaacctggtcaggagggtttgaaacctatcagaactaaaggttaatatctcatctccctcaggcttttttcatttaaaaaaaaaatgggtatattagttaaattagaatacttgttgtagaattattgtcaaaggggaagggaaatacatctaggggaaacatcatgtcttttaggccctttatgtcactgaatgacttaaggctcgacaaatgatattcttggaaagtttaatcttgaggttttcaaatctttttttttaatgtctcccatgtttctcatttgctgattgattcattagttgctcttagtaagatttgtcagttggaaataatgaaggctgagactcatttctaaactcttccataaccatcaccagaagagcagccactgtgttgtgtgatgtaggctaatgcctcccagatagaggtaaagtcacaaggactattagaattccagtggattgtggaactggttttggattatccttatattttcattctgattactgaggcagttctgaaaactcctaccattgaaatagtggtgtgtcttttccttgtttaaggattttacatcatttttatgcacttgaattccaaaatcagaatctctcttttacctatcaacctttattggctattggcttttggcaatgacctttctgttcaaatgtagtcctgtctctttgtttccttagggagtagaacctgtcctttttctcatctttcatttttttgacgtgtcctttctaagagaaggctctctgccgcctgttctgggtgataagtgatattttcatctaatcgttatgtggttgggatgatcatggtgaaatactaggaagacatactctgttgatggactttttctctccaaataatcccaaatagattattttctagtgaatggtttatatctttctcgtcacaaaaatgttcctttgatttctagcacaaggtacagcaggatgcaaatgattctcagataaaatgatgttgacagtatttccttaacaatttatgtaaaactatgcataattttcattctaacttttgacatttttctccataaataaaagtaatgcctgatgtttagttaaagtagatccacctttgcttgattttattagtcttgttctatcctatttctttttaatacactgtttagacttgccaacaactcttaactgagaatctcttttccttcctaggctaagtaattgtgagtgggggaggaagaacattaagagaaataatctaaagactttgttcaatattgtcgaagcctaagaatatttgtgtgtccttctgatgtactgaggctttgccggtaccacaccatctttggattaccataaggttatgtagtaggacttaaaagtactagggcaaacatttgatttttgagaaagatcaacagaacagtatagaaatccaggtgcattcattagaatactaggatcacaagaggactactctggtgtactctagtgacctgaaaaaactctaaaatgataagaaagctaggggacaaagggaaaaaagggcaagatttataatttattttactttcatgatttttccaagtgtcttcagaagtagaaacctatagcattaaaaaaaaaaatctacattaactatatatgagctgagagaatgagaaggtaaaaaacatggaggataagtttcctttgtacttacgaaatagtcccctttcttaggatagaagatagcaactgggtagcttctgaagcaccataaaaacagctagaaagaatgcttatttttgaggggatagtggacaaatgagcccttgttgctagagagacactgataaattatctgaatcctgtcaaaaaatactgtaatacctgtgttaggttctctcaggaaatagatgaatggccgatctgctttaaaaataggaatccgagaccttttcaataacaacagagctgcaggaaagaaagaaaaattccattgcattttctgtgcatttttaagaaaataactattggttatgaagtaagttaattttttaagaaatcaaagcatcctaatggcatttgattgtttactgttgtgatgggggtgcagatgggaaaattaaagagaaaagatgccatttagccaatcctgtctcctgttttcaacacattccatggaataaattccttattgaaggtaactttcagaatta

SEQ ID NO: 1095 - DNA, 6201 bp, Homo Sapiens
  NM_001039948
gcggccgcctcgggtcctgacgtcgggcgccctccggccgtcactcagcgctcggccccgccccgccgcggctgcagcagcagcgccgcggccggaggagctaccgccgccaccgccgccaccgcctcctgggactcggaacgcagcgctcggagccatggcctcggcccccgcggaggcggagacccgacagaggctgctacgcaccgtcaagaaggaggtgaagcagatcatggaggaggctgtgacacgcaagtttgtccacgaagacagcagccacatcatctccttctgtgcggctgtggaggcctgcgttctgcacgggcttcggcggcgggcggctggcttcctacgcagcaataagattgcagccctctttatgaaagtgggcaagaacttcccgccggctgaggatctgagccgcaaggtgcaagacctggagcagctgatcgagagcgcgagaaaccagattcaaggcctccaggagaatgtgcggaagctgccgaagctgcccaacttgtccccacttgccatcaagcatctgtggattcgcacagccttgtttgagaaggtcctggacaaaattgtgcattaccttgtggaaaacagcagtaaatactatgagaaggaagctctcctgatggaccctgtggacggccccatccttgcatctttgttggtggggccctgtgccctagagtacaccaagatgaagactgcagatcacttctggaccgatccctcggctgacgaacttgtccagaggcaccgcatccacagctcccacgtgcggcaggactcgcccaccaagcgtcctgccctctgtatccagaagaggcattccagtggcagcatggatgaccggccatccctctctgcccgcgactacgtggagtccctgcatcagaactcccgtgccacccttctctatggcaaaaacaacgttcttgttcagccgagggacgacatggaggctgtgccagggtacctgtccctgcaccagacggctgacgtcatgaccttgaagtggacacccaaccagctgatgaacgggtctgtgggggacctggactatgagaagagcgtctactgggactatgccatgaccatccgcttggaggagattgtctacctgcactgccaccagcaagttgacagcggcgggacagtggtattggtcagccaggacgggatccagaggccgcccttccgcttccccaagggcgggcacctcctgcagttcctctcgtgcctggagaatgggctgctcccacatgggcagttggacccgccactgtggtcccagaggggtaagggcaaagtgtttcctaaactgcgcaagcgaagccctcagggttctgccgagtccacatcttcagacaaagatgatgatgaggccacggattatgtgttcaggatcatctaccctggcatgcagtcggaattcgttgcccccgacttcttgggcagcacttcctccgtctctgtgggccctgcctggatgatggttcctgcaggccggtccatgctggtggtggccagagggagtcagtgggagccagccagatgggacactactctccccacgccaagcccgaaggagcagccccccatgccccaggatctgatggacgtctctgtaagcaacctcccatccctgtggcagcccagtccccggaagtcctcctgttcatcctgttcacagagtggctcggctgatggtagctcgaccaatggctgcaaccatgagagggctcccctgaaacttctctgtgacaatatgaagtaccagatcctctccagagccttctatggatggctggcctactgcagacacctgtccaccgtgagaacccacctatcagccctggtcaatcacatgatcgtgtctccagacttgccctgcgatgctggacagggactgacagccaggatctgggagcagtaccttcacgacagcacaagttacgaggagcaggagctgctgcgcctcatctactacgggggcatccagcctgagatccgcaaggccgtgtggcccttcctcctgggccactaccagttcgggatgacggaaacagaaaggaaagaggtggacgagcagattcatgcctgctatgcacagaccatggctgagtggctgggctgcgaggcgatcgtgcggcagagggagcgggagtcccatgcggccgccctggccaaatgctcatccggggccagcttggacagccacctgcaccggatgttgcacagggactcaaccatcagcaatgagtcctcccagagctgcagttcgggccgccagaacatccgcctgcacagcgactccagcagcagcacacaggtgtttgagtctgtggatgaggtggagcaggtggaggctgaaggcagattggaggagaaacagcccaagatccccaatgggaacctagtgaacggcacttgttccccagactcgggtcatccttcctcccataacttctcctcgggcctctcagagcactcagagcccagtctgagcacagaagacagtgtcttggacgcccagcggaacacccccacggtgctgcgacctagggatggcagcgtggatgacaggcagagcagcgaggccaccacatctcaggatgaggctccccgggaggagctggccgtgcaggacagcctggagagtgacctcctggccaacgagagcatggacgagttcatgtccatcacgggcagcctggacatggccctgcctgaaaaggacgatgttgtgatggagggctggaggagcagcgagacagagaaacatggccaggcggacagtgaggacaacctctcggaggagcctgagatggaaagtctcttccctgccctggcttctctggctgtgactacttctgccaacgaggtgtcccctgtgtcttccagcggcgtcacctactctccagagctgctggatctgtacacggtgaacctgcaccgcatcgagaaggatgtgcagaggtgcgaccgcaactactggtacttcacgcccgccaacttggagaagctgcgtaacatcatgtgcagctacatctggcagcacattgagatcggctatgtccagggcatgtgtgatcttctggctccactgctggtcattctggatgatgaggcccttgccttcagctgcttcacggagctcatgaagaggatgaaccagaacttcccccacggaggcgccatggacacgcactttgcaaacatgagatcgttgatccagatcctggactcagagctgtttgagctgatgcatcagaacggggactatactcacttctacttctgctaccgctggttcctgctggatttcaagcgagaactcgtctatgatgacgtcttcttggtctgggagaccatctgggcagccaaacacgtctcctctgcgcactacgtcctgttcattgcgctggctctggtggaagtctaccgtgacatcattttggagaacaacatggatttcacagacatcatcaaattctttaatgaaatggctgagcgacacaacaccaagcaagtcctgaagctggcgcgggacctcgtgtacaaggtgcagactctgattgagaacaagtgaggggcacctcaccccggcagcctcagccaagctgcccctgccccgctcctctgcttacttttcctcctggctggatgggcaccccgggagcggggtcctggtgtctgttcacaagcgtggagttcagtgcgcaaagaaactaccctgacttttacttctgggcagatggggtggagggagtaccccttcaattcagccttacattttcctgtttgaccaaagattgcccaagtctggcgttcctcccttgcaggaggtggaggttgttggtggaggaggagccatctttgtttgctggtgcccggaatggtctcctcttcttctttccctatccctccaaactgtcttgtaagatgagacctggggaggaaacttctttttggaaattggtgtagaagaggtgtgtggggctacctctatgctcctctgcaaggggcctttggcgatgttctggacatggctgaagattgacttagagattgaccctccacctcgacattactgacatttggggccaggtgattctttttgaggggactgtcccctgcattgtaggatgctgagcagcatcccgggcctcaccagatgccagtagtgccatcccccaaccatacccctggttgtgacagcccccaaaaatgtctctagacattgcgaaatgttccctgcagggcaaaattgcccccatttgagaaccactggcttggagaagggactacaaatgtacttcctcccccattcttttgacgctaagccaccctggtcctgacgcctcccctcacttagaaaaggcatacaggaggccgggcatggtggctcacacctgtaatcccagcactttgggaggctaaggtgggcggatcacaaggtcaggagttttgagaccagcctggccaacatggtgaaaccccatctctactaaaaatacaaaaattagctgggtgtggtggcgggtgcctgtaatcccagctacttgggaggctgaggcaggagaatcacttgaacctgggaggtggaggttgcagtgagttgagatcacgccactgcactccagcccgggcgacagttcaagactccatctcaaaaaaaaaaagaaaaggcacacaagagtccctcacacatctctcttggagtctgggattccatctgttgtattttctccttttttctcctctgtctgatgccagaagatacttgttttcttcttttcaagaaaagtatctccccacataggcggtggacccaaaaagtgtaggcatgagacggtcagagctctttggggtcctgctcagagtcccccaggcagggcagagtctgtatcctgctgccatcttgcaagggaaaaccgcctctccttccaagtattgggtcttggaaaggtgtgtgtttggtgaaagccacttaatggtggtggggtgcagcttttctctaagtgcagttactcactcaggacaaaggaggaaaaggaaggcagaggtcagccagggtagagggtgatgtctgttttccttgggaaacatctgctgatgaactgggtccagggccgtgctaggtctgggaacaatcctctccaggtcttcacacagagtatcaccaatccacaaacagacccgaagtgaactagtttactctgcctacctgtcctttcaatagagcagtctttcccgctcttctgttctgagaatgcacccggaatgggggaaacccagcaagcagcagagagaaaggctcttcccgggagacctgccgcctctagggtggtcagagaatagcagctgggattttggagagggagaggataggtaaagcagcgtattgaagcatttgcggaggggtgtattagtcctcccaccctgagcacaccaggacggggatgcatccttgccttgtgtgcttgtaaaggcttctttcccttggtatagcaacttcaactgcacctgaacctccaacctctgcccagcctctggtgcagggtggatagaggtctagccagcccttacttcctgaagagagctctgtgggaaactcgaggctacagtagcttcccggctcccagctcctaccctacccccaccaaagcagaaacgggagacggcaacgttctggctgccattagacttacgtctccctcccctacgtcccctagcttcccaagacaggaagaaatgtgcaaaaggcccctccggagaaaactattttgccgttcagctgttctttacagaggatgttattttagtgagacccaggtcctagaccttctgattcctatttatttttttaacagactagtctcaaagtacagcacaaaatctcttctctgccttctcttgtgatgttccagagagcatctgtggttgtgatttggaataagtcatatttatttggtttactgtgcctattcagatctctgtatgttgtgtgtgtttctgtgtcctggaattggatgcgtgggactcgttctgtccgcggagtgcactctttttttcagtgtggcccacatatcttgtaaatgtttgctgaagagttgtgtctatatatagagaaaatatatataaacagagaaatatgtgaaaaaaaaaaaaaaaaaaaaaacgcgg

SEQ ID NO: 1096 - DNA, 2981 bp, Homo Sapiens
  NM_001039966
gcattactcatactcagcggacaaaggatcactcagcattcaatctcaccacttcaaaacattacagagggaaaacgacacctagaagtaggagtgagattcgctgaagttcccttctgaggaagacccacccctccgcctggagagccggggctggcggtgcctgaggaccccttcggcctggacagcccacgcgggcttggggggcctcgctctgccctcatggggcggccatcggttcccgaagcggcgagtgaaaattcaaatggccagtagggggcgcactcggaagtggccgccccgcatgaggcagttcagcggccccgagagtccggggagggaggtttattctccgcctgcacgagactgtgaaatccgcaaccatgagcaggagaggcggccctggtggggaagaggccaccaacatctggacggcagccctgctcaggcattcggcaggtccagcagaggtacacctcctgcagcgggttccaagtgcacctccagcctgatgggcctgaccaaggaggcttccaggagcacagaaggggctgcaacccaggtacccagagagtgagcagctccacgcgggactgtgcacggtggccgacacccgcagggacgcccgccggacgagcacgcggagggccctcgcctccacggatgcaccatgccggtgtgaggagcatctgttcttcccactctctgcagttaacaaacccaacccaaaccaccacaggtgctcctcctggggagtttcctgtctgacaaatgccaggctcacttcaaggagaatcacgcttctttctaaagatggattcaccatttaaaacagagctctgggagcctttcggcaaatcttgaaagctgcacggtgcagagacatggatgtgacttcccaagcccggggcgtgggcctggagatgtacccaggcaccgcgcagcctgcggcccccaacaccacctcccccgagctcaacctgtcccacccgctcctgggcaccgccctggccaatgggacaggtgagctctcggagcaccagcagtacgtgatcggcctgttcctctcgtgcctctacaccatcttcctcttccccatcggctttgtgggcaacatcctgatcctggtggtgaacatcagcttccgcgagaagatgaccatccccgacctgtacttcatcaacctggcggtggcggacctcatcctggtggccgactccctcattgaggtgttcaacctgcacgagcggtactacgacatcgccgtcctgtgcaccttcatgtcgctcttcctgcaggtcaacatgtacagcagcgtcttcttcctcacctggatgagcttcgaccgctacatcgccctggccagggccatgcgctgcagcctgttccgcaccaagcaccacgcccggctgagctgtggcctcatctggatggcatccgtgtcagccacgctggtgcccttcaccgccgtgcacctgcagcacaccgacgaggcctgcttctgtttcgcggatgtccgggaggtgcagtggctcgaggtcacgctgggcttcatcgtgcccttcgccatcatcggcctgtgctactccctcattgtccgggtgctggtcagggcgcaccggcaccgtgggctgcggccccggcggcagaaggcgctccgcatgatcctcgcggtggtgctggtcttcttcgtctgctggctgccggagaacgtcttcatcagcgtgcacctcctgcagcggacgcagcctggggccgctccctgcaagcagtctttccgccatgcccaccccctcacgggccacattgtcaacctcgccgccttctccaacagctgcctaaaccccctcatctacagctttctcggggagaccttcagggacaagctgaggctgtacattgagcagaaaacaaatttgccggccctgaaccgcttctgtcacgctgccctgaaggccgtcattccagacagcaccgagcagtcggatgtgaggttcagcagtgccgtgtagacagccttggccgcataggcccagccagggtgtgactcgggagctgcacacacctgggtggacacaaggcacggccacgtcatgtctctaaactgcggtcagatgtggcttctggctcctcggggcctcgcgagggtcacgcttgcctggtcaccctggggctgcttaggaaacctcacgactggtcaccttgcactcctcacacagaattgctacaatcccaaagcgctcgccccgcagggtccaaaggccagcggtgaccagcctgtcacccagctcctccccgccaaccctgcctgccgctgcacctgcctgccgctgcaggaaacatttctgacaccgtcgaccaggaaagccacacggagaggccactgtgggtgaagcgcctcagttacacaggaaccctaaagcaaatctgccaccgtgggggaactgacgctggagatgcaaggtgctggtgggtctgagctggacgtcgcggtgtgtcctctgtgcccacggtctgagctagctagcgcaccgccgagttaaagaggagaaggaaaacatgctgctctggtgcacgcctgagcgtcctccatcttccaggatggcagcaatggcgctgtgcggcctcaccaggcccacgaggagcagcagcgctcggcccggagcagcaggaaggcccctctgtggagcgcccgccgtctgctccggggtggttcagtcactgcttgttgacatcaacatggcaattgcactcatgtggactgggaccgtgcgagctgccgtgtgggttagtcgggtgccaggacaatgaaatactccagcacctgtggctgacgaatttgtttctacagaaataacagctggggacaactgcggtgatgatgtaaaaaccttcccataaaatgtaagaaaagctgatgaggctggtgacgttcagcctttgtcaataaacctgtcatgtgcggatccttaaaaaaaaaa

SEQ ID NO: 1097 - DNA, 2512 bp, Homo Sapiens
  NM_001040020
attggtcgcggccgggaagcgtgggaggaggcccagcggcgagctggctttctcctggccacttgccggggtgaggggcagccggaggagtccgagaggaagcggaggcgcgagctggaggcggcggctcccgtcggcctccggcaggactgagcgctgggaggccggagcatattaatgaaaagtgccataaactgaaaaaccaaacatgagggtagcaggtgctgcaaagttggtggtagctgtggcagtgtttttactgacattttatgttatttctcaagtatttgaaataaaaatggatgcaagtttaggaaatctatttgcaagatcagcattggacacagctgcacgttctacaaagcctcccagatataagtgtgggatctcaaaagcttgccctgagaagcattttgcttttaaaatggcaagtggagcagccaacgtggtgggacccaaaatctgcctggaagataatgttttaatgagtggtgttaagaataatgttggaagagggatcaatgttgccttggcaaatggaaaaacaggagaagtattagacactaaatattttgacatgtggggaggagatgtggcaccatttattgagtttctgaaggccatacaagatggaacaatagttttaatgggaacatacgatgatggagcaaccaaactcaatgatgaggcacggcggctcattgctgatttggggagcacatctattactaatcttggttttagagacaactgggtcttctgtggtgggaagggcattaagacaaaaagcccttttgaacagcacataaagaacaataaggatacaaacaaatatgaaggatggcctgaagttgtagaaatggaaggatgcatcccccagaagcaagactaatggaaatgtggagagaattgaagaaagcgcactttcactcttaatgggagagctataaatggcagagctatgtgtaaatattttaagagcatgcagccatcttggtgtgtgcatgagtattgtctcttttgatatcaggattatttattgctaacgtaaatagatagcattgtaaataatcatcacaatgatcaaatcactgaaccatgtctccgcacatttccctaaaagtacaatgtttagactgctatggtaatacatattttaaattctaaaagcatacacaatgtgtaactgaatggtttgtgaaaaatatattgatatatatactagttgctatgaaaatatcatggaataatagggattttagggtggatactttattttcttttatgtttctatatgttgcgttgtgatgacattatcttttaaattaaaaagagatttggctagttgtgtgtgtaatgttactttacagtccgactctcctgatgtacctcttttcatgatctttttctttccttcccaagaaactgaggaatgtttaatatgaaaacatacatcggatatgtgaaaagcacaacaaaattcttaatgtacacagtaaaaaagtaaatatataaatgtagatggcatttaggaccacagcttgctggatttgtgttagctatgggaataacttgattttgtataagctatttagagtgaggctggaggtggcagcttcacagaactggagaaccaggccaagtcccctccccaacctaattaggtcattcaggacagctaagtcagtatatttagagcaatactagcatacgtttttcttaattgttatcagcattgaccaagtggtttggaaggaggcatgctttaatatcacaataattttgatttgtaaaccaagaaattaatcctgtgtttatctaacttcataatagcaattattgcccgaagctatagtggcatatttacaaaagttcttattactgggcggactgataacatttaaaaaataattgtgtttgaccccaaatgactttatacccaattctacataaaaatatagaagatctatctttttttgttaccttcagatgttcactaaataactcagtttttaagcagaagttttcagggcattaaatatatgttgtgtatgaagtatctcaaactggaacataaatttagtgatcaaactgccattcacagtgtaaggcagcacttaaatttcgaacctaaagtttagatgcattgtataaaaaaacctaaaagcagtatctgttatttagctgtaaaccaagttggaagctattcggataatttcttaaatattgatgaactttggagtactgtttcttccttcaaactgaatgtaattaattcatgaataaatgcaccttatatgtttaaacaatctttgtatacttttgggatttttggtgcttatatgctaaatcacattcagcatgtgtattttgacatttaaaatacttccctcaattctgtaaattaaaagaatagttattttacagttccagggattgtgaaataaatgttgcagttttttaaaataatgaaaataaatactcttggttttgctttgtgaaaaaaaaaaaa

SEQ ID NO: 1098 - DNA, 1561 bp, Homo Sapiens
  NM_001040021
aattctaccccccttggtgccaacagatgaggttcacaatctcttccacaaaacatgcagttaaatatctgaggatattcagggacttggatttggtggcaggagatcaacataaaccaagacaaggaagaagtcaaagaaatgaatcaagtagattctctgggatataagaggcagccgaagagttcacaagtgtgaagcctggaagccggcgggtgccgctgtgtaggaaagaagctaaagcacttccagagcctgtccggagctcagaggttcggaagacttatcgaccatggagcgcgcgtcctgcttgttgctgctgctgctgccgctggtgcacgtctctgcgaccacgccagaaccttgtgagctggacgatgaagatttccgctgcgtctgcaacttctccgaacctcagcccgactggtccgaagccttccagtgtgtgtctgcagtagaggtggagatccatgccggcggtctcaacctagagccgtttctaaagcgcgtcgatgcggacgccgacccgcggcagtatgctgacacggtcaaggctctccgcgtgcggcggctcacagtgggagccgcacaggttcctgctcagctactggtaggcgccctgcgtgtgctagcgtactcccgcctcaaggaactgacgctcgaggacctaaagataaccggcaccatgcctccgctgcctctggaagccacaggacttgcactttccagcttgcgcctacgcaacgtgtcgtgggcgacagggcgttcttggctcgccgagctgcagcagtggctcaagccaggcctcaaggtactgagcattgcccaagcacactcgcctgccttttcctgcgaacaggttcgcgccttcccggcccttaccagcctagacctgtctgacaatcctggactgggcgaacgcggactgatggcggctctctgtccccacaagttcccggccatccagaatctagcgctgcgcaacacaggaatggagacgcccacaggcgtgtgcgccgcactggcggcggcaggtgtgcagccccacagcctagacctcagccacaactcgctgcgcgccaccgtaaaccctagcgctccgagatgcatgtggtccagcgccctgaactccctcaatctgtcgttcgctgggctggaacaggtgcctaaaggactgccagccaagctcagagtgctcgatctcagctgcaacagactgaacagggcgccgcagcctgacgagctgcccgaggtggataacctgacactggacgggaatcccttcctggtccctggaactgccctcccccacgagggctcaatgaactccggcgtggtcccagcctgtgcacgttcgaccctgtcggtgggggtgtcgggaaccctggtgctgctccaaggggcccggggctttgcctaagatccaagacagaataatgaatggactcaaactgccttggcttcaggggagtcccgtcaggacgttgaggacttttcgaccaattcaaccctttgccccacctttattaaaatcttaaacaacgggtcaaaaaaaaaaaaa

SEQ ID NO: 1099 - DNA, 4109 bp, Homo Sapiens
  NM_001040023
ctctctggccgcccctggctttatttctcgcgcgcttggggtctctcccagtctccgtctctccatttctcctggggggcggggagggggggtctccaaaaaccgcggcggcggcggcggccgctccaggcgcccgttccggagtcggggggaggcccagccgggaggggggaagggggggagccttagtcatttccccgctccagcctgctcccgcccgagcgcgcactcacggccgctctccctcctcgctccgcagccgcggcccatggagcccgccggcccggcccccggccgcctcgggccgctgctctgcctgctgctcgccgcgtcctgcgcctggtcaggagtggcgggtgaggaggagctgcaggtgattcagcctgacaagtccgtgttggttgcagctggagagacagccactctgcgctgcactgcgacctctctgatccctgtggggcccatccagtggttcagaggagctggaccaggccgggaattaatctacaatcaaaaagaaggccacttcccccgggtaacaactgtttcagacctcacaaagagaaacaacatggacttttccatccgcatcggtaacatcaccccagcagatgccggcacctactactgtgtgaagttccggaaagggagccccgatgacgtggagtttaagtctggagcaggcactgagctgtctgtgcgcgccaaaccctctgcccccgtggtatcgggccctgcggcgagggccacacctcagcacacagtgagcttcacctgcgagtcccacggcttctcacccagagacatcaccctgaaatggttcaaaaatgggaatgagctctcagacttccagaccaacgtggaccccgtaggagagagcgtgtcctacagcatccacagcacagccaaggtggtgctgacccgcgaggacgttcactctcaagtcatctgcgaggtggcccacgtcaccttgcagggggaccctcttcgtgggactgccaacttgtctgagaccatccgagttccacccaccttggaggttactcaacagcccgtgagggcagagaaccaggtgaatgtcacctgccaggtgaggaagttctacccccagagactacagctgacctggttggagaatggaaacgtgtcccggacagaaacggcctcaaccgttacagagaacaaggatggtacctacaactggatgagctggctcctggtgaatgtatctgcccacagggatgatgtgaagctcacctgccaggtggagcatgacgggcagccagcggtcagcaaaagccatgacctgaaggtctcagcccacccgaaggagcagggctcaaataccgccgctgagaacactggatctaatgaacggaacatctatattgtggtgggtgtggtgtgcaccttgctggtggccctactgatggcggccctctacctcgtccgaatcagacagaagaaagcccagggctccacttcttctacaaggttgcatgagcccgagaagaatgccagagaaataacacaggacacaaatgatatcacatatgcagacctgaacctgcccaaggggaagaagcctgctccccaggctgcggagcccaacaaccacacggagtatgccagcattcagaccagcccgcagcccgcgtcggaggacaccctcacctatgctgacctggacatggtccacctcaaccggacccccaagcagccggcccccaagcctgagccgtccttctcagagtacgccagcgtccaggtcccgaggaagtgaatgggaccgtggtttgctctagcacccatctctacgcgctttcttgtcccacagggagccgccgtgatgagcacagccaacccagttcccggagggctggggcggtgcaggctctgggacccaggggccagggtggctcttctctccccacccctccttggctctccagcacttcctgggcagccacggccccctccccccacattgccacatacctggaggctgacgttgccaaaccagccagggaaccaacctgggaagtggccagaactgcctggggtccaagaactcttgtgcctccgtccatcaccatgtgggttttgaagaccctcgactgcctccccgatgctccgaagcctgatcttccagggtggggaggagaaaatcccacctcccctgacctccaccacctccaccaccaccaccaccaccaccaccaccactaccaccaccacccaactggggctagagtggggaagatttcccctttagatcaaactgccccttccatggaaaagctggaaaaaaactctggaacccatatccaggcttggtgaggttgctgccaacagtcctggcctcccccatccctaggctaaagagccatgagtcctggaggaggagaggacccctcccaaaggactggagacaaaaccctctgcttccttgggtccctccaagactccctggggcccaactgtgttgctccacccggacccatctctcccttctagacctgagcttgcccctccagctagcactaagcaacatctcgctgtggacgcctgtaaattactgagaaatgtgaaacgtgcaatcttgaaactgaggtgttagaaaacttgatctgtggtgttttgttttgttttttttcttaaaacaacagcaacgtgatcttggctgtctgtcatgtgttgaagtccatggttgggtcttgtgaagtctgaggtttaacagtttgttgtcctggagggattttcttacagcgaagacttgagttcctccaagtcccagaaccccaagaatgggcaagaaggatcaggtcagccactccctggagacacagccttctggctgggactgacttggccatgttctcagctgagccacgcggctggtagtgcagccttctgtgaccccgctgtggtaagtccagcctgcccagggctgctgagggctgcctcttgacagtgcagtcttatcgagacccaatgcctcagtctgctcatccgtaaagtggggatagtgaagatgacacccctccccaccacctctcataagcactttaggaacacacagagggtagggatagtggccctggccgtctatcctacccctttagtgaccgcccccatcccggctttctgagctgatccttgaagaagaaatcttccatttctgctctcaaaccctactgggatcaaactggaataaattgaagacagccagggggatggtgcagctgtgaagctcgggctgattccccctctgtcccagaaggttggccagagggtgtgacccagttaccctttaacccccacccttccagtcgggtgtgagggcctgaccgggcccagggcaagcagatgtcgcaagccctatttattcagtcttcactataactcttagagttgagacgctaatgttcatgactcctggccttgggatgcccaagggatttctggctcaggctgtaaaagtagctgagccatcctgcccattcctggaggtcctacaggtgaaactgcaggagctcagcatagacccagctctctgggggatggtcacctggtgatttcaatgatggcatccaggaattagctgagccaacagaccatgtggacagctttggccagagctcccgtgtggcatctgggagccacagtgacccagccacctggctcaggctagttccaaattccaaaagattggcttgtaaaccttcgtctccctctcttttacccagagacagcacatacgtgtgcacacgcatgcacacacacattcagtattttaaaagaatgttttcttggtgccattttcattttattttattttttaattcttggagggggaaataagggaataaggccaaggaagatgtatagctttagctttagcctggcaacctggagaatccacataccttgtgtattgaaccccaggaaaaggaagaggtcgaaccaaccctgcggaaggagcatggtttcaggagtttattttaagactgctgggaaggaaacaggccccattttgtatatagttgcaacttaaactttttggcttgcaaaatatttttgtaataaagatttctgggtaataatga

SEQ ID NO: 1100 - DNA, 1207 bp, Homo Sapiens
  NM_001040025
gtcttccgctctcccgctaacgctgcgcgctaattggacgcgcccttggaacaatgagccctaagaaccaatgagaagtccgaaggtgagaactatccaatgagagtggccggtgggcgggccttgagccgcggcgccgagctacgggtgccgggtggagcgaagcacggaatgtgtctcctgctgggggccacgggcgtcgggaagacgctgctggtgaaacggctgcaggaggtgagctcccgggatgggaaaggcgacctgggggagccgcccccgacacggcccacggtgggcaccaatcttactgacatcgtggcacagagaaagatcaccatccgggagcttggggggtgcatgggccccatctggtccagttactatggaaactgccgttctctcctgtttgtgatggacgcctctgaccccacccagctctctgcatcctgtgtgcagctcttaggtctcctttctgcagaacaacttgcagaagcatcggtgctgatactcttcaataaaatcgacctaccctgttacatgtccacggaggagatgaagtcattaatcaggcttccagacatcattgcttgtgccaagcagaacatcaccacggcagaaatcagcgcccgtgaaggcactggcttagcaggggtgctggcctggctccaggccacccacagagccaacgattgactgcacggcagaggcgcagctggcctgagctggggagaggtggcagagggcagtatggctttgctgccaatagtttcttctcacaggggcagaataacccaaagtaaccctacatgatggggctctgtgctgagatgcaatgatgtgtaaactgaggcatgtggagatggaagttgacatctggcctctgaaaaaagtgtccccaggggctaggcatggtggctcacacctgtaatcccagcactttgagaggccgaggcgggtgtatcacctgaggtcgggagttcgagactagcctgaccaacatggagaaaccctgtctctactaaaaatacaaaattagctgggtgtgctggtgcatgcctgtaatctcagctacttgggaggctgagacaggagaatcccttgaacctgggaggtggaggttgcagtgagtcgagatcatgccattgcactgcacctgggcaacaagagtgaaactccgtcttaaaaaatataagaaataaaaaaataa

SEQ ID NO: 1101 - DNA, 1025 bp, Homo Sapiens
  NM_001040034
cagctgttaccgcgtcacatgagggaggccggcggccactcggcgggggaggggaccgtggctggagcccggggcggggccgcgcggcaggcggggcgggagccggggggcgcagctagagagccccggagccgcggcgggagaggaacgcgcagccagccttgggaagcccaggcccggcagccatggcggtggaaggaggaatgaaatgtgtgaagttcttgctctacgtcctcctgctggccttttgcgcctgtgcagtgggactgattgccgtgggtgtcggggcacagcttgtcctgagtcagaccataatccagggggctacccctggctctctgttgccagtggtcatcatcgcagtgggtgtcttcctcttcctggtggcttttgtgggctgctgcggggcctgcaaggagaactattgtcttatgatcacgtttgccatctttctgtctcttatcatgttggtggaggtggccgcagccattgctggctatgtgtttagagataaggtgatgtcagagtttaataacaacttccggcagcagatggagaattacccgaaaaacaaccacactgcttcgatcctggacaggatgcaggcagattttaagtgctgtggggctgctaactacacagattgggagaaaatcccttccatgtcgaagaaccgagtccccgactcctgctgcattaatgttactgtgggctgtgggattaatttcaacgagaaggcgatccataaggagggctgtgtggagaagattgggggctggctgaggaaaaatgtgctggtggtagctgcagcagcccttggaattgcttttgttttgggaattgtctttgcctgctgcctcgtgaagagtatcagaagtggctacgaggtgatgtaggggtctggtctcctcagcctcctcatctgggggagtggaatagtatcctccaggtttttcaattaaacggattattttttcagaccgaaaagagatggtctgagtttgtcttagaaaaaaaaaaaaaaa

SEQ ID NO: 1102 - DNA, 2005 bp, Homo Sapiens
  NM_001040056
ctggcgcgcgcggccctgcgggtgacaggcaggcgggaaggggcggggcctcgggcggggccgccgtggggaggagggcggtgggaggggaggagtggagatggcggcggcggcggctcaggggggcgggggcggggagccccgtagaaccgagggggtcggcccgggggtcccgggggaggtggagatggtgaaggggcagccgttcgacgtgggcccgcgctacacgcagttgcagtacatcggcgagggcgcgtacggcatggtcagctcggcctatgaccacgtgcgcaagactcgcgtggccatcaagaagatcagccccttcgaacatcagacctactgccagcgcacgctccgggagatccagatcctgctgcgcttccgccatgagaatgtcatcggcatccgagacattctgcgggcgtccaccctggaagccatgagagatgtctacattgtgcaggacctgatggagactgacctgtacaagttgctgaaaagccagcagctgagcaatgaccatatctgctacttcctctaccagatcctgcggggcctcaagtacatccactccgccaacgtgctccaccgagatctaaagccctccaacctgctcatcaacaccacctgcgaccttaagatttgtgatttcggcctggcccggattgccgatcctgagcatgaccacaccggcttcctgacggagtatgtggctacgcgctggtaccgggccccagagatcatgctgaactccaagggctataccaagtccatcgacatctggtctgtgggctgcattctggctgagatgctctctaaccggcccatcttccctggcaagcactacctggatcagctcaaccacattctgggcatcctgggctccccatcccaggaggacctgaattgtatcatcaacatgaaggcccgaaactacctacagtctctgccctccaagaccaaggtggcttgggccaagcttttccccaagtcagactccaaagcccttgacctgctggaccggatgttaacctttaaccccaataaacggatcacagtggaggaagcgctggctcacccctacctggagcagtactatgacccgacggatgaggtgggccagtccccagcagcagtggggctgggggcaggggagcaggggggcacgtaggcatcccccatgccaggcctgagccttgctgtctctaccaccccagccagtggccgaggagcccttcaccttcgccatggagctggatgacctacctaaggagcggctgaaggagctcatcttccaggagacagcacgcttccagcccggagtgctggaggccccctagcccagacagacatctctgcaccctggggcctggacctgcctcctgcctgcccctctcccgccagactgttagaaaatggacactgtgcccagcccggaccttggcagcccaggccggggtggagcatgggcctggccacctctctcctttgctgaggcctccagcttcaggcaggccaaggccttctcctccccacccgccctccccacggggcctcgggacctcaggtggccccagttcaatctcccgctgctgctgctgcgcccttaccttccccagcgtcccagtctctggcagttctggaatggaagggttctggctgccccaacctgctgaagggcagaggtggagggtggggggcgctgagtagggactcagggccatgcctgcccccctcatctcattcaaaccccaccctagtttccctgaaggaacattccttagtctcaagggctagcatccctgaggagccaggccgggccgaatcccctccctgtcaaagctgtcacttcgcgtgccctcgctgcttctgtgtgtggtgagcagaagtggagctggggggcgtggagagcccggcgcccctgccacctccctgacccgtctaatatataaatatagagatgtgtctatggctgaaaaaaaaaaaaaaaaaaaaaaaaaaa

SEQ ID NO: 1103 - DNA, 2468 bp, Homo Sapiens
  NM_001040057
gcggagtggggaggcggcaagaggacctgcggcaggccctcttcggcagtctctccggcccggtttccctcggcgtgctactgtgcgctcgatccagcaccatggggaagcgggacaatcgggtggtactgccaaaattatgacatgataccaaggaaattagaatgtgatcaatattgttgaaaacaaaaacaaaaacctgagaccagttaaatttaacaaaggcctatatgaacccaatagcaatggcgagatcaaggggtccaatccagtcttcagggccaacaatacaggattatctgaatcgaccaaggcctacctgggaagaagtaaaagagcaactagaaaagaaaaagaaaggctccaaggctttggctgaatttgaagaaaaaatgaatgagaactggaagaaagaactggaaaaacacagggagaaattgttaagtggaagtgagagctcatccaaaaaaagacagagaaagaaaaaagaaaagaagaaatctggtaggtattcatcttcttcttcatcaagctctgattcttccagcagttcttctgattctgaagatgaggataagaaacaaggaaaacggagaaagaaaaagaagaaccgttcacataaatcttctgaaagctccatgtcagaaactgaatcagacagtaaggatagtttaaaaaagaaaaagaagtcaaaagatggaactgagaaagaaaaggatattaaaggactcagcaaaaagagaaagatgtattctgaagataaacctttatcatctgagtccttgtcagaatcagagtatattgaggaggtgcgagcaaaaaagaagaaaagcagtgaagaacgagaaaaagcaacagaaaaaacaaaaaagaaaaagaagcataagaaacacagtaagaagaagaaaaagaaggctgctagttcaagtcctgactcaccataacattaagaaaaatcaggattcccttataaagaaagtgcaatgtctgaggaaatttcaactgtgaaaactacaacatatttactaaaatgcatgaattttcttgtttttggaattattcctggactattcagtagccactcagatgccactgtgtgaaagggccataaatgttgcctgctgcttgaacatctatttttttctcttccagtgcttgataactctgggagataatacactgcagtcgtactagtggttaagatatttgggaataaaattaatacttttgactagaagcgtctaaggataaaccaacagaaattgaatctggatacatctttaagatgtaatcagaaatgaccagatgactctagttagaatttttgaaggagggattacattaatatttcaaaacccttactctgtagataagtgtattttaattttttcccctcgtatacttttatttacctggggaaggagcttttagggttggggggtggtttgctatctctttagctagcagaatagtgtgcctttgatcctcacacatcctgtattatggacacagtagccatgcttcacggggaggtcagagctggctaccagcagtcttgccctttactgagcttagtgtcatctttggatgctgtcatatgctgctttgagtgaaccagagaaacagccatttgcagcatgagaaagccccaaaagctctgggatttacctccactttagtaataatgaatattttttagcattagaatgtgttatgtcatttgaattaattttgactacactttggcttgggagaggaattattttaaatagacattggtactttttgaacttgatagctaaagattctaaaatgcatgttttatactaagttttaaccagtcaggaaaattttatgtaactagtgatagtttatttttttgtatgaattttgtttaggctgcaatgtttagcttttgttaactcctcactcttgctgtcttaagttcattactatgtttaatggcctacttgccaagatatttagcatgtaaaaagcagggttttgattaaaaaaaaaaaacggcttcatattgaagctgagacttacaataacaagttgagtggcaagcctggtatgctgtgtcttattgccagaatcttagtaaatgtaatgttttaaaagtttgttgtctttgtatattaataacaaattatgacaagttaagtttaaataagagttacattattgctctccctgtgtcatattttactaagattttgtgcctcatgtctactgctgaattgtttactaggaatgttaaaaggaattgataattcattttcattttacatttttatataatcaggtaacatgacatacaacttgatgtacaattttgcctgttacaaagggtgtgctaattatagtggtatatgcacagaacatgttggcatgacaacaggctgaataaatagctattttacttaaaaatagctgtgttcttatcagctccctttggactgcaa

SEQ ID NO: 1104 - DNA, 1114 bp, Homo Sapiens
  NM_001040097
atcggcgtatagttacggcagaaacaaagacgtcctagccaatgacagaggccgtacggcggaagtatagaaaaggactctctggaacatggcaacattaatctgaccacaagctgactggcaggtgctttaaccacaagctctgactccaggccctgtcccctgagctctgccctcggatgtccgaccgcccagagcctgcatgcgccgtggggcgccccaggaccaggagctggtgggtccggggccccctgggcgggggtcccggggcgcccctcctcccttgggacccgttgtcccggtcctggtctttcccccggatctagtattcagggcggaccagcggagcggaccccgacagctgctgaccctctataaccccacaggaactgcgcttcgcttccgagtcctgtgcacagcacctgccaaatacacggtgtttgacgcagagggatatgtgaagccccagtcttgcattgacattgtgattcgccatgtggcacccattcccagccactatgatgtccaggaccgcttccgcattgagctgtctgaggaaggagctgagggccgagtggtgggacgcaaggacattacctccattctgagagccccagcgtacccccttgagcttcagggacagccagatccagcgcctcgcccagggcctcctgctgggacaccaccacccacggccagacacttccaggagcacccccgccagcaactggccaccagctccttcctcctcttcttgctgacggggattgtgtctgtggccttcctgctgctcccactcccggacgaactcggcagccagctgcctcaagtcctgcacgtctccctgggacaaaagttggtggccgcctacgtcttgggcctcctcaccatggtgttcctccggacctgagctccgtgctcaacccccagcccaccccaccctccctgggcagggtcttgaggcagccactgtgatgctcataccttaccttgcctcctaccctcttctctttcctgcctactccccactcctccctgacaaaaaacacccagggatttgtactcattttccaagttgaataaaatacatttttaaaatgataaaaaaaaaaaa

SEQ ID NO: 1105 - DNA, 2635 bp, Homo Sapiens
  NM_001040101
aggatgctcgggcggcggctgcagtgggacctccaccttctctgccaaccagagcggaggaacctttccgcctccctccaagcggcgcactgagcgctctttgcctagaacgacttccctcccgctgcctggggcagcctcaccctgggcgcccacaccccagccctgggagagcgctactccgcctcccgcaccaccgaaaacctcctcctcctttacgggccgcgcctcctttacgggccgcgccccctttatacgcggacgcgccctcttttggtcgccccctccccaacccagcactaaggagcaccctgctctggtctccgccaccacccagcgcctcctggacccatccccccaaacccttgaacgtcctcaggacccccaggctgcagcctcggagctcccggaacgatggtgaagttggggaacaatttcgcagagaagggcaccaagcagccgctgctggaggatggcttcgacaccattcccctgatgacgcccctcgatgtcaatcagctgcagttcccgcccccggataaggtggtcgtgaaaactaagaccgagtatgaacctgaccgcaagaaagggaaagcacgtcctccccaaattgctgagttcaccgtcagcatcacggagggtgtcaccgagaggtttaaggtctccgtgttggtcctcttcgccctggccttcctcacctgcgtcgtcttcctggttgtctacaaggtgtacaagtatgaccgcgcctgccccgatgggttcgtcctcaagaacacccagtgcatcccagaaggcttggagagctactacgcggagcaagactccagtgcccgggagaaattttacacagtcataaaccactacaacctggccaagcagagcatcacgcgctccgtatcgccctggatgtcagttctgtcagaagagaagctgtccgagcaggagactgaagcggctgagaagtcagcttagcgggatgggcaagttccttacaatgtgtcacttgcaaataacaaagggactttgagggacatttcattaaatataattactgatactttagaggttactcatttacggtgcaattgcttctgtttgctaatgctgctttgcaaataaaacttgctgccgaccacccacgggcataaaatcaagtgcatttcagcattgcctaaagagctctgacaccacttttcatgttaagatcttcatttagctcctttactgggatttattggatgctgtaaaaaaataaatttacactggatatgcgaagggtttggatctcagataaatgcattttgtggaattgattttctgaaccgaccctgctgtctgcaaaccttcctccatagccatatctagagtgatctctcgctgtgctaagagcaagcctacttcgcatttcttcctcggccatcagcgggtaacagtgctgactgctgccaaggtgcactgtagtaagtaagtggcatagagaacgaggaaaaagacccccccacccctccctgtgctgactcctgagtcggggtgggacggccctgcaatgtggcaggctcggtgtggattgactactccctcccctctgactctggcatcttggtaaggagggaggggcaccacccatctgggtggagacagctggggtttgctccagtgtgtgtagactggcagagcatgtgagggagagggctgggaagagacggccctgggcccgtgaggtgcagaactctccctgcaggtagtctgtctgctctgtgatgtgctgataggaaagagcccccactggccctctggttcacttctattatgaataaatttgcaccaatagccccattagtttttaaagaaatgagctgggtgggaaaagtggaaatgtaatttctggtaagcttgagctactttaatttttattctatgaaactgatatcccttgatgtgggaaacaggcaggaaaggctgtggggtgggggtgggggactggtgtggcaccgtgcaaacaaaatgacaaatttcaactcacaatctttgtaagaaaattgttccagtttgaatcttgatattaaagtttatgtttacaaaactgccagttagatgaactaagtgtgtaaaacaaatagaaaagacattcgcagacatttcttctatgttattgaatgtgttgtttctggtgtacgtgtcaaaagtttcagttttttagatcagaaataaacgacaaatagtgtgagatgtgttgtgaacaggcatggtgaccgtggtcagcgccactcttgtttcctgaaatgtgcttctaagacagaaaatgtattttctcatcaagggtgtctggagacacagaccgtgaccttggcgcagcggtgtgcatcagaggcgtgtgctgagaagggtggtgttaagctgtggaaaatgactcaagagcaataaatcagtgccaaagcttccctgcgcatctgaatagacacaagtgaagcccgtgtgcgcacagtgcagaggccgagcctgtatttccaggtagacgtggactttattgactgtgaattcatttacatgtaacttctgacatttcactctgtgcaaataaagaacatgaggataaaaaaaaaaaaaaaaaaaaaaaaaaaaaaaaaaaaaaaaa

SEQ ID NO: 1106 - DNA, 1736 bp, Homo Sapiens
  NM_001040107
agggacttcagagctgggcctgcgcctgcggggccgtacgagttggcccggagcaaggcggcccaggacaggcaggggctgcacgcggtgaagaaaccaagacgcagagaggccaagccccttgccttgggtcacacagccaaaggaggcagagccagaactcacaaccagatccagaggcaacagggacatggccacctgggacgaaaaggcagtcacccgcagggccaaggtggctcccgctgagaggatgagcaagttcttaaggcacttcacggtcgtgggagacgactaccatgcctggaacatcaactacaagaaatgggagaatgaagaggaggaggaggaggaggagcagccaccacccacaccagtctcaggcgaggaaggcagagctgcagcccctgacgttgcccctgcccctggccccgcacccagggccccccttgacttcaggggcatgttgaggaaactgttcagctcccacaggtttcaggtcatcatcatctgcttggtggttctggatgccctcctggtgcttgctgagctcatcctggacctgaagatcatccagcccgacaagaataactatgctgccatggtattccactacatgagcatcaccatcttggtcttttttatgatggagatcatctttaaattatttgtcttccgcctggagttctttcaccacaagtttgagatcctggatgccgtcgtggtggtggtctcattcatcctcgacattgtcctcctgttccaggagcaccagtttgaggctctgggcctgctgattctgctccggctgtggcgggtggcccggatcatcaatgggattatcatctcagttaagacacgttcagaacggcaactcttaaggttaaaacagatgaatgtacaattggccgccaagattcaacaccttgagttcagctgctctgagaaggaacaagaaattgaaagacttaacaaactattgcgacagcatggacttcttggtgaagtgaactagacccggaccagctcccctcaaaaagaagacactgtctcatgggcctgtgctgtcacgagaggaacagctgcccctcctgggccgcttggtgagaggtttggtttgatacctctgcctccctcctgccagcatggattctgggtggacacagccttgtggaaggtccagtaccaccaagagctgcccatccactcccaccccacactgtatcaaatgtatcacattttctcatgttgaacactttagccttaattgaaaatgagcaacaaagctggacaattgctagttgtatataaaatttaatctcaccgaatgtacagttttcaaatttcacgtgtatattaaggaactgatgcatctgagcattctgaaagaaagaaaaagaagctactttagctgccaccccattctagaaaagtctcttattttcaagctgttctaaatagcttcgtctcagtttccccaaaaggggtacccaggcccctcctctgtgtgccccagctgcatcagccagcttctaggtggctccattgttttctgccacctgacaacatttttcctcaattactgtacaactactgtataaaataaaacaactactgtataaaataaactctctcttttccctggaccctcctactgtattctttcctctgtggcacccataccagcctgccagtcggagagcaagctagctacagtgcctggtgcagaaatggcaatt

SEQ ID NO: 1107 - DNA, 7911 bp, Homo Sapiens
  NM_001040108
aacaactggtgcgcatgcgcactggtgtctcgcggcctggcgcgccccctccgaagcgcatgctcgtgggcacgcacgagcctcaagatccaaggtgcgcgcgtcggcgtccgaggcggttggtgtcggagaatttgttaagcgggactccaggcaattatttccagtcagagaaggaaaccagtgcctggcattctcaccatctttctacctaccatgatcaagtgcttgtcagttgaagtacaagccaaattgcgttctggtttggccataagctccttgggccaatgtgttgaggaacttgccctcaacagtattgatgctgaagcaaaatgtgtggctgtcagggtgaatatggaaaccttccaagttcaagtgatagacaatggatttgggatggggagtgatgatgtagagaaagtgggaaatcgttatttcaccagtaaatgccactcggtacaggacttggagaatccaaggttttatggtttccgaggagaggccttggcaaatattgctgacatggccagtgctgtggaaatttcgtccaagaaaaacaggacaatgaaaacttttgtgaaactgtttcagagtggaaaagccctgaaagcttgtgaagctgatgtgactagagcaagcgctgggactactgtaacagtgtataacctattttaccagcttcctgtaaggaggaaatgcatggaccctagactggagtttgagaaggttaggcagagaatagaagctctctcactcatgcacccttccatttctttctctttgagaaatgatgtttctggttccatggttcttcagctccctaaaaccaaagacgtatgttcccgattttgtcaaatttatggattgggaaagtcccaaaagctaagagaaataagttttaaatataaagagtttgagcttagtggctatatcagctctgaagcacattacaacaagaatatgcagtttttgtttgtgaacaaaagactagttttaaggacaaagctacataaactcattgactttttattaaggaaagaaagtattatatgcaagccaaagaatggtcccaccagtaggcaaatgaattcaagtcttcggcaccggtctaccccagaactctatggcatatatgtaattaatgtgcagtgccaattctgtgagtatgatgtgtgcatggagccagccaaaactctgattgaatttcagaactgggacactctcttgttttgcattcaggaaggagtgaaaatgtttttaaagcaagaaaaattatttgtggaattatcaggtgaggatattaaggaatttagtgaagataatggttttagtttatttgatgctactcttcagaagcgtgtgacttccgatgagaggagcaatttccaggaagcatgtaataatattttagattcctatgagatgtttaatttgcagtcaaaagctgtgaaaagaaaaactactgcagaaaacgtaaacacacagagttctagggattcagaagctaccagaaaaaatacaaatgatgcatttttgtacatttatgaatcaggtggtccaggccatagcaaaatgacagagccatctttacaaaacaaagacagctcttgctcagaatcaaagatgttagaacaagagacaattgtagcatcagaagctggagaaaatgagaaacataaaaaatctttcctggaacatagctctttagaaaatccgtgtggaaccagtttagaaatgtttttaagcccttttcagacaccatgtcactttgaggagagtgggcaggatctagaaatatggaaagaaagtactactgttaatggcatggctgccaacatcttgaaaaataatagaattcagaatcaaccaaagagatttaaagatgctactgaagtgggatgccagcctctgccttttgcaacaacattatggggagtacatagtgctcagacagagaaagagaaaaaaaaagaatctagcaattgtggaagaagaaatgtttttagttatgggcgagttaaattatgttccactggctttataactcatgtagtacaaaatgaaaaaactaaatcaactgaaacagaacattcatttaaaaattatgttagacctggtcccacacgtgcccaagaaacatttggaaatagaacacgtcattcagttgaaactccagacatcaaagatttagccagcactttaagtaaagaatctggtcaattgcccaacaaaaaaaattgcagaacgaatataagttatgggctagagaatgaacctacagcaacttatacaatgttttctgcttttcaggaaggtagcaaaaaatcacaaacagattgcatattatctgatacatccccctctttcccctggtatagacacgtttccaatgatagtaggaaaacagataaattaattggtttctccaaaccaatcgtccgtaagaagctaagcttgagttcacagctaggatctttagagaagtttaagaggcaatatgggaaggttgaaaatcctctggatacagaagtagaggaaagtaatggagtcactaccaatctcagtcttcaagttgaacctgacattctgctgaaggacaagaaccgcttagagaactctgatgtttgtaaaatcactactatggagcatagtgattcagatagtagttgtcaaccagcaagccacatccttaactcagagaagtttccattctccaaggatgaagattgtttagaacaacagatgcctagtttgagagaaagtcctatgaccctgaaggagttatctctctttaatagaaaacctttggaccttgagaagtcatctgaatcactagcctctaaattatccagactgaagggttccgaaagagaaactcaaacaatggggatgatgagtcgttttaatgaacttccaaattcagattccagtaggaaagacagcaagttgtgcagtgtgttaacacaagatttttgtatgttatttaacaacaagcatgaaaaaacagagaatggtgtcatcccaacatcagattctgccacacaggataattcctttaataaaaatagtaaaacacattctaacagcaatacaacagagaactgtgtgatatcagaaactcctttggtattgccctataataattctaaagttaccggtaaagattcagatgttcttatcagagcctcagaacaacagataggaagtcttgactctcccagtggaatgttaatgaatccggtagaagatgccacaggtgaccaaaatggaatttgttttcagagtgaggaatctaaagcaagagcttgttctgaaactgaagagtcaaacacgtgttgttcagattggcagcggcatttcgatgtagccctgggaagaatggtttatgtcaacaaaatgactggactcagcacattcattgccccaactgaggacattcaggctgcttgtactaaagacctgacaactgtggctgtggatgttgtacttgagaatgggtctcagtacaggtgtcaaccttttagaagcgaccttgttcttcctttccttccgagagctcgagcagagaggactgtgatgagacaggataacagagatactgtggatgatactgttagtagcgaatcgcttcagtctttgttctcagaatgggacaatccagtatttgcccgttatccagaggttgctgttgatgtaagcagtggccaggctgagagcttagcagttaaaattcacaacatcttgtatccctatcgtttcaccaaaggaatgattcattcaatgcaggttctccagcaagtagataacaagtttattgcctgtttgatgagcactaagactgaagagaatggcgaggcaggtgggaacctgctcgtgctggtggatcagcacgctgcccatgagcgtatacgtctggagcagcttatcattgattcctacgagaagcaacaggcacaaggctctggtcggaaaaaattactgtcttctactctaattcctccgctagagataacagtgacagaggaacaaaggagactcttatggtgttaccacaaaaatctggaagatctgggccttgaatttgtatttccagacactagtgattctctggtccttgtgggaaaagtaccactatgttttgtggaaagagaagccaatgaacttcggagaggaagatctactgtgaccaagagtattgtggaggaatttatccgagaacaactggagctactccagaccaccggaggcatccaagggacattgccactgactgtccagaaggtgttggcatcccaagcctgccatggggccattaagtttaatgatggcctgagcttacaggaaagttgccgccttattgaagctctgtcctcatgccagctgccattccagtgtgctcacgggagaccttctatgctgccgttagctgacatagaccacttggaacaggaaaaacagattaaacccaacctcactaaacttcgcaaaatggcccaggcctggcgtctctttggaaaagcagagtgtgatacaaggcagagcctgcagcaatccatgcctccctgtgagccaccatgagaacagaatcactggtctaaaaggaacaaagggatgttcactgtatgcctctgagcagagagcagcagcagcaggtaccagcacggccctgactgaatcagcccagtgtccctgagcagcttagacagcagggctctctgtatcagtctttcttgagcagatgattcccctagttgagtagccagatgaaattcaagcctaaagacaattcattcatttgcatccatgggcacagaaggttgctatatagtatctaccttttgctacttatttaatgataaaatttaatgacagtttgattggttgcttggtttgttatttgaagggtgtgatttttgtttttgtacagttttttttcaagcttcacatttgcgtgtatctaattcagctgatgctcaagtccaaggggtagtctgccttcccaggctgcccccagggtttctgcactggtcccctcttttcccttcagtcttcttcacttccctatgctgctgcttcatgtgctacatctcagacttaaagagtttctctactacagtgaaaacattctctagggtctttcatcaggcctttagttattttagggataaaaactattgataaaaaggacaaggatagaacagagaaaatttaaagtcctgttccgggttttttgttatgttttctttaaaaactcagagactgatgttcaatatcccaaaccagtaaaatggtgaaaatactatgagcttgttttttaaaatatgattttttttggtactttataaagtatctctttatgtgaaagcaattgtcatatcaaaacacagcatacatacgttcaacctaaccaaatatctttacactttttctttcaggagacaagggttctttgggtccctttcaaacggtatcttggtgttattacattatgcctatctattgcccttataatatcacttgggaccaggactgatcgttctgcaaatgcttgttatgccattctcaatctatttttcccgcaccttttcacatgatttgtggttaataggactcaacagactaaaattgcatagtagaaaaaaaatgcaaaaagccagctggtaatgtttattgcaactggggtgctatacaattagtaagatgatgcaatgagaatttctacttttgtatttcctgaccagcctgctcaaagtggcttttatatcaattgaatgattttcctcattttttaatacaggaaaccaattcgtgctcatggaagaaaagttcctttgccagcagccttgaagtgaatcttacaggagcaatgaaagtattgcattcattagcgtctgccccagagaaggttcagagaaaaccttcacttgttttcaaggggatccttgtagatttacgtaattggaatcctgaagaacaggccctactgtctaaaaaatggcttttattcttctaaatacatataaacggatgttttatagatgggaagacatgaccttagaaaggagagagttttcagaggatttgccaggctgtcaggggctctgcctccaggcccagtgtggcagtgtggcctcagggcctccgcctccctgcttgagggctgcatggaggccaactgtcctgggagttgtaaaaatcttttaaggccagaccaatttgagggattttaaaaagtgtctcagtgcctcttatgatttcagaaggttttgctatatgtaatcccaactactgttttcttgagagtagcagaggattagaaaaagtcctccataaattatgtaaccggccttcctgactagcctgactcaagcaatgtaagagataattattctgttttcataatttataagtgtgggggcatgcctcagcataaaaacaacctattagggaaaaatatctaatagattacctttatcgcctgttagggttttatgttgtttttaactcagatgccataagaacaaagatacatgtaatttataatagtaatcattaatacctatattgtgctttaaggtttacaaaataatttttctcatactttatcttagtttagtttcttgacagtccatgaggtaaggtggtagctttatcaccattttacaaagtgggaaacgaaggttcctcttaggaacctagttgtcacctttgtataataaaacttcgaagctcggagctgttaactggtttgctgaaggcttagctgtaagagccagaattcagacccaggtctgagtgacttcaaactgcacagtccttcccattattacccatatgctatcccttatatttttaatttattaggaattcattcatttataaacttggtgattcacctttattagattctggtcgctgaaggctttagtaacttcagagtaaaacttgagagatgagatgtaaaatgcagccattcttgagagttcctttttctgtaacattcatcaacacttcattgagaagtgaaggttcctatggctgtctctaccttcaagaggcttagctttagtcactgagaaagacaaggaaactaatgatagaatatagtagcttcttctggcgttaggtatcacagagtcacagctagttacagctagccctttattattgaaagaagaggagctagcagtcccactatcagaattaagactagagatggtaataggagctagtatcagaaaagcttaaggcaaagcataaagtgtaggctagaatgaagctggagaatggggagggggcttgggtaacatccagaacctggctggggacctggaactacatgagatgtaagaatggagaggttctagcagtcagaggtcaggtacaaatgaacagctgggatctgcgcatggcagacagtgaaaaaacccaggcaagcaaaatggtcagagcagaaaggggcccaaggccacgttcttgagatgtggagggggctgaggaagccacgccaagtaaggacagatgcagctcagcagttcctagcgagccctgacaagccagctcagctgaagcttcgggtgggagccagtcatggcacagtggagtgaaggaagagcagtttcaggcacccaaaacctgacccccacgacctgttttccacctgaagagccacccattccatccaaacccttggcaaaagtctgctaacagagagaaccggccagtatgctggccagtcgcgatcatgcctgtctttaccctctaagctgaagctgctcatcaacggtgagatggcaaaaaggtgggtccagaagaggggaaaagaagggagtctgtgaaaacaaaatgctgaagaatctgcatcaaataaacccttccttccttcctttttccttcaaaaaaaaaaaaaaa

SEQ ID NO: 1108 - DNA, 691 bp, Homo Sapiens
  NM_001040138
atgcgcgcaagagagcgggaagccgagctgggcgagaagtaggggagggcggtgctccgccgcggtggcggttgctatcgcttcgcagaacctactcaggcagccagctgagaagagttgagggaaagtgctgctgctgggtctgcagacgcgatggataacgtgcagccgaaaataaaacatcgccccttctgcttcagtgtgaaaggccacgtgaagatgctgcggctggcactaactgtgacatctatgaccttttttatcatcgcacaagcccctgaaccatatattgttatcactggatttgaagtcaccgttatcttatttttcatacttttatatgtactcagacttgatcgattaatgaagtggttattttggcctttgcttgatattatcaactcactggtaacaacagtattcatgctcatcgtatctgtgttggcactgataccagaaaccacaacattgacagttggtggagggttattttaactcagtataggagctagaggaagagatttccgaagtctgcaccccgcgcagagcactactgtaacttccaagggagcgctgggagcagcgggatcgggttttccggcacccgggcctgggtggcagggaagaatgtgccgggatccgcctcagggatctttgaatctctttactgcctggctggccggcagctccg

SEQ ID NO: 1109 - DNA, 559 bp, Homo Sapiens
  NM_001040139
atgcgcgcaagagagcgggaagccgagctgggcgagaagtaggggagggcggtgctccgccgcggtggcggttgctatcgcttcgcagaacctactcaggcagccagctgagaagagttgagggaaagtgctgctgctgggtctgcagacgcgatggataacgtgcagccgaaaataaaacatcgccccttctgcttcagtgtgaaaggccacgtgaagatgctgcggctggatcttaccaacagtatcattacagctgtgttcctttcagtagttgccatcttggccatgcaagaaaagaaaagaaggcatttactctatgtcggggggtccctgtgtctcacagcggtaatcgtgtgttgcatcgatgcgtttgtggtcaccacgaagatgaggaccaacttgaaaagattcctgggagtcgaagttgaaaggaagctttcccccgccaaggacgcctaccccgaaaccggccccgacgccccgcagaggcccgcctgaagccagcccggcgccctagcagatgcacgtgtctgtcgaatcgctgcctccgagccca

SEQ ID NO: 1110 - DNA, 2374 bp, Homo Sapiens
  NM_001040153
agccacccgaggcgcccttcgtctacttcaagccggcagcaggcttcttcggcgcgggcggtggcgggccggagccggggggcgcggggacgccgccaggggcagctgcagcgccgccctcgccgccccccacgctgctggacgaggtggaattgctggatctggagagcgtagccgcctggcgggacgaggacgactacacctggttatacattggctcttcaaagacgttcacctcatcagagaaatccctgactcctttgcagtggtgtagacatgtcctagataacccaactcctgagatggaagcagcgagacgttccctgtgctttagactggagcaaggttacacttccaggggctccccactcagtccccagtcatctatcgacagtgagctgagtacttcagaattggaggatgattctatctccatgggatataaattacaggacctcactgatgttcagatcatggctcgtctgcaagaagaaagtctcaggcaagattatgcttctacttcagcatctgtatcaagacatagttccagtgtgtcattgagttcaggaaaaaaagggacatgtagtgatcaagaatatgaccaatacagtctggaggatgaagaggaatttgatcatttgccaccacctcagcctcgtcttccaagatgttcccctttccaaagaggaattccccattcacagactttctccagcattcgggagtgtaggaggagccccagttcccagtattttccttcaaataattaccagcagcaacagtattattcacctcaagcccaaactccagatcagcaaccaaataggaccaatggagataagctccgaagaagtatgcctaacctagcccggatgccaagtacaactgccattagtagcaacattagttctccggtcaccgtgcgaaatagtcagagttttgactcaagcttgcatggagctggaaatggaatttcaagaatacaatcttgtattccatcaccgggacagcttcaacacagggtccacagcgtggggcatttcccagtgtctatccgacagcctcttaaagccacagcctatgtgagtccaaccgttcaaggcagcagtaacatgcctttatcaaacggcttacagctgtattccaacacaggaatccccacaccgaacaaagctgcagcttctgggataatgggtcgcagtgcactcccaagaccttcgttggcaataaatgggagtaacctgcctcgaagcaaaattgcacaacctgttagaagttttcttcagcctccaaagcctctgtcttcactcagcactctgagggatggaaattggagagatggttgctactaatgcagttttatgtacccttgaaaaatgggaaagaagtaaaaatgagggttgtgttacctagctggctgggtagcagtggatgttgggatattctttcccttttgtgttttaatatatttactgcattgtttctcaatggaccagtcaccagagactaattattgcacttaaatatttgcctgagatactgcaacattctcaaacccatggttgcagtattgtgacacttagatctaggaagtttttgtagaactgctctgtacctgaatactttttgagagaattaagatgtatcaataatgctttgccatatgagttttttaaagtaacttgttcaatttactcacgtgttctaaacatctttccattacatgttctgtattttaatacattgcatattgacaactaggttctataatgtatgctttgaaatttacttttttatagtttacaggaattttattttttgtgcctatttctttttacacctatgtgaaccactatggaacaacttaaattttgtgccataaaaatatttttgtggtaaggtactatttttttagctctagggatatatcagcaaaaacacatcatgcaatttgagacacataattttgtgttgaatgagcacaacataatttgaagcattgcaaggagataaccagacagcagaattaaatggtcctgtctttttcatttttaatttattgtcatacatgggtttcatatttataacggcatcatgagctcattgcacttaatacctgcaatgtttgctactgtaccacaattgattttcaatactttattacgaaggatgaaactgtaatgttttattaacaatgcttctggaaatgaatgcattttaaagcaaataaatctttttgatagaccttttacaaaatccatttgcactaatgaatgctttcttatggcatataacttaatatttgttactgtgtacactgctgttttggaatgttcagaaataaagactctatttcagcaatatcaggtcatgc

SEQ ID NO: 1111 - DNA, 623 bp, Homo Sapiens
  NM_001040162
ccaccgcccccgacgcgacccgcgccgcgtccgcggcggggagttgttgctgccgcgatgctggtggcggcggccgcggagcggaacaaggatcccatcttgcacgtgctgcggcagtacctggatccggcccagcgtggcgtccgcgtcctcgaggtggcctcgggctccggccagcacgcagcgcacttcgcgcgggccttccccctggccgagtggcagccgtcggacgtggaccagcgctgcctggacaggggctcttcagagcagcaggacacctgctcaaacccagggccctgctcatcacctacggggaacccagaatgggggcttcgggacacagccctcctggaggacctgggaaaggccagtggcctgctcctggagaggatggtggacatgccagccaacaacaaatgcctgatcttccggaaaaactaagcccctccttcacccccgcacacctgcatccctgccggaggctctgtgaggcacgaaccctgcctccctaggccggaccttgtggacgacagccccacccagtctgtgctctcagccgctggccgaagggcccagcctgctcagaataaagcatgtcctgctgccggcaaaaaaaaaaaaaa

SEQ ID NO: 1112 - DNA, 2384 bp, Homo Sapiens
  NM_001040167
gcggccgccaccccaccatgctcaagcgctgcggccggcgcctgctgctggcgctggcgggcgcgctgctcgcctgcctgctggtgctcaccgccgacccgccgccgcctccactgcccgccgagcgcggccggcgcgcgctgcgcagcctggcgggccccgcgggggctgccccggcgcccgggctgggggcggcggcggcggcgcccggggcgctggtccgcgacgtgcacagtctgtccgagtacttcagcctgctcacccgcgcgcgcagagatgcgggcccgccgcccggggctgccccccgccccgccgacggccacccgcgccccctggccgagccgctcgcgccccgagacgtcttcatcgctgtcaagaccaccaaaaagttccaccgcgcgcgcctcgacctgctgctggagacctggatctcgcgccacaaggagatgacgttcatcttcactgacggggaagatgaggccctggccaggcacacgggcaacgtggtcatcacaaactgctcggccgcccacagccgccaggcgctgtcctgcaagatggccgtggagtatgaccgcttcatcgagtccggcaggaagtggttctgccacgtggacgatgacaactacgtcaacctgcgggccctgctgcggctgctggccagctacccgcacacgcgggacgtctacgtcggcaagcccagcctggacaggcccatccaggccatggagcgggtcagcgagaacaaggtgcgtcctgtccacttctggtttgccacgggcggcgctggcttctgcatcagccgtgggctggctctgaagatgagcccgtgggccagcgggggtcacttcatgaatacggctgagcggatccggctgcctgatgactgcaccatcggctacatcgtggaggccctgctgggtgtgcccctcatccgcagcggcctcttccactcccacctggagaacctgcagcaggtgcccacctcggagctccacgagcaggtgacgctgagctacggtatgtttgaaaacaagcggaacgccgtccacgtgaaggggcccttctcggtggaggccgacccatccaggttccgctccatccactgccacctgtacccggacacaccctggtgtccccgcactgccatcttctagtggccatggctgagacccaatccctgggcgcccctggtatccaaagggcccagggaccctgttgcgctgccctggcctcggcattcgaggctcccctagggccgtgcctgtgcgtgtgcgtgtgcgtgtgtgtgtgtgtgtactgcatgcccacccgggtagcaggctgctgggcagttctgctctgtggaggggcgggcaccagcgccacttatgtgcctctgctccgagggccagtgggctgcagggcctgcttggaggaaggatttgtgtgtcggaggccactccgagggcaattctgttaggatttttggatctttctacagctacggggctccgggctactttgcagggatgcgatgcgtaggtgcctttctcttcctgctgaccacaagctctgtgctgggggtacctgtgccctgaagtcctggcccctgtgtcatagccccaagtacgactcactgagccatgctcattgcaggggaggctgggtctgggggtgcgtgacccaatccccttcctcctggcctggacgctgtggcttaagagtaacagcagccaccgcccagttccagtggccccacgaagcccccagtggctggctgtccagctgggcaaacagtggcacccctcccagctcttctgagtggggagtcttccaggcctcctcagaggtcttccctttgcctccccaggacagggtgagtcagagctcagcatttaatctcctctccaaagtagagagcaagtcgcccacagtgggcgtgtctgtaaatattgtgacagtatttttttactgtgctgttttttttgaaaggggatgggtaaaaagtagggtgttcttgttttttgcttgggagggtgggggtgggggagggtcttattttatcttatcttttctgtggatcagaaaaaacagaagccaaactcggggtcatctttgtttttaaagctgaagtgggactgtctggcactctgtgtatttatgcgttccagcatctggaacctcccatccctgccctcctcctgtgtagctgccacctccccgctgggcccagcatggctcacctgtcccgtgggctgtgtttcttgttgtttttctctttgcaaagacatagctaggaaagcgaatgataagggaaaagttctcagggaattgaagtgttgttgctatggtgacgtccttttgctgtgaataaaggtgctctttgcagcaaaaaaaaaaaa

SEQ ID NO: 1113 - DNA, 1403 bp, Homo Sapiens
  NM_001040168
gcggccgccaccccaccatgctcaagcgctgcggccggcgcctgctgctggcgctggcgggcgcgctgctcgcctgcctgctggtgctcaccgccgacccgccgccgcctccactgcccgccgagcgcggccggcgcgcgctgcgcagcctggcgggccccgcgggggctgccccggcgcccgggctgggggcggcggcggcggcgcccggggcgctggtccgcgacgtgcacagtctgtccgagtacttcagcctgctcacccgcgcgcgcagagatgcgggcccgccgcccggggctgccccccgccccgccgacggccacccgcgccccctggccgagccgctcgcgccccgagacgtcttcatcgctgtcaagaccaccaaaaagttccaccgcgcgcgcctcgacctgctgctggagacctggatctcgcgccacaaggagatgacgttcatcttcactgacggggaagatgaggccctggccaggcacacgggcaacgtggtcatcacaaactgctcggccgcccacagccgccaggcgctgtcctgcaagatggccgtggagtatgaccgcttcatcgagtccggcaggaagtggttctgccacgtggacgatgacaactacgtcaacctgcgggccctgctgcggctgctggccagctacccgcacacgcgggacgtctacgtcggcaagcccagcctggacaggcccatccaggccatggagcgggtcagcgagaacaaggtgcgtcctgtccacttctggtttgccacgggcggcgctggcttctgcatcagccgtgggctggctctgaagatgagcccgtgggccagcgggggtcacttcatgaatacggctgagcggatccggctgcctgatgactgcaccatcggctacatcgtggaggccctgctgggtgtgcccctcatccgcagcggcctcttccactcccacctggagaacctgcagcaggtgcccacctcggagctccacgagcaggtgacgctgagctacggtatgtttgaaaacaagcggaacgccgtccacgtgaaggggcccttctcggtggaggccgacccatccaggtggggaaactgaggcacggagcagctgatgcccaaggtccagcagccatgctggtgggctggggaggcgctcagactccaagccaggcaggccgtgggtccggccgccccacagctggtaatgctgcacctccctctcctgtgatgtggccccaggccccgaccccgctcaggggtggtgggaagagtcctggagagcaggagcagtgccggagcccccactgcagctggtcccagcccctgcagagatccagacgcttgttttttaaatacagcagctctgcggtgcttttccttcctcaaaaaaaaaaaa

SEQ ID NO: 1114 - DNA, 1179 bp, Homo Sapiens
  NM_001040194
ctgcgctggggttggagtggccgcaacgggcggggcggggcggggccgggcaagtttgttccccgagttcggagcctaggagccccccgcggctgcggcgcaggtgccctcggcctgagtcgggatggagctgcctgctgtgaacctgaaggtgattctcctaggtcactggctgctgacaacctggggctgcattgtattctcaggctcctatgcctgggccaacttcaccatcctggccttgggcgtgtgggctgtggctcagcgggactccatcgacgccataagcatgtttctgggtggcttgctggccaccatcttcctggacatcgtgcacatcagcatcttctacccgcgggtcagcctcacggacacgggccgctttggcgtgggcatggccatcctcagcttgctgctcaagccgctctcctgctgcttcgtctaccacatgtaccgggagcgcgggggtttccttgggtcttctcaggaccgtagtgcctaccagacgattgactcagcagaggcgcccgcagatccctttgcagtcccagagggcaggagtcaagatgcccgagggtactgaagccagccacgctgcgcccggccctgccccgggccttcctcgtgcctgggaggtcgttctagggatgctcctgacctccgtctcttggacctaagatggaatgtgtccccagctcagggattgcctgaaccaagaggccaggagcccccatgggccgcccagtaccatgcacactcctgtcccgaactccctgaggcctcccctcccttcagggcacccactggttcccaggctggaaccagggtctctctttacctcctaccccatggtggcaccacagaggccctcagccgagtcctgcctgagtgttgcaagctcaggcctttaaggactgctgatgccccctcaggcctcccccaagtttgctgggctttggtggaagccctgagagcttcaggtcctgctcagcccgaggagcagtctggcatgggagtgaggccccgtccttctcactgcctggtcacatggtgcctagggatgcagggctggaggccagaggtgtcagcaacactgtgtcccaccacaacctccagcctcccttttcagagcacagcattaaagtttggggaattctgtagaaaaaaaaaaaaaaaaaa

SEQ ID NO: 1115 - DNA, 1276 bp, Homo Sapiens
  NM_001040196
ctgcgctggggttggagtggccgcaacgggcggggcggggcggggccgggcaagtttgttccccgagttcggagcctaggagccccccgcggctgcggcgcaggtgccctcggcctgagtcgggatggagctgcctgctgtgaacctgaaggtgattctcctaggtcactggctgctgacaacctgcttctggagacatttctctgccaaaccaagactggaaaccattgagctcacctgtgcactttgcaaacttcgaagtgcagcgcacagggcaacagctgggctgcattgtattctcaggctcctatgcctgggccaacttcaccatcctggccttgggcgtgtgggctgtggctcagcgggactccatcgacgccataagcatgtttctgggtggcttgctggccaccatcttcctggacatcgtgcacatcagcatcttctacccgcgggtcagcctcacggacacgggccgctttggcgtgggcatggccatcctcagcttgctgctcaagccgctctcctgctgcttcgtctaccacatgtaccgggagcgcgggggtttccttgggtcttctcaggaccgtagtgcctaccagacgattgactcagcagaggcgcccgcagatccctttgcagtcccagagggcaggagtcaagatgcccgagggtactgaagccagccacgctgcgcccggccctgccccgggccttcctcgtgcctgggaggtcgttctagggatgctcctgacctccgtctcttggacctaagatggaatgtgtccccagctcagggattgcctgaaccaagaggccaggagcccccatgggccgcccagtaccatgcacactcctgtcccgaactccctgaggcctcccctcccttcagggcacccactggttcccaggctggaaccagggtctctctttacctcctaccccatggtggcaccacagaggccctcagccgagtcctgcctgagtgttgcaagctcaggcctttaaggactgctgatgccccctcaggcctcccccaagtttgctgggctttggtggaagccctgagagcttcaggtcctgctcagcccgaggagcagtctggcatgggagtgaggccccgtccttctcactgcctggtcacatggtgcctagggatgcagggctggaggccagaggtgtcagcaacactgtgtcccaccacaacctccagcctcccttttcagagcacagcattaaagtttggggaattctgtagaaaaaaaaaaaaaaaaaa

SEQ ID NO: 1116 - DNA, 3739 bp, Homo Sapiens
  NM_001040202
gcgacgctgccgggtccgccgcggcgctggcggcagtggccggtgtgagcgcagagccgggccctgggcagcagcggcagcgcggtaggacctcgcgcagcgtccgcgggctccggggcgggggcgccagcggcgaagccccctccccggggaggcgggacctgggggagctcccgagccggggagcggcggcggccgggaacgatgcatcagaagctgctgaagagcgcgcattacatcgagctgggcagctaccagtactggccggtcctggtgccccgtggcatccgcctgtacacctacgagcagatccccgggtccctcaaggacaacccgtacatcaccgacggctaccgggcctacctgccgtccaggctgtgtatcaaaagtttgtttattttatctaatgagacagtaaacatctggagtcatttgctgggtttctttctcttcttcaccctgggaatatatgacatgacatctgtgttaccttcagcaagtgcgtccagagaagattttgtaatttgttctatttgtcttttctgcttccaggtctgtatgctttgctctgtgggctatcatcttttttcctgccatcggtcagaaaaaacatgtcgaagatggatggcattagattatgcaggaatttctattggaatactgggctgctatgtctcaggagtattttacgcattttattgtaataactactggcgtcaggtgtacttgatcacagtgcttgctatgatcctggcagtgttctttgcgcagattcatcccaattacctcacgcagcaatggcaaaggctccgttctatcatcttttgttctgtttcgggatatggagtgattcctactcttcactgggtttggctcaatggaggaattggtgctcctattgtacaggactttgcaccccgtgtaattgtgatgtatatgattgctcttcttgctttcctattctacatttccaaagtcccagagcggtactttccaggacaactaaactacctcggatcaagccaccaaatatggcatatccttgcagtagtgatgttatattggtggcatcagtcaacagtgtatgtcatgcagtacagacatagcaagccttgtcctgactatgtttcacatttgtgaattaggtatggccacctggtgaattcagttgttaagcaatatataatggggaattgtataccccactatttctaagattcccattagttttccctttttcctttttaatatgagtaatgctttataaaaatgggaaaaaaagtatacttaaggatctgtagtaataactgctttacaaaatccttaaaactactaatttgctgcttgtacagaaagtgaaaattagttggcaatcataagaaacatctgaataacaacgatgaatgggaaactagtgttgaaataggattcattttacttagcaccagcttaatttccttaggaagggctcatgtccattagaaaatggagtcatcttatgtgcttaattattttcagttaattgtcaagtttaagtgcctaatcaaggcaagtgttgtttcagcctatgcttaatgcaagctaggatagtgattttaaataatcactaaaatcactagatttaaataatcactaaaatgatttgtgagaaactggcacttcagatattatatcctttagctataggttcttctctccctaagaacattagatattttagttttccagaacaaaagctttaaacttctgcagtaagttgagagaagggttgagaagaggaaaagaacttctcattttctatcagataagaatcacattagaaactaagtacaagattagacaacaaattatgtggtcaaataatatagtcattagccacctaaacattttaattccagatattatttaattccatataataactgaattcttgtgagtggattacaggtttttgatcccaaaattccagagctttcaactctctgaatttgtagtcctgaatatcccagtggtgggggttcccagcattgtgggtgctacttgcaaggccatagaatctagatggccctgtcttgaccctgaaatgaaccttaagccttagaacaaagtcatgcagatgccccatttgataataatcttattcacctgtgctctggtcctcggtttctgcatgtgttagcattgcattgataactcagaatcttgataaacacttaatatttgggcctgaagcattaaactttctttttattgtatatacttaaaaaatagaactcactgccctatcatacattgtagccctcttattctttggtctttcatatgcattagttaaatcccttaaagtagacattcataaaaacttacattgtttattggagtataaaatattacccaagtttcttcatgagttgacatgagctgttttaaatactggtgtattttcagaacagtaaaattactgaatatcagaaaaaatgttaattgatgatgaagcttattcccaaaatgccttttgtgcatatgatacttggaaagtcactaatgtgcctcagttaatacatcagtaaaatgttgtgtttcttttccagtgtagtgtttttggaatataaattccccatgctagtatagtatctcagcaaagagaatttccccccaggaggctcagtaaaggaataccgtgtcttacccatcgttatgatggaaggctgctttgaaaatggctgttttaccttataaggttaaaattttgatccatatgttaagtgatagaagattttggtgcaacagtagtaggatatatttctcctagaacatcccttattggcttacatgattttattgccttttaatagatattttgtcattttggccaaacaaaagacactgagtagttacacttaagttaaaaatgaggggaaaatcattattttaggtgtggagccatttttattataaaactttctcaaaataaaaaaacattgaatcatttcaatttttgcagtccctgtattagtatatgaatacatacttgccatttgaattaataacatgaaaagagtatactgtgtttttaaatccgtgtttctttgaatttaaagggtgtacaggtctttctgtagggaaaattattccatgtaaacatttcaactctgtatgaaaatgttaaatattgtaagaaagttatcctctcattttttcactgctatgatatatttattataaaatagggaatgaatgaatgaatatggattgctgttaactagaaacacttctgtatgtcagtcagcatttaatgaccacctactgtgtgcacagcactactggtaaaattttgaagacattgttaacattaaaaaatattttaaagttgtctacaaatctgagccttgtaatgatgtatatttaagttatttttgtttttatagattaaagtaagattaaaatatactatccagttttattactaaaaaagactggttttaattttaccaatgtgtgaactataaaagctttttgcctacagattttacattttaaaattatctatggctgttttaaattgtctagcaatttatatggttgtggttaactcatttaagaaacaattatctttctatattaagccattttcaaatagcaagacagtgcttgtctttttttgttattacactaactgcaattcagtaagctgcatgacaaaatatgtattatgtaaataaactgggtttactaaata

SEQ ID NO: 1117 - DNA, 3485 bp, Homo Sapiens
  NM_001040273
aatcgggctcgatgaggaagacgtgagtcagagcttgcgcctctcgcttccagctgtgggtggcgctaggcagcttcagccggaccgggtaggggtcctcgctcgctagcttgctgtttctcggagaagctcccgagtgtccggcctagaggccatgagaaggcagtgggggtctgccatgagggcggccgagcaggcgggctgcatggtgagcgcctcccgggccggacagcccgaggcgggcccgtggagctgcagcggggtaatcctgagccgtagcccgggcctggtgctttgccacgggggcatcttcgtccccttcctgcgagctggcagcgaagtcctgaccgcggccggcgccgtcttcctgcctggcgacagttgcagggacgacctgcgcctgcacgtgcagtgggccccaacggccgcgggtcccgggggcggcgcggagcggggccgcccagggctgtgcacgccccagtgcgcgagcctcgagcccggcccacctgccccgtcccgcgggcgtcccctgcagccccggcttcctgctgagctgctgctgctgctgagctgcccggccttctgggcccacttcgcgcgcctcttcggggacgaggcagcggaacagtggcgcttctcgagcgcggcgcgggatgacgaagtgtcggaggacgaggaggcggatcaactgagagcgctgggctggtttgcgctgctgggcgtgcggctaggccaggaggaggtggaggaggagcgcgggccagccatggcggtgtcgcctctcggggccgtgcccaagggtgcgccattgctggtctgcggctcccctttcggcgccttctgccccgacatctttctcaacacgctgagctgcggggtgctcagcaacgtggccggcccactgctgcttaccgacgcacgctgcctgcccggcaccgagggcggcggcgtgttcaccgcgcggcccgcgggggcgctggtggcgctggtggtggcgccgctctgttggaaggccggcgaatgggtgggcttcacgctgctctgcgccgccgccccccttttccgcgccgcccgcgacgcgcttcaccgcctgccgcacagcaccgctgccctggccgcccttctgccgccagaggtgggcgtcccgtggggtctgcccctccgagactccgggcccctgtgggcagccgcggcagtgttggtggagtgcggcaccgtatggggctccggagtggctgtggcaccccgccttgtagtgacctgtcggcacgtgtcccctcgggaagcagccagggtcctggtgcgctccaccacccccaagcataatcaccagcaacacccgggacaataatacgggggccacctacccccacctgaacttcagcattcccatcacggtgctccagccggccctgcagcagtacagccagacccaagacctaggtggcctccgtgagctggaccgcgctgctgagccagtcagggtggtgtggcggttgcagcggcccctggcagaggccccgcggagcaagctctgaggctgtgttaccacctttggaaagaagagtgacctttttctgctgtaggaagtgatgttgaggtgacggtggcctcaggattcagggcccagcccctgcaggggcccaggctgcctctcatctccacccactgactgcagactgggctttgggctctggggcaaacttctcttcagccccatggatccttaacctggcagcccgttttggggtgctttcttgagcccccagttctctgtcccctagcactagactcagctgtattgtttttccttctggggagcccactccaactgcacagaagttctgggcctgacaggtagattccagctggaaggcaggcccgtgcctggttttgcgtctgttcccctgagggccatcgtcatcctggagcttcaatggggccttggctcctgtctgcctctcagtcagagtcagggctgacaaaggactcagcttccttagcatctcagcagaaaccttgctctgaagaccagagacagaagggacagaaacaggagtgcctcctgctgtgccaggcccatgggcagtgcaggcagatccctgaaggtcagcactcctgggtcttcatatgccaacaggggcgctcttgacactgtgccttcattttccagcccacagcctgggtctcagggatcttgaggggtagaacatgtctggttggggcttgggaataaacatgatctattgaaaaacctctgtatttatatatcaaattgtttctttttttcaggagttgaactgggaataggcaagtaccaggcaaagaaacacaccctttccttttttttttttttttttctttagagctgtggtcttgctctctcacccaggctggagtgcagtgttgcgatcacagctcactgcagcctcaaactcctgggctccaggagacctcctgcctcagcctcctgaatagctgggactacagtcgcgcaccaccacgcctggctaattttttatttttgtagaaatggggtattgctttgttgcccgtgctggcttcagccttctggtttcaagcagtcctcctgcctcagcttcccaaagtgctgggattacaggtgtgagccactgtgcccaacccagaaatacaccctttctgtgctgttttctcagcagggtgtgagctcacgggatacggtcctgccagactggccctcatagctggtcatgtgccagtcagagctgggtggggcttgcaggtcccggaaggtggtggtcttgacctggcagcagatgcttaaagaatgcctaaggtgggtggcagttggggagttcaagggtgaatgaggccagggcagcccccaggagctgaggccaactctttgagtcaggactgtgccgtgtgcccagggccttgcatgtgtgggccctcgagtgatttctactggcaggctgaaagccctgtgaggggcggctgtgggcggaggccacgcaggaagagtgcttaggagtaacttgtttctaacacctgtgtgctgagtgccaatgctgggtgtggtgttatgatatatattggttttcatccagcattcctgactcgtaactctcatagtccttgttccagtctttgttagaatactgggtatgttagggcttgggacaggcctctgacctctgggtatcctttcactaatgttcgcccacctttttcacagtgggtcctaaagaccttcccatgagagggtctcaatcctaggggaaggaatgttgatgtcatgaaccttccataaaaacccaagaggacagggttcagagagcttctggatagctgaacacctggcacttcctggagtgtggcgtgcccagggagggcacggaagctctgcactccttccccttccctcattccttgctctatgtgcatctcttcatctgtatcctttgcgatatcctttataataaaccggtaaacataagtaa

SEQ ID NO: 1118 - DNA, 2475 bp, Homo Sapiens
  NM_001040280
gacgggggcgccccggcctaagcgggactaggagggcgcgccacccgcttccgctgcccgccggggaatcccccgggctggcgcgcagggaagttcccgaacgcgcgggcataaaagggcagccggcgcccgcgcgccacagctctgcagctcgtggcagcggcgcagcgctccagccatgtcgcgcggcctccagcttctgctcctgagctgcgcctacagcctggctcccgcgacgccggaggtgaaggtggcttgctccgaagatgtggacttgccctgcaccgccccctgggatccgcaggttccctacacggtctcctgggtcaagttattggagggtggtgaagagaggatggagacaccccaggaagaccacctcaggggacagcactatcatcagaaggggcaaaatggttctttcgacgcccccaatgaaaggccctattccctgaagatccgaaacactaccagctgcaactcggggacatacaggtgcactctgcaggacccggatgggcagagaaacctaagtggcaaggtgatcttgagagtgacaggatgccctgcacagcgtaaagaagagacttttaagaaatacagagcggagattgtcctgctgctggctctggttattttctacttaacactcatcattttcacttgttttgcacggctacagagtatcttcccagatttttctaaagctggcatggaacgagcttttctcccagttacctccccaaataagcatttagggctagtgactcctcacaagacagaactggtatgagcaggatttctgcaggttcttcttcctgaagctgaggctcaggggtgtgcctgtctgttacactggaggagagaagaatgagcctacgctgaagatggcatcctgtgaagtccttcacctcactgaaaacatctggaaggggatcccaccccattttctgtgggcaggcctcgaaaaccatcacatgaccacatagcatgaggccactgctgcttctccatggccaccttttcagcgatgtatgcagctatctggtcaacctcctggacattttttcagtcatataaaagctatggtgagatgcagctggaaaagggtcttgggaaatatgaatgcccccagctggcccgtgacagactcctgaggacagctgtcctcttctgcatcttggggacatctctttgaattttctgtgttttgctgtaccagcccagatgttttacgtctgggagaaattgacagatcaagctgtgagacagtgggaaatatttagcaaataatttcctggtgtgaaggtcctgctattactaaggagtaatctgtgtacaaagaaataacaagtcgatgaactattccccagcagggtcttttcatctgggaaagacatccataaagaagcaataaagaagagtgccacatttatttttatatctatatgtacttgtcaaagaaggtttgtgtttttctgcttttgaaatctgtatctgtagtgagatagcattgtgaactgacaggcagcctggacatagagagggagaagaagtcagagagggtgacaagatagagagctatttaatggccggctggaaatgctgggctgacggtgcagtctgggtgctcgcccacttgtcccactatctgggtgcatgatcttgagcaagttccttctggtgtctgctttctccattgtaaaccacaaggctgttgcatgggctaatgaagatcatatacgtgaaaattatttgaaaacatataaagcactatacagattcgaaactccattgagtcattatccttgctatgatgatggtgttttggggatgagagggtgctatccatttctcatgttttccattgtttgaaacaaagaaggttaccaagaagcctttcctgtagccttctgtaggaattcttttggggaagtgaggaagccaggtccacggtctgttcttgaagcagtagcctaacacactccaagatatggacacacgggagccgctggcagaagggacttcacgaagtgttgcatggatgttttagccattgttggctttcccttatcaaacttgggcccttcccttcttggtttccaaaggcattttattgcttgagttatatgttcactgtccccctaatattagggagtaaaacggataccaagttgatttagtgtttttacctctgtcttggctttcatgttattaaacgtatgcatgtgaagaaagggtgtttttctgttttatattcaactcataagactttgggataggaaaaatgagtaatggttactaggcttaatacctgggtgattacataatctgtacaatgaacccccatgatgtaagtttacctatgtaacaaacctgcacttatacccatgaacttaaaatgaaagttaaaaataaaaaacatatacaaataaaaaaatcccgactttgggatgagtgctaggatgttgtaaa

SEQ ID NO: 1119 - DNA, 7973 bp, Homo Sapiens
  NM_001040285
acaacgcgctccctgcggggcgggcggcaacctccatgcggcctcgtccacgctcagcaccggggaagccgaggcggagaagccgcgcgcgcctcagaagctcccggacgcccagcggcggcgcgagcggcggcggcggcagcagcagcagcagcagcacggccaccggcgggagcggcagcagcaccggcagccccggcggcgcggcctcggccccggccccggccccggccggcatgtatcgctccggggagcgcctgctgggcagccacgcgctgcccgcggagcagcgggacttcctgcccctagagacgaccaacaacaacaacaaccaccaccagcccggggcctgggcccgccgggcgggctcctcggcgtcctcgcctccctcggcgtcctcgtccccgcacccttcggccgccgtccccgccgccgatccagccgattcggcctcgggcagcagcaacaagaggaagcgcgacaacaaggccagcacgtatggactcaactacagcctgctgcagcccagcggagggcgggccgcggggggcggccgagcagacggcggcggggtcgtgtacagcgggaccccgtggaaacggaggaactacaaccagggagtcgtgggtctgcatgaagaaatcagtgatttttatgaatacatgtctccaagacctgaggaggagaagatgcggatggaggtggtgaacaggatcgagagtgtaattaaggagctctggcccagcgctgacgtccagatatttggaagttttaaaactggactttatttacctactagtgacatcgacctagtggtgtttgggaagtgggagaacctacccctctggactctggaagaagctcttcggaaacacaaagtcgcagatgaggattcggtgaaagttttagacaaagcaactgtacctattattaaattaacagattcttttactgaagtgaaagttgatatcagctttaatgtacagaatggcgtgagagcagctgacctcatcaaagattttaccaagaaatatcctgtattgccatacttggttttagtattgaaacaattcctattgcagagggaccttaatgaagtatttacaggtggaattggttcttatagtctctttttaatggcagtcagtttccttcagttacatcccagggaagatgcttgcatccccaatacaaactatggtgttctcttaatagaattttttgaattatatggacgacacttcaattatttaaagactggcatccggataaaggatggtggttcatatgtggccaaagatgaagtacagaaaaatatgctagatggctacaggccatcaatgctttatatcgaagatcctttacaaccaggtaacgatgttggaaggagttcatatggggccatgcaagtgaagcaggcctttgattatgcctacgttgttttgagtcatgctgtatcaccaatagcaaagtactatcccaacaatgaaacagaaagcatactaggtagaataattagagtaacagatgaagttgccacatatagagattggatatcaaagcagtggggcttgaagaatagacctgagccttcatgcaatggtccagtgtcgtcctcttctgccacacagtccagctctagtgatgtagattccgatgcaacaccatgcaaaaccccgaaacagctgctttgccgtccgtccactgggaaccgagtagggtcgcaagatgtatccttggagtcctctcaggcagttgggaaaatgcaaagcacccaaaccactaacacatccaacagcaccaacaaatctcagcatggatcagcaaggctctttcgttcttccagcaaaggcttccaaggtacaactcaaacaagccatggttccttgatgacaaacaaacaacatcaaggcaaatccaataatcagtattaccatggcaaaaagaggaaacacaagagggacgcgcccctctcagacctctgtagatagtcagcgctgcgcggtggactgtcttctctgtgcaatgatctcatgctcaggacagttgcgcagggactcctgggagatattcaggagcctcacactgttcagacgttgacttagcaactgcgttttttcccagctcgccacagaatggatcatgaagactgacaactgcaaaaaaaacaaaacaaaacaaaaaaaaaagcaagcaaaaaagagggaaaaaaaaggctgcttatttgataagtcatatgctacaacagggtcattttaagatttaaagcttgaatgtaaaataaatatatttctcattggctttatgcagagttatagggaatagtattcagtgttggtagggtgatagaaacaaaaaacagtatcagaggatgaggtggggaaggaaaacaaaggtatctgataggaagtccagattccaaaggggaaagtgatctgtgcatgttttttttttaaatatttttgcatatatttaccattttattgtgtgtatatatagaagaccatataggagattgatatttgtaatagtggatttgttaataatactttttacataacattactgtttaaattgtaaacagattttttctcaggattagtttgaaaaataatctaaattgtcatcttaacatccatatatagggaagtgattagttctattactcaatttgtttttctcagcattgaaatgacttaatagaacccttgtgtcctgctgcaaaaatttttcctctctaaagaaaaggtttatggtggcaaatgatgtttattttattttgtaaaaaaaaaaaaatgtactatgtacttttgtgtaaacactgaaaaatctctggtcatctccgagaattaacttgcaactgttttctatagtgctgtcgtcttgggcaatgggcaattacatgactttgtgtttgcttcctttgcagtcttttttttttccccccatttcttcctaataggaaaaaaaaaaaaaaaaaggtcacccatgtctggtctcattcctgttgcagtgaaacttcgagttccacagactttgcatgctggcttctctaaccctgtgtgctgcgtgtgcctgtttctcatctcttattctttttaaaattcatgcttaactactgtgggagaataactgtaaacagctttaattaaatcatacttataaaaaactattttcttatattccactctatgcttttggtattgttgatctttacaaattaaatggtctttgataatggatctattttgtattgccttattaagaccaaatacttcttgtcatcccattctttatcctcttctttcatggaattgttatcgttaattaaaacttttttaaacattggcttgtttcaatcatactgtaaattttggttgtagtcagctttgagtgcaatgagatgtataattctgttatcattacctgttgagtttgaaactcagttgggaatatttaatataatagaatgtaagtgacatttctgaaaatgctttctttcagggtgaaagctcttatgtttagcatcaatgtgtatggctctgttaaatgcagccatttctgagacgagattcttttatatatatatacatataaagtactattggcttttaggagtttcttttatatacatttatgaaatactgaagaccaatcagaccattaatggacacttagtgtaactttttataaagaaaataatgctaaagtaagaccaaaactgatgtcatcactgaaattaacaattttcaatatgttcatattttaattcacaatggaaaaatgtgttccaaaactggaaactcatagtactcgtgtaaactgtggaagatttcaaatgtgatgttattttgacaatgttttaaattttagagtcacattttattctgatcagaatttttattgagatgttgagcttttgtttttgaaactagtttgtcataacattgtgcataatcacagtatttattttctaggacaattgtgaatgtgtagacttatgtttactgctaagggaacaattatttataaaataatattaaatccagtattagctgcctatttcagacacttaatacttgcagagatctatgttacatttaccacactgaagttttttttgttgttttttgtttgtttttaaagaatcaccctcattgttgaaagtaaatgtactcttagggtgcgaatattagtgttccaataagcatgtgattatattaaggtggtggtagcgggaagataattctgattccattgggaatcttaggttttcgtaaatttattgggaaaatagtttttcctgtactgctgaagtttctttttggtaaacagtatctttctaaaagaaaaaagcatgaaggagaaattgaggtgtgtatacatttcctcaaatgaccagcattgtattcgtgaatactgtgtatcttgcagtgaacagtgtggaagctgttcatttttcaatctgaagtaaaatactttcaagaacttttagtttgcctgctcatttgttttatacatttcatctatttgactcctatcttatttcttttttgagttttaatacttcctatattttgtgaatatatcagaaatgtgtcatttatatattagagtccattcatatccatgaatcataaccttcctttgctaatacttgttgaatgggattttacaaattctccctcactctggtgacatttctcaggcagtcatgtatgtgtacctggccattagaaatattaatatttaaagactgttttttagaggagctgatgggttggtgaggtgtcagcacaaaatcttactggttatgttttgatgataaaagtatatccattttttccctccagctttaaggtgactgtgaaggtgcctggttttgaatgtctttgtttggtttggagatgtcgcactcagttttcaaatctagcttggatctgtaggacctatgttttttacaagtaattgccctccagtcttcaacagttgattctgttttatttttatcctgttttgagtgtactttacctttacttgcattttgagcctcattaatatttaggttatttgatttggctccagatattcctagatctgcacagggcaaaacatgggctatagggtgagcatttttaattgtctttttctgctggaaccttatatctctccatgtgttttctgctccttccctcccccatgaaatggtaagtgtgacttgtgtttgcctgaacctgtggactagtgtttggggtttctggaaacactagagggtcagaaaagagtaatgaccaccgtgacgtgcaggattctcttgctgtgacatgttcattgcaaagccctctccagtgactaggaggtgtagttattaaggttgatctgttagaaatcaccattattaggtattagtggtagatgttgctgatacttttattggtcatgactacatctcagttttactttaatattgatctatagtttgatcagttccttgaattctaatatgttgatttctcagtgtttctgtcactaaccaagaatgtttctaggcagttggttgcttcacagtcaaaactaaatggtaaactatcaaaaatacattcccaattttgctgtgataaatattgaaatgttaaaattaatgaacagaagaatttattcttacccatctattcttgttctcctagttcattaaactttcagttattggaaaggcacattctcaaagtattttatgagcaaaatattctataaatgcgtctaacaaacctaattgaatataaaagttatatttagtagttactgttgatagtaattttcatcagggtcatagttcatctagtaaaatatttagagaatgatgttaacattccagcattaaagtgggaacaaagatttatatatgaaattccttaaaagagttcatcttgccttggtttctgaccctcaagactctagctacctgccatcttgtcaaaacatttgtgggtagaataagtgttaaagatcaaattttaatatgcttctcgatatttaacatagctaagaagccagattttactgtagaagttatttacatgatttgaaaacttgacctaactggaagcctttttctcagtcatcttgttctaagccatcttgacttcacacccttagcgacttttcttttttttttggtcaaagataatgagctaaatatatatagacgttgaatgttgacaaaattattaaccagaaaaattgcttataaaggctgctgatctatttgatacctagaattaaatatttgaggacagtttttagttaataaactgctaatgtttattttactgtctctcaggtttttggtttttttaaaaaaaatgtgtttggcctttacattttctacttaagtgtgtactttattgagtttaaccttgtctgtagcctagtagcctgaaagaaaaggagacagaaccagagagatggatgtagtgcattccctttggttattacacatttgtggtagctcctggatttactgagagatattttagctatgtcaataagaacagctaatgatgtggaaatcaggtgttctcttgtgtatttcagtgaacatttttattagtagttgcatatcatctctagttccacattttaacttaacgtctttgtggcttcaccactgagctacctttcactacaccagcttctgtgtggcctggtaacatggaaggtctctcctaaggacagtctggacgtattttgggggaatgttatttatcttaaagatgcctagaaacaaaacgcatatagtaccagtgagaaactatgaagtaaacaagttgctcaggccgggcatggtggctcacgcctgtaatcccagcactttgggaggccgaagcgggaggatggcttgaggctgggagtttgagaccttcatctcttaaaaaaacaaacaaaaacctgaatggtgaggtgtggtggaattgggtaggggagggaaaggaggacttggaaaagcattctccaaagccagcaacttggtgaagttcagtacttgcctcttagaggttaggccatgcctttcaaagagagtgaaatgatgggttatcagccacattcttggagttaatatttttcttcatctttcagtttgggttctgtgctattcatagttcttccctaagaccatttcattattaccttttatatttagttgcaatttattataatatgttgttttgtccctgaacttaatctcctaattttaagatcctctctgatttttgcatattgaaacttacagaagtcactttaaaaaagtcttttgaaagtcctacaatcctaaaataaatcacaagcttgtttgttagacgtgtcaagagtctccagtctttactactaaaaagcagcactgccttaacacacattgttatgggtgaaaagtgagggacgaccagtgtagtttctggatataaagtgtgaaggactgttgagttaaacatttttagtggaatatacatagataacgtgtatttagaaactttggtgaagccagtatttgtttttagtaacctttttatgtatttccttctttgattagcattgtcttcagtgttaagaaatgtggactcctgtgaggtgctggaggtttgaatcatcttgaaaactttccaatcttgtctagttaccactgcagagacactaaggaatttaccagaaaaagatatttgatacaagtgatttaagaaatctcaacatttcctgaggccgtatcactgggcaaccagtgatgaaaactatgaatgaattgcacacctggaagattttttaagctaatgacagtttcttcaaagatgtcaattatttgccttggaaattttataaattgcatttctatgcacatcggcctctagtgcttaccactcggtttattattcataatctgcaattcaataaaggctttgtgttttcatttatcttcaaaa

SEQ ID NO: 1120 - DNA, 2306 bp, Homo Sapiens
  NM_001040409
ggggcctgccacgaggccgcagtataaccgcgtggcccgcgcgcgcgcttccctcccggcgcagtcaccggcgcggtctatggctgcgacttctctaatgtctgctttggctgcccggctgctgcagcccgcgcacagctgctcccttcgccttcgccctttccacctcgcggcagttcggggaatctctccctaggtcaggttggagtgcagtgctgcaatcacggcttactgcagccttgacctcctgggctcaagtgatcctcccacctcagcttaaatgaagctgttgtcatttctggaaggaaactggcccagcagatcaagcaggaagtgcggcaggaggtagaagagtgggtggcctcaggcaacaaacggccacacctgagtgtgatcctggttggcgagaatcctgcaagtcactcctatgtcctcaacaaaaccagggcagctgcagttgtgggaatcaacagtgagacaattatgaaaccagcttcaatttcagaggaagaattgttgaatttaatcaataaactgaataatgatgataatgtagatggcctccttgttcagttgcctcttccagagcatattgatgagagaaggatctgcaatgctgtttctccagacaaggatgttgatggctttcatgtaattaatgtaggacgaatgtgtttggatcagtattccatgttaccggctactccatggggtgtgtgggaaataatcaagcgaactggcattccaaccctagggaagaatgtggttgtggctggaaggtcaaaaaacgttggaatgcccattgcaatgttactgcacacagatggggcgcatgaacgtcccggaggtgatgccactgttacaatatctcatcgatatactcccaaagagcagttgaagaaacatacaattcttgcagatattgtaatatctgctgcaggtattccaaatctgatcacagcagatatgatcaaggaaggagcagcagtcattgatgtgggaataaatagagttcacgatcctgtaactgccaaacccaagttggttggagatgtggattttgaaggagtcagacaaaaagctgggtatatcactccagttcctggaggtgttggccccatgacagtggcaatgctaatgaagaataccattattgctgcaaaaaaggtgctgaggcttgaagagcgagaagtgctgaagtctaaagagcttggggtagccactaattaactactgtgtcttctgtgtcacaaacagcactccaggccagctcaagaagcaaagcaggccaatagaaatgcaatatttttaatttattctactgaaatggtttaaaatgatgccttgtatttattgaaagcttaaatgggtgggtgtttctgcacatacctctgcagtacctcaccagggagcattccagtatcatgcagggtcctgtgatctagccaggagcagccattaacctagtgattaatatgggagacattaccatatggaggatggatgcttcactttgtcaagcacctcagttacacattcgccttttctaggattgcatttcccaagtgctattgcaataacagttgatactcattttaggtaccaaaccttttgagttcaactgatcaaaccaaaggaaaagtgttgctagagaaaattagggaaaaggtgaaaaagaaaaaatggtagtaattgagcagaaaaaaattaatttatatatgtattgattggcaaccagatttatctaagtagaactgaattggctaggaaaaaagaaaaactgcatgttaatcattttcctaagctgtccttttgaggcttagtcagtttattgggaaaatgtttaggattattccttgctattagtactcattttatgtatgttacccttcagtaagttctccccattttagttttctaggactgaaaggattcttttctacattatacatgtgtgttgtcatatttggcttttgctatatactttaacttcattgttaaatttttgtattgtatagtttctttggtgtatcttaaaacctatttttgaaaaacaaacttggcttgataatcatttgggcagcttgggtaagtacgcaacttacttttccaccaaagaactgtcagcagctgcctgcttttctgtgatgtatgtatcctgttgacttttccagaaattttttaagagtttgagttactattgaatttaatcagactttctgattaaagggttttctttcttttttaataaaacacatctgtctggtatggtatgaatttctgaaaaaaaaaaaaaaaaaaaaaaa

SEQ ID NO: 1121 - DNA, 772 bp, Homo Sapiens
  NM_001040431
gcaacatggcgtcttcgggagctggtgaccctctggattctaagcgtggagaggccccgttcgctcagcgtatcgacccgactcgggagaagctgacacccgagcaactgcattccatgcggcaggcggagcttgcccagtggcagaaggtcctaccacggcggcgaacccggaacatcgtgaccggcctaggcatcggggccctggtgttggctatttatggttacaccttctactcgatttcccaggagcgtttcctagatgagctagaagacgaggccaaagctgcccgagcccgagctctggcaagggcgtcagggtcctaatctggatgggtattgatcatgtccaacctgctggagccccttcacatggtggatgatgccccatgaccctgtagaaattgaatcctgctcacaacattgttggccttcttactaaccttggaccgtgattgagcccaagaaaccagggacttacgcatttggccaatgtcaaaagaacagaactttgcccactgcacacttgctgtgtacaatgactgagccctttcttgtagtttgtttccttgtttgagaggtgtgcatgcgaccgtggcttttcccaaagtttctgactttgtggtttacccccttcaccttccagggacgcagttgttacgaggttagacgtggcagctctgtgcagtgtttgagcctacagtgggatacatagggtcaaattgagaataataaactgagtcattctcctggaaaaaaaaaaaaaaaaaaaa

SEQ ID NO: 1122 - DNA, 842 bp, Homo Sapiens
  NM_001040437
ctttttgcgaagtgggctcgtgggttggcagtatgagagttgtaatggcccgactgttgagtgagggggagcaggggatcccaacggcttgcgctgcctttgcgcagcagccggcgggcggccacgtcgcggcctggctggggtaggagagggcggtccccagtgcagttgggtgaactaccgttgcacactggagtttctggtgtctttgcttggaactgacctagctcgtggcagggggaactcggctagcggccccacagcccctgctgactcaaaacaactgagttgtaagacgttcatcgccgtgttatccttgagtaaagaagcgggcttttgccatgttgtccaggctggtctctactcctgggctcaagcagtcctcctgcctcagtctcccaaagtgctggaattacagggaatgaactctggaagcccagccagggacaatgcaccttcacagagattctgcactaatctgagtgaaggtctaaggtttggaatctccccctcatggagagaagctttgtatggctgtcatgcttagacagtgattcctgcaacttgaccttcaggctgggagaggtggagagccatgcctgttctccttccttgctatggaatttgctgacacaatatcttccgcctggtgctgggcatatcctaagaacttacaactttcctgtattatcctgtgtgagcagctgtcaccttattgggggaaaaatgcctgaaaattagggggcacttcaagtagatagcttctatttcctatatttgtcttatatacaagtatttgcttttatcaaaataattccaataaagcattttaaagtaaagaa

SEQ ID NO: 1123 - DNA, 3919 bp, Homo Sapiens
  NM_001040455
gccgccgccaccaccgctgccactgccgccctgccggggccatgttcgctctgggcttgcccttcttggtgctcttggtggcctcggtcgagagccatctgggggttctggggcccaagaacgtctcgcagaaagacgccgagtttgagcgcacctacgtggacgaggtcaacagcgagctggtcaacatctacaccttcaaccatactgtgacccgcaacaggacagagggcgtgcgtgtgtctgtgaacgtcctgaacaagcagaagggggcgccgttgctgtttgtggtccgccagaaggaggctgtggtgtccttccaggtgcccctaatcctgcgagggatgtttcagcgcaagtacctctaccaaaaagtggaacgaaccctgtgtcagccccccaccaagaatgagtcggagattcagttcttctacgtggatgtgtccaccctgtcaccagtcaacaccacataccagctccgggtcagccgcatggacgattttgtgctcaggactggggagcagttcagcttcaataccacagcagcacagccccagtacttcaagtatgagttccctgaaggcgtggactcggtaattgtcaaggtgacctccaacaaggccttcccctgctcagtcatctccattcaggatgtgctgtgtcctgtctatgacctggacaacaacgtagccttcatcggcatgtaccagacgatgaccaagaaggcggccatcaccgtacagcgcaaagacttccccagcaacagcttttatgtggtggtggtggtgaagaccgaagaccaagcctgcgggggctccctgcctttctaccccttcgcagaagatgaaccggtcgatcaagggcaccgccagaaaaccctgtcagtgctggtgtctcaagcagtcacgtctgaggcatacgtcagtgggatgctcttttgcctgggtatatttctctccttttacctgctgaccgtcctcctggcctgctgggagaactggaggcagaagaagaagaccctgctggtggccattgaccgagcctgcccagaaagcggtcaccctcgagtcctggctgattcttttcctggcagttccccttatgagggttacaactatggctcctttgagaatgtttctggatctaccgatggtctggttgacagcgctggcactggggacctctcttacggttaccagggccgctcctttgaacctgtaggtactcggccccgagtggactccatgagctctgtggaggaggatgactacgacacattgaccgacatcgattccgacaagaatgtcattcgcaccaagcaatacctctatgtggctgacctggcacggaaggacaagcgtgttctgcggaaaaagtaccagatctacttctggaacattgccaccattgctgtcttctatgcccttcctgtggtgcagctggtgatcacctaccagacggtggtgaatgtcacagggaatcaggacatctgctactacaacttcctctgcgcccacccactgggcaatctcagcgccttcaacaacatcctcagcaacctggggtacatcctgctggggctgcttttcctgctcatcatcctgcaacgggagatcaaccacaaccgggccctgctgcgcaatgacctctgtgccctggaatgtgggatccccaaacactttgggcttttctacgccatgggcacagccctgatgatggaggggctgctcagtgcttgctatcatgtgtgccccaactataccaatttccagtttgacacatcgttcatgtacatgatcgccggactctgcatgctgaagctctaccagaagcggcacccggacatcaacgccagcgcctacagtgcctacgcctgcctggccattgtcatcttcttctctgtgctgggcgtggtctttggcaaagggaacacggcgttctggatcgtcttctccatcattcacatcatcgccaccctgctcctcagcacgcagctctattacatgggccggtggaaactggactcggggatcttccgccgcatcctccacgtgctctacacagactgcatccggcagtgcagcgggccgctctacgtggaccgcatggtgctgctggtcatgggcaacgtcatcaactggtcgctggctgcctatgggcttatcatgcgccccaatgatttcgcttcctacttgttggccattggcatctgcaacctgctcctttacttcgccttctacatcatcatgaagctccggagtggggagaggatcaagctcatccccctgctctgcatcgtttgcacctccgtggtctggggcttcgcgctcttcttcttcttccagggactcagcacctggcagaaaacccctgcagagtcgagggagcacaaccgggactgcatcctcctcgacttctttgacgaccacgacatctggcacttcctctcctccatcgccatgttcgggtccttcctggtgttgctgacactggatgacgacctggatactgtgcagcgggacaagatctatgtcttctagcaggagctgggcccttcgcttcacctcaaggggccctgagctcctttgtgtcatagaccggtcactctgtcgtgctgtggggatgagtcccagcaccgctgcccagcactggatggcagcaggacagccaggtctagcttaggcttggcctgggacagccatggggtggcatggaaccttgcagctgccctctgccgaggagcaggcctgctcccctggaacccccagatgttggccaaattgctgctttcttctcagtgttggggccttccatgggcccctgtcctttggctctccatttgtccctttgcaagaggaaggatggaagggacaccctccccatttcatgccttgcattttgcccgtcctcctccccacaatgccccagcctgggacctaaggcctctttttcctcccatactcccactccagggcctagtctggggcctgaatctctgtcctgtatcagggccccagttctctttgggctgtccctggctgccatcactgcccattccagtcagccaggatggatgggggtatgagattttgggggttggccagctggtgccagacttttggtgctaaggcctgcaaggggcctggggcagtgcgtattctcttccctctgacctgtgctcagggctggctctttagcaatgcgctcagcccaatttgagaaccgccttctgattcaagaggctgaattcagaggtcacctcttcatcccatcagctcccagactgatgccagcaccaggactggagggagaagcgcctcaccccttcccttccttctttccaggcccttagtcttgccaaaccccagctggtggcctttcagtgccattgacactgcccaagaatgtccaggggcaaaggagggatgatacagagttcagcccgttctgcctccacagctgtgggcaccccagtgcctaccttagaaaggggcttcaggaagggatgtgctgtttccctctacgtgcccagtcctagcctcgctctaggacccagggctggcttctaagtttccgtccagtcttcaggcaagttctgtgttagtcatgcacacacatacctatgaaaccttggagtttacaaagaattgccccagctctgggcaccctggccaccctggtccttggatccccttcgtcccacctggtccaccccagatgctgaggatgggggagctcaggcggggcctctgctttggggatgggaatgtgtttttctcccaaacttgtttttatagctctgcttgaagggctgggagatgaggtgggtctggatcttttctcagagcgtctccatgctatggttgcatttccgttttctatgaatgaatttgcattcaataaacaaccagactcagtt

SEQ ID NO: 1124 - DNA, 1756 bp, Homo Sapiens
  NM_001040456
gccaagggaaactgccgcgaggaggcggaaggagcagaggaccggcagccggcgtcgaggcggggcgcgggaacgacggcggccatggcggcctcggggcccgggtgtcgcagctggtgcttgtgtcccgaggtgccatccgccaccttcttcactgcgctgctctcgctgctggtttccgggcctcgcctgttcctgctgcagcagcccctggcgccctcgggcctcacgctgaagtccgaggcccttcgcaactggcaagtttacaggctggtaacctacatctttgtctacgagaatcccatctccctgctctgcggcgctatcatcatctggcgctttgctggcaatttcgagagaaccgtgggcaccgtccgccactgcttcttcaccgtgatcttcgccatcttctccgctatcatcttcctgtcattcgaggctgtgtcatcactgtcaaagctgggggaagtggaggatgccagaggtttcaccccagtggcctttgccatgctgggagtcaccaccgtccgttctcggatgaggcgggccctggtgtttggcatggttgtgccctcagtcctggttccgtggctcctgctgggtgcctcgtggctcattccccagacctctttcctcagtaatgtctgcgggctgtccatcgggctggcctatggcctcacctactgctattccatcgacctctcagagcgagtggcactgaagctcgatcagaccttccccttcagcctgatgaggaggatatccgtgttcaagtacgtctcagggtcttcagccgagaggagggcagcccagagccggaaactgaacccggtgcctggctcctaccccacacagagctgccaccctcacctgtccccaagccaccctgtgtcccagacgcagcacgccagtggtcagaagctggcctcctggccctcctgcacccccgggcacatgcccaccttgcctccgtaccagcctgcctccggcctgtgctatgtgcagaaccactttggtccaaaccccacctcctccagtgtctacccagcttctgcgggcacctccctgggcatccagccccccacgcctgtgaacagccctggcacggtgtattctggggccttgggcacaccaggggctgcaggctccaaggagtcctccagggtccccatgccctgagagaatttctagggaagtcatctcacttggccttctgaaggtcctccctaagagtctcctgacaaaagttacttattgaacacctctatgtgccaggctctgtgttgggtactttgatcaatgcccctgtttcagtctcatctgtactcacggcagccctgtggagtacggtgtactggcccagcttacagatgcagaaagcgagacgttctgccatcagataaagtcacgtggctctttagtaacacggacaaggctcctcgccaaggaactcgtggcagaagagggcagcagttggcagtagctgccgatgtctgtccccagctccaccattcctccctgtggctgtgccgtgctcgtggtttcagtgtccgtgtgtccatgtgtctgcccttcaggagctcgcagctggtgtgcttggcggtcccaggcctgtgtagtgtctctcccctgctgcgggcgcccccaccccgattcctctccccagaagcggtgggatgggcccccatgaactgcagcagcatgctgaggtgtccatgttgtctgcctttgtataaagaaacagcctctgacctgc

SEQ ID NO: 1125 - DNA, 2573 bp, Homo Sapiens
  NM_001040614
gaactacggtggcccagagcgggcatttgtgttccctcaaatggcggtgtgaagagagttcgcctgagccagatcccagttttaacaagggaggcatgagacatcaatcaagatatgtaaaatgaacattggttcagtccagaaaggtgggacaactcttaagctgggagggggcttccaggtcacaggtttcactgaagaaacttcttagagattcattgcacttctgagatttaatgtttacaacttggagttgtcgaccttcttataagatacattttggaagtcaaaatgaaagttttctgtgaagttttagaagagttatacaagaaggtacttcttggagccacacttgaaaatgacagccatgattacatcttttatctcaacccagcagtttcagatcaagattgttctacagccacctccttagaatgggcaaacacctgtggtatccagggcaggcatcagcccatctctgttggtgtggctcccattgctgtagcacctgtgtgtttgaagaccaactctcagatgagcggttccagagaagtaatgctccttcagttaacagtgatcaaagtgatgacaacccggatattgtctgtcaaaaccgagttccatgcaaaggagcagtacagagatgtaattaaaattctcttagaatcagccaaagtcgattctaaattaatctgcatgttccaaaattcagataaattgttatctcacatggctgcacagtgccttgcattgcttctatatttccaattgagagaaaagataaccttaagtaattcctggattgctttttgccagaaaaatctttctgaatactctgagagtaataaagcaatatactgcctctggactcttacagcaataataaaagaaatctttaaagattcatgttcacagaaaacagaaattctaaagcagttcctgactcatttcgacaccatttttgaagtgttttacaattccttattctctcagcattttgaaaactgccgggatacttctaaaatagtaaacatcctgatgtgtttcctggatttgcttgagcttctcatcgcctccagaatccacctgaagttacatttcacttgccagaggattttatttttgaaaccatcttgcatgctagaagttattacctggcctattcaggcttttgttaaaaggaaggtcatcatattcctcaaaaagtgccttctctgtaaagtgggtgaagacctctgtcgtggatctgtgcctgccttaatgccgccagaccatcatgtagcggtggacatgctggctttagctaatgctgttttgcaagctgtgaattcggggttgttgaagacactgtctgtttatgaaaaacattccttttttggaggtgatgaagttcaacctgaatgtgaacttatcactagtccagatcatgtgatccttagagcagcaagcttagttataatgaaatccttagaaatcaagtttcaaaattattcttcagcaagtgaaatgaaagttgacttacagaggttcatgtctgagttactgaccttcttaaagcctcatcttcagccctctctgcaattacacaatccgtgcaaatggctgtctcgggttttcatagaacaagacgatgacatgctggaggctgccaaggcatcactgggcatctacttaacactgaccagaggatgtgaagccactgaaagcttgactcagggaaaagaaatgtgggaccatcacacacatgaaaatggctataatcctcactgtattttcttgttcttcttgaaaaatataggatttgattccacagttcttcttgactttttgatttcatcagaaacctgttttcttgaatattttgttagatatttaaaattactgcaaaaggactgggataattttttcaccatttgcaataactttgatgcaactgaatctaaatatgacataagtatttgtggctgtgtcccctcacttgtccaagaccaaagctccaaccaaacaataccccatcgtttgactgctcctcatagtcacagagatgtgtgtgctcggcactcctgggcttccgatgctccctctgaaccactgaaagctgtgatgtccaagggggctcacaccatgtgtgcttctagtctgtcttccccccgggcctctcaaagtctggtagattacgacagctctgacgattctgacgtggaatccacagagcagtgtttagctaacagtaaacagacatctttacaccagcaagcaactaaggagattcaggatgcagctgggacaagcagggataaaaaagaatttagccttgagcctccatcaaggcctctggttctgaaagaatttgatactgccttctcctttgattgtgaagtagccccaaatgatgtcgtctctgaagtgggaatattttacagaatagtaaaatgcttccaggaactacaagatgccatctgccgtttgcaaaagaaaaatcttttcccatataatccaactgcacttttgaagttgttaaaatacatagaggtgataagtaataaaactatgaacactttgtaaaacattga

SEQ ID NO: 1126 - DNA, 3673 bp, Homo Sapiens
  NM_001040626
gacggtgctgtccagggggaggcgggcggagggaaggcgctgccgctgctgccgccgcctcgcccgaagcgacacagacgctgggagcggccgaggcgagtgatttcttctgacttgagcctgcagtgtgctgtgagagatctaccactagattatctcaactttggtctcctgggaccactcgttgctgacagtcagaaattgcagggcatctgatctcctggtgttaaaatctgtcgtgataccgaggaaggccccgagatcccaggcactgagtgactgcatactctgaattcttgccgccaggatggggaaacagaacagcaagctgcgcccggaggtcatgcaggacttgctggaaagcacagactttacagagcatgagatccaggaatggtataaaggcttcttgagagactgccccagtggacatttgtcaatggaagagtttaagaaaatatatgggaactttttcccttatggggatgcttccaaatttgcagagcatgtcttccgcaccttcgatgcaaatggagatgggacaatagactttagagaattcatcatcgccttgagtgtaacttcgagggggaagctggagcagaagctgaaatgggccttcagcatgtacgacctggacggaaatggctatatcagcaaggcagagatgctagagatcgtgcaggcaatctataagatggtttcctctgtaatgaaaatgcctgaagatgagtcaaccccagagaaaagaacagaaaagatcttccgccagatggacaccaatagagacggaaaactctccctggaagagttcatccgaggagccaaaagcgacccgtccattgtgcgcctcctgcagtgcgacccgagcagtgccggccagttctgagccctgcgcccaccaatcgaattgtagagctgcttgtgttcccttttgattcttctttttaacaatttttttttttttttgccaaacaatatcaatggtgatgccgtcccctgtgcggtctgatgcgccttcctccgtgacgccttcagcttcttttgtcgtggatgcttcgtgggaatgcccagagccccagtgtgcttgtggagagcatggacagacttcgtggtgttcattgtttgatgatttttaatcgttactattatttttttttattctaatgtctctgttctaaaacgtaagactcgggggttggggcaaaagaagggaaacccatccagtcctgtgattctattgcaagcttcaaggggcttttgtttgaaagacaaaactccccacctgaatctgttgtcacacgtgccgtaggggtgatggatggcaccggatgctggattccccaagaacaagttaccctctggggtgaggctattccagcgagctgggacatttccccatgggggcccactcccctctcttccccagcaggctgtagtttctaagctgtgaacatttcaagataaattaacagaggagaggaaaaagatggctcagctattttttcacaggtttacactagttgagctaatatgcgtgtctttggaaattaaacacaaatggtaacatattccaaaaccagacccatcttgttgcctattgtgataaaataaaaagacggctgtatataacatattgggtaatgcagaccaaattaagtgttttgccttgtttaaatgaaatgcatgtttagtgagcactaatacaatcttattccagaagactgtttttagtagcttattgtgaagtaagacaactataatgaatgtctgtcttgtttggaagtcatatctgtctttgcacaaatgtaccaatcgacaagtatattttatatattccataaaaatacaaagtaaccctgactagggcccaactttaattttgaatgcatttccagagtggccatgcctagagggcagatgcagagcaggtggtagtgggacaggacaattggagcacaggaatgttaacatgtatgacaggggaccagtagggtggtttccctctcaggcccagcagcccattgacagcattagactggcggcatggtgcttttctgagcagatcaatactctgcagactcgaaaaaacatcacatacattcttggaacttcccagtggtttaatctatgtgcatggttagggagccaggtctggaatattcagtttccctgcccctgttaaagaatcagaggttgggcagtcatcaaattcatcataaagacatgggcaagtgtgtctgtggtttccaaggcccccctatggagaatccaaaagtattttccattgccgtgctctttgaatgcagacttctatttccagaagtgacagcacaagtctgagttgctgtttggtctggtgacctcagacacactaatttgaattgaaagctaagagtaaaaatttgctggttacaggcgagtcatactcttgcaagtagttagcaaagggaggcccaaattctcaaggttgttgatggggaacttgccactaagagaaggcagagaggtccctagtgggtatatttgctgccaagccacttgccaaagaagaggaaccacagaaagagagacatcatgaccaggagaaaaatgtgactagacatgctaacctccaggtttttatatatgacttgagtctgctgtaattggcagcagaaatccaaatttgtatggtagaccaaaaagaaccaaatccatagggtgaaattttgagacctagactctgtaaaaataatcctagtcttcctccaggggtcagttcctcacagtggttctgtaccaaaacttgccaaattcctccatggccaagtgttaaaatctgtgtttggaaaatagcgaattaacctaagacacagaaggcagactgggtgaggagacctagcatgccctattggcagtgctcaggagctgcatcccacttttccctgctctgaatcgaagtcctagttccttcctttgattctcctttggtaggtggaatcagttaatgttttgagaaacctgcctgggctctgcccttagtcatgacatctcgctgagccagacccactctgttccttggaacctagagctggagtgaggagtagaggtctccggctattccagaaagaaaagtgagccacatgcaggctgatgaatgccgacacttccagaatgtatagaaatagtccctgtcctggcctgccactgaccctgtctgtattttctcggaggttgtttttctccttctccttcccaggaaggtctttgtatgtcgaatccagtgcactcaagtttggccaagggactccacagcacccagaagactgcatgcctcaaggtttatgtcactcctctgctgggctgttcattgtcattgctgtgttcagggacctttggaaataaaacctgttctgtcccaaataaaaccagcctgtgatgttcaagggactggaataaagtggcttacgacctgaaggattctacagagtgctcaactgttcatacatcattcagagtgggagggagctgggggtgctgtcccatcccatctgtatgcccacggtggatttaataatatataatttataaatcatagcctatggagtggcccgtaaatcagttgactgtgtagctcttgcctggcattaaagcatgtttttggtttaacatgaaaaaaaaaaaaaaaaaa

SEQ ID NO: 1127 - DNA, 3154 bp, Homo Sapiens
  NM_001040633
agtttcctccccagcagcgcctgacacaggtgggaatgacagtttgctgcagtcccgtcaatgggggaatctgcccgagctctgcctgcattttgagcagcaaagcagctccagccaccaagaccgttgcctgcgctgtcttaggccagcccatgctgtctgccagccgcttgttgcgctgccttggggactgggaacacacccagccccggtccccatctgttgcagacatgcagtggcagcagctcggagcacagccgaaccctagaaattgcctgtgctgaaggggctgggaaaccccttctctgatggacctttcgagtgaggcagcaggatttgtcagagctgggagtgccgcccgtccccgtcactcgcatcctgccatccagcagcttacaagcctgcactgcttattagcatctggaagagaagacctccaggaccccttggggctgagacctgagctccttcgccatgccgctcctggacggagacctggagggttccggaaagcattcctctcgaaaggtggacagccccttcggcccgggcagcccctccaaagggttcttctccagaggcccccagccccggccctccagccccatgtctgcacctgtgaggcccaagaccagccccggctctcccaaaaccgtgttcccgttctcctaccaggagtccccgccacgctcccctcgacgcatgagcttcagtgggatcttccgctcctcctccaaagagtcttcccccaactccaaccctgctacctcgcccgggggcatcaggtttttctcccgctccagaaaaacctccggcctctcctcctctccgtcaacacccacccaagtgaccaagcagcacacgtttcccctggaatcctataagcacgagcctgaacggttagagaatcgcatctatgcctcgtcttcccccccggacacagggcagaggttctgcccgtcttccttccagagcccgaccaggcctccactggcatcaccgacacactatgctccctccaaagccgcggcgctggcggcggccctgggacccgcggaagccggcatgctggagaagctggagttcgaggacgaagcagtagaagactcagaaagtggtgtttacatgcgattcatgaggtcacacaagtgttatgacatcgttccaaccagttcaaagcttgttgtctttgatactacattacaagttaaaaaggccttctttgctttggtagccaacggtgtccgagcagcgccactgtgggagagtaaaaaacaaagttttgtaggaatgctaacaattacagatttcataaatatactacatagatactataaatcacctatggtacagatttatgaattagaggaacataaaattgaaacatggagggagctttatttacaagaaacatttaagcctttagtgaatatatctccagatgcaagcctcttcgatgctgtatactccttgatcaaaaataaaatccacagattgcccgttattgaccctatcagtgggaatgcactttatatacttacccacaaaagaatcctcaagttcctccagctttttatgtctgatatgccaaagcctgccttcatgaagcagaacctggatgagcttggaataggaacgtaccacaacattgccttcatacatccagacactcccatcatcaaagccttgaacatatttgtggaaagacgaatatcagctctgcctgttgtggatgagtcaggaaaagttgtagatatttattccaaatttgatgtaattaatcttgctgctgagaaaacatacaataacctagatatcacggtgacccaggcccttcagcaccgttcacagtattttgaaggtgttgtgaagtgcaataagctggaaatactggagaccatcgtggacagaatagtaagagctgaggtccatcggctggtggtggtaaatgaagcagatagtattgtgggtattatttccctgtcggacattctgcaagccctgatcctcacaccagcaggtgccaaacaaaaggagacagaaacggagtgaccgccgtgaatgtagacgccctaggaggagaacttgaacaaagtctctgggtcacgttttgcctcatgaacactggctgcaagtggttaagaatgtatatcagggtttaacaataggtatttcttccagtgatgttgaaattaagcttaaaaaagaaagattttatgtgcttgaagattcaggcttgcattaaaagactgttttcagacctttgtctgaaggattttaaatgctgtatgtcattaaagtgcactgtgtcctgaagttttcattatttttcatttcaaagaattcactggtatggaacaggtgatgtggcataaggtgagtgcacggtatgttcagatcacagtgccttatgtccgaatacagcaatatgtcaccgccgcagccggggcgcacgcgtgtgaaacaacaccgagcttgaatgtggaagtctttgaaccttttaccaaatcagtttgttttctttagatttgtcaaaaagttgtaatttgaatataaataattactttaaaattgtaatgacacttttacacgtaagtgttttgttctgggctaccgtgtcaacgaggctgctttacaacagctttatttatttttactttcatgcaatttttttacacatcttttggtggagtaaacttcaccacatccatgaataaactctcagttattttgaaatggcaaatttctcattatttaagtttggatctggaaaggacatgacttctgaaatagccgctgctgggttttaaaagctgaggtctctcaaagtgtggaggagacgttgccgtcaggcgggagccaagtgccgggaagatgtctattttttttcttgtgtattgaaatgtaaaatcatgatgtttgttatgactgctgatgcgattgtttttgtaaattttattgtggcatatacagtattgtcatacagttgaagagaaacaatgtttcctaatgtaagtgctctgaaaatgttgacactgtatatatatatatgaggatagtttgttttttttttgttttgggtttttttttttcagattgaaaaattaaaatagatcctactatctaccattttgttaaaaaaaaaaaaaaaaaa

SEQ ID NO: 1128 - DNA, 639 bp, Homo Sapiens
  NM_001040651
agagaagcagacatcttctagttcctcccccactctcctctttccggtacctgtgagtcagctaggggagggcagctctcacccaggctgatagttcggtgacctggctttatctactggatgagttccgctgggagatggaacatagcacgtttctctctggcctggtactggctacccttctctcgcaagtgagccccttcaagatacctatagaggaacttgaggacagagtgtttgtgaattgcaataccagcatcacatgggtagagggaacggtgggaacactgctctcagacattacaagactggacctgggaaaacgcatcctggacccacgaggaatatataggtgtaatgggacagatatatacaaggacaaagaatctaccgtgcaagttcattatcgaactgccgacacacaagctctgttgaggaatgaccaggtctatcagcccctccgagatcgagatgatgctcagtacagccaccttggaggaaactgggctcggaacaagtgaacctgagactggtggcttctagaagcagccattaccaactgtaccttcccttcttgctcagccaataaatatatcctctttcactcagaaaaaaaaaaaaaaaaaaaaaaaaaaaaaa

SEQ ID NO: 1129 - DNA, 1890 bp, Homo Sapiens
  NM_001040668
aagtaagtatccccactttcagggtagcatcctctttccctagttatttcagtgcagaatcgattcacgtgtaagcctctacctcctgcacttaccccaatgtagacccccttccacagtccccctacagaagatctcccaaaacatttccaacacagaacttccattcaattcccctccgactgcccgcctccctcctccaggacagagcacgccccaggtttcgagactgaactacccccatctacggagtccacccctccctctctagaaccccctcagtgtagacgcctcctcttttcctctttcctccctactttttctagtttttctgcagccgacctccagcgtcggccactgtagctccttccttgctccactttccccagagtacacagcctgcctttccactctccgtgcagacccatcctctttcccgctcctcgctctcggacgccaccaacgctctcccgggctcttccgcgttacctacgatggaaggtcggggcgtgcgggcagctggaacccacccctgtcttggagctccgggtagctctcaaactcgaggctgcgcaccccctttcccgtcagctgagctctagagcgctggggctttctttttgatcgacttcttgaaataaaaccaactttatcattctttgggtaacagacccaaaagccgatgggacggcccgctgggctgttcccgcccctatgcccttttttgggtttccggccagaggcatgctgggagcgtcacatgcaaattgagcgtgcacccagcgttccgccctttctacgctgggccggttatcgacccggcccagtgcgcaggcgcgggaaagttgaactaataaagtttgtacgagttcagtggaggagaccgcaagttgagtggaggaggcggcggtggggccccggaccaggtgcctccatggcaggctctgaagagctggggctccgggaagacacgctgagggtcctagctgccttccttaggcgtggtgaggctgccgggtctcctgttccaactccacctagccctgcccaagaagagccaacagacttcctgagccgccttcgaagatgtcttccctgctccctggggcgaggagcagccccctctgagtcccctcggccttgctctctgcccatccgcccctgctatggtttagagcctggcccagctactccagacttctatgctttggtggcccagcggctggaacagctggtccaagagcagctgaaatctccgcccagcccagaattacagggtcccccatcgacagagaaggaagccatactgcggaggctggtggccctgctggaggaggaggcagaagtcattaaccagaagctggcctcggaccccgccctgcgcagcaagctggtccgcctgtcctccgactctttcgcccgcctggtggagctgttctgtagccgggatgacagctctcgcccaagccgagcatgccccgggcccccgcctccttccccggagcccctggcccgcctggccctagccatggagctgagccggcgcgtggccgggctggggggcaccctggccggactcagcgtggagcacgtgcacagcttcacgccctggatccaggcccacgggggctgggagggcatcctggctgtttcacccgtggacttgaacttgccattggactgagctctttctcagaagctgctacaagatgacacctcatgtccctgccctcttcgtgtgcttttccaagtcttcctattccactcagggctgtggggtggtggttgccctacctgtttttgccaaaaataaattgtttaaaacttttcttattaaaaacgttacaaagtaaaaaaaaaaaaaaaaaaaaaaaaaaaaaaaaaaaaaaa

SEQ ID NO: 1130 - DNA, 4191 bp, Homo Sapiens
  NM_001040876
tgacccaccggccttgaggaaagcgcaaacgtaaaaaaagattgaaaccggagaggcgaatgcatctgtttacgctaggaccacgctcgacgtcggagaaaagcccacacactcacagtttccagacctggctgcttgccgaaactcagattctcggcacctccagcagctggcttcgccaacggcgttgaacaagggtcgcagctcaatgacgtcatatctccctacctacctccagggttccgcctcacgctctatgtcgcgcgcgcgcactacgtcctatggcttgcgcgtgcggcggctgggcaccgccattttggccggtggccgtgagaacacgctgtgtggctgaaaagtgaaggcaagagctgatttggcctctgtgctcccctccgcaaggggatcgttttctccagagctggatattctttcgcccagttatggcagacaagttaacgagaattgctattgtcaaccatgacaaatgtaaacctaagaaatgtcgacaggaatgcaaaaagagttgtcctgtagttcgaatgggaaaattatgcatagaggttacaccccagagcaaaatagcatggatttccgaaactctttgtattggttgtggtatctgtattaagaaatgcccctttggcgccttatcaattgtcaatctaccaagcaacttggaaaaagaaaccacacatcgatattgtgccaatgccttcaaacttcacaggttgcctatccctcgtccaggtgaagttttgggattagttggaactaatggtattggaaagtcaactgctttaaaaattttagcaggaaaacaaaagccaaaccttggaaagtacgatgatcctcctgactggcaggagattttgacttatttccgtggatctgaattacaaaattactttacaaagattctagaagatgacctaaaagccatcatcaaacctcaatatgtagaccagattcctaaggctgcaaaggggacagtgggatctattttggaccgaaaagatgaaacaaagacacaggcaattgtatgtcagcagcttgatttaacccacctaaaagaacgaaatgttgaagatctttcaggaggagagttgcagagatttgcttgtgctgtcgtttgcatacagaaagctgatattttcatgtttgatgagccttctagttacctagatgtcaagcagcgtttaaaggctgctattactatacgatctctaataaatccagatagatatatcattgtggtggaacatgatctaagtgtattagactatctctccgacttcatctgctgtttatatggtgtaccaagcgcctatggagttgtcactatgccttttagtgtaagagaaggcataaacatttttttggatggctatgttccaacagaaaacttgagattcagagatgcatcacttgtttttaaagtggctgagacagcaaatgaagaagaagttaaaaagatgtgtatgtataaatatccaggaatgaagaaaaaaatgggagaatttgagctagcaattgtagctggagagtttacagattctgaaattatggtgatgctgggggaaaatggaacgggtaaaacgacatttatcagaatgcttgctggaagacttaaacctgatgaaggaggagaagtaccagttctaaatgtcagttataagccacagaaaattagtcccaaatcaactggaagtgttcgccagttactacatgaaaagataagagatgcttatactcacccacaatttgtgaccgatgtaatgaagcctctgcaaattgaaaacatcattgatcaagaggtgcagacattatctggtggtgaactacagcgagtagctttagccctttgcttgggcaaacctgctgatgtctatttaattgatgaaccatctgcatatttggattctgagcaaagactgatggcagctcgagttgtcaaacgtttcatactccatgcaaaaaagacagcctttgttgtggaacatgacttcatcatggccacctatctagcggatcgcgtcatcgtttttgatggtgttccatctaagaacacagttgcaaacagtcctcaaacccttttggctggcatgaataaatttttgtctcagcttgaaattacattcagaagagatccaaacaactataggccacgaataaacaaacttaattcaattaaggatgtagaacaaaagaagagtggaaactactttttcttggatgattagactgactctgagaatattgataagccatttattaaaaggagtatttactagaattttttgtcatataaaacttgaatcaggattttatgccccacatactctggaacttgaagtataatatacttaatataacataaaaagccagttgggttctaaattgtagttgaaacacagaaaatgccacttttctgttcctgaagaggctcttttgtgcataatattctaaaatgaagacatttcaagctatacaaattacttccaagttttcatgatgtatgggaagattttcagtaggtgtattatattcacggtaccaaatgctgaccagtgttgctccattttttaaatcttgaaaagggtttctgtacttacctggtttgccaagtatgccagtgtaatgaaactgcccttattttaaaagccagtcaaagattccactgattgacatttgataaataaacatcaggattatgtttattgtttgttttcagtctttgcactatattaccagtatatggtttccgaggaagattatctactgcaaaacaccactgttggaaaaataggtatttttaaattgtttttaatcttttttggtgcttttaaacatgtttagcaaaaaccaattcagttccattccccgcaaaaaacccctaactttactctgaactttttttgtttttgcattccatgaggttctgtattcagtcattctctaggtaatgtcatttttgtacacatatatttatataatcactgattgagatttaggaaaaagcatttctaaagaatatttgcttcccttagaactacagactcgaaatctttaaagatggtgcctaagcatctatgtattttttttaagttccacagatttttctgttgggcagccaaggattataaaccacttccctaaaggcaacattaatgcaaaagtccccagatggcaatacaaagtatcccctggtaccacatatattcatttgtgagtttggatatagagcacattatctaaaccattttgtagttccaaaaacccatctaaatttcttgagttcctgaattttgaacaggattacctggagcctggagccactttaagttgtacttctgactaaactggaattatgagtgaggaagagtgtttactaaataaatgactggggcaagcaaaattgaggaggaaattagaaactgtttgacaaactttaagagctacttgaaataacagaagtcttgattaatatgcaaataatggctagaaagtatggtttaactggaccctattatgccttttaaaaataatttcagtaacccataaatacatgttgtaaaaaattcaaatatacagaatggaataaaaaaatgatctccctttattaccctcccaaaggttaccagcgtttgaatttaataatgtatattctttcatgcttttttctgtgcacttacctaagtgtgaatatgtaaagggtttgttttgtatacaaatgggattatactaaaataagtaatgcctatttttaaggataggttaaatttgtgaatgatcatttcaaatatattgaataaaataagcaaaagctattgttatttactgatcctggattgtcttaaagaaagtacttgtgatataagagcacagttctacttactgctaatgacagaatatgtattaaacgtattttcatgtaaatgaaatctttaaaatatgtatcttaaaattttacatagcaacagaaaggcctacaattgctaacacaagaaaaatacttataaaatcagtataaaatcaatgcagatgttagcaaaagaatgagactacttcatatgtcctaattggaaaaagtctcaaatacttaaaaaaacaaaaaactggaacagtttattatactaccatttttgtgaaaatatacaaaatattgaaataaaggaatactcaagaaacaga

SEQ ID NO: 1131 - DNA, 1811 bp, Homo Sapiens
  NM_001042353
tcacttccccttccacggcgccccagggactttccctgcggtgggggccttcgacagtgagggccacccgctcagctcgaccgcggagggcagctccaaaggggaccccaaaggtgcccacgcggggctggggcctcctgggcgtcgttgggagcggccactaccggcccgggtccgagctgtcagcctctccaaagcctgcgcgagaggagccgggacacgcctagcgcgggctccagcagtggccggtgtccagctgcctactttctgcccggatctctggctcctcatctctccggtctccgcagactaaagccctcgggatatgcagcagccatgcctgtgcacacgctgagccccggagccccgtccgcccccgccctaccttgccgcctgcggaccagggtccctggctacctgctacgggggccggcagatggtggagcccggaaaccgagcgctgtggagcgcctggaggccgacaaggccaagtacgtcaagagcctgcacgtggccaacacccgccaggagcctgtgcagcccctgctgtccaaacagccgctcttcagccctgagactcgccgcacagtgctcacgcccagccgccgagccctgcctggcccctgccgacggccccagctggacctggacatcctcagcagcctcatcgacttgtgtgacagccccgtgtcccctgccgaggccagccgcactcctggacgggccgagggagccggccgtcctcccccagccacccctccgcgaccgccgcccagtacctctgcggtccgccgggtggacgtccgccccctgcccgcctcgcctgcccggccctgcccatcacccggccctgccgccgcctccagcccagcccggccgccgggtttgcaacgctccaagtcggacttgagcgagcgcttttctagggcagccgctgatctcgagcgcttttttaacttctgcggcctggacccggaggaggcgagagggttgggtgtggcccacctggcacgggccagctcggatatcgtgtccctggcagggcccagtgctgggccgggcagctctgaagggggctgctcccgccgcagctcggtgactgttgaggagcgggcccgggagcgcgttccctatggcgtgtcggtggtggagcgcaatgcccgcgtgatcaagtggttgtatgggctaaggcaggctcgggagagcccagcagctgaaggctaggcgccactgggcctggaattcgccacaggacggatcttacagaggcaagtggtccctggacctctcttgcatccattctctagacggccgtgtcagaggctccaccctgttgtgaacttggtatggaggcaaaggcttagaggctggaccagcattgttgggcaaggactgactctccaagggttttgttcttggctttggacacctgagaaccccctcctcccctcccccaatacaaggtttttgacatgagtgtactcctgcttagttcctcttgtggggctgcatttgcggtgctttgccctccccactgtgagtgaggggccaagggatctcctcaatcctgtctccccagcggctctgtttcctccttccttccttggcctctgtcctttgctgacttcctcttccttacccagcagaactcaccctggggtcggggcagtggggaggggcctatccactgctcttcctagtccttggcagctggcctaggtgggcagactataggagggactggttaggagtctgcattgctttgacttccctctccttggttaataaacacaaatgcttgtttctcaagg

SEQ ID NO: 1132 - DNA, 3136 bp, Homo Sapiens
  NM_001042371
gctgcgaggagcggccggcgggcggcggcggccggcgggcggcgatggcggcggcggaggccggtggcgacgacgcccgctgcgtgcggctgagcgccgagcgggcacaggcgctgctggccgacgtggacacgctgctgttcgactgcgacggcgtgctgtggcgcggggagaccgccgtgcctggcgcgcccgaggccctgcgggcgctgcgagcccgcggcaagcgcctgggcttcatcaccaacaacagcagcaagacccgcgctgcctacgccgagaagctgcggcgcctgggcttcggcggccccgcggggcccggcgccagcctggaggtcttcggcacggcctactgcaccgcgctctacctgcgccagcgcctggccggcgcccccgcgcccaaggcctacgtgctgggcagcccagccctggccgcggagctggaggccgtgggcgtcgccagcgtgggcgtggggcccgagccactgcagggcgagggtcccggcgactggctgcacgcgccgctggagcccgacgtgcgcgcggtggtggtgggctttgacccgcacttcagctacatgaagctcaccaaggccctgcgctacctgcagcagcccggctgcctgctcgtgggcaccaacatggacaaccggcttccgcttgagaacggccgcttcatcgcgggtaccgggtgtctggtccgagccgtggagatggccgcccagcgccaggccgacatcatcgggaagcccagccgcttcattttcgactgcgtgtcccaggaatacggcatcaaccccgagcgcaccgtcatggtgggagaccgcctggacacagacatcctcctaggcgccacctgtggcctgaagaccatcctgaccctcaccggagtctccactctaggggatgtgaagaataatcaggaaagtgactgcgtgtctaagaagaaaatggtccctgacttctatgttgacagcatagccgaccttttgcctgcccttcaaggttaaagattgagtgtctttaatctgcagaataaaaaaaaagaaattgaaaaccagttacccaaattaataggtggggcttaagcatctgctcggctaagtggcttcaaagagtgtaattggagttaagcaaaggcattcattgttaaccttgtaagtacacgtttgggggacgattttgtttacagatgcttgtaatcgaagatgcacttttaggcttggaaggcgttgtgggctgggttctgggccttgggtggggttggcaggggcaggctctgcacctgtccgggattcaggtaaccagggcctgccgatgggactgaggcgggtctaggggtgtgtgtcctgtattttattgaaaaactcattcagggatccagcccctcagggggcagagggactgattattctgactgttgggagaggcttgcatggaccagagccccatcagtatgactgaaagtccagcggagccttctgtgtccctgtgcctcccagcagggtgggagtggaggaggcggctgctcccaggtggcatctccctgcccttgggtgcaaagtgctgccctcaccactctcccacctcccttacttccttgaaaaccactctgatgtcacaactgagtgtctgttccgtttcagatacccagggctgctgcccagttctgtaaacgcagcccagctaaagctctgctgtctcaagtgtgcatttatacccaggtgatttggacggagcagctaccatggcgtggacgccttcactgaactccgggctgcagtgcagggagctcagagcagtgctgctaccagtttttaactttgaacaactgtgtcaggcaatggatttgaattttaagtgtattaatagctgtgctctgtgtcgtaggcaaaattccactgaaggagcctctgtgccctgcagccggcagcgcggctgaagcatgtgttggccaaggaatgcctgtcatccaggtgccctgcagccagcagcgcggctcaagcatgtgttggccaaggaatgcctgtcagtcatccagggctctgggaggggacgagagttatgtccccaagaacaggaagtcctttacaaagcatccagtctcttcctgtcctccccttccctaggctggggtaggggttagagactggtggcccaggaggtcacctgccttgccctggattccctcttcagtggccagcaggacttggcagggccaccagctcgccaaggttctgggcggggctccagcctctcctgcctgctccttggctctgctgacctttcacaggcctgacagcagactcagcagggccatcccgggatgctgcaccttctggctggctccctaccagcgcctttccctgtacctggcagcttctctcttggccccacagtcacagcactccacttggtcacaaagacttcagagcaataagaggcgtcctgagccttcagcacctcccaggcctgggatatcgggttcagagggtgctgcagagcagcatgagggtggctccacccatgaggctggtgacactgacgctggcttggctaagttggctcaagccgggtctggcctgacagggtgcagtcacaccaggagcgcatggcagatgcagcctcagtgatgcctctcttgccgggtaggggctgggagtccccgtgcatcctgtctctggcccatgaggggctgcagcactgtgggcgccagagcacagattaaactctcaaacccacactggctcaggtgtccttgctctcaccttgcattggcccgggtgatgccgtctcaccacgggtgggaggactcaaagtagatgggtaactggggttccaactccagagctggaatgccaactgcccactcccagcctggttcagaggaagatgttttgaagaatgagggaaagccaggcacaaagggaagccagggaagcaaagggccctggagtgaagctggtgggctgccgtgtcagagcgcccagggcagggagcagagctcagaagtaatgctggcccgggcgcagtggctcacacccgtaatcccaacgctttggaaggctgaggcaggtggattacttgagatcaggagttcaagaccagcctggccaaaatggtgaaaacccatctc

SEQ ID NO: 1133 - DNA, 858 bp, Homo Sapiens
  NM_001042401
tgtagttttccccggcaggacggtagaagtcgtggtttgtgcgcggccaggcgctggagcctccgctgccgggagcaatcagaccttccagctgcctctcatgtacttgtctgttgggggcttgtgttgatcaggagtgaattcacagtctaccatgaattggaaggttcttgagcacgtgcccctgctgctgtatatcttggcagcaaaaacattaattctctgcctgacatttgctggggtgaaaatgtatcaaagaaaaaggttggaggcaaaacaacaaaaactggaggctgaaaggaagaagcaatcagagaaaaaagataactgaagattctgccatgtaaatgtcagcttgagtggactccagctgagaagaaagagaagaaagacttaattattgaataatttgtcagaggataaactcccaacctagacctttcacttaaaatagtgtgaatttgtatatgtttttaaaagaaccagtactggccgggtatgctggcttttacctgaaatcccagcactttgggaggccgaggcgagtggatcgcctgagatcgggagtttgagaccagcctggccaacatggtaaaatcctgtctctactaaaaatataaaaattagccaggtgtagtggcgcgcgtctgtaatcccagctactcgggaggctgaggcaggagaattgcttgaatccgggaggtggaggttgcagtgagcctaggtcgtgccactgccctccagcctgggtgacagagcgactgcgtctccaaaaaaaaaaaggtaaaattaaaattaaaaaaaataataataaccagtattttgtttactaaaataaaatgcctttgtaaaaaaagg

SEQ ID NO: 1134 - DNA, 2521 bp, Homo Sapiens
  NM_001042410
cccgggacgtttggtgcgtcttctaagggcgtgggcgagtttacgcgggccagttgttgctggtcgcatgggagctgctgctaaataatttctgctcagccatgtcgccggctccagatgcagccccggctcctgcgtcgatctccctgtttgacctcagcgcggatgctccggtctttcagggcctgagcctggtgagccacgcgcctggggaggctctggcccgggctccgcgtacttcctgttcaggctcaggggagagagaaagcccagaaagaaagctactccagggtcctatggatatttcagagaagttattttgttcaacttgtgaccagaccttccagaaccaccaagaacagagggaacattataagcttgactggcatcggtttaacctaaagcaacgtctcaaggacaagcctctcctgtctgccctggactttgaaaagcagagctccacaggagatctttccagcatctcgggatcagaagactcagactcagccagtgaggaggacttgcagacactggatcgggagagggctacatttgagaagttgagccgacccccaggcttttaccctcatcgagttcttttccagaatgcccagggccagtttctttatgcctaccgctgtgtcctaggccctcatcaggatcccccagaagaggcagaactgctgctacagaacctgcaaagtagaggtcccagagactgcgtggtgctcatggctgcagctgggcactttgctggtgctatatttcaaggaagagaagtggtgacacacaaaacttttcaccgctatacggttcgggccaagcggggcacagcccaggggcttcgggatgcccgaggtgggccatcacactctgctggagccaacctgaggcgctacaatgaagccacactatataaggatgttcgtgacctgctggcagggccaagctgggctaaggcgctggaggaggctggtacaatactgttgcgtgctccccgctctggccggtctttgttctttggaggcaagggagcacccctgcaaaggggggatccccgactttgggatatccccctcgccacccgcagacccaccttccaagagctacagcgtgtgctccataagctgaccactttgcatgtctatgaagaagaccctcgggaagcagtcagactgcactcacctcagacacactggaaaacagtaagagaggagagaaagaagcctactgaggaagaaataagaaagatctgcagggatgaaaaggaagcgctggggcagaatgaggaatctcccaaacagggttcagggtcggagggagaagatggctttcaggtagagttggagctagtggagttgactgtggggactctggatctttgtgagtctgaagtattgcccaagcggaggaggagaaaaaggaataagaaggagaaaagccgagaccaggaggctggggcacatcggactcttctccagcaaactcaagaagaggagccttccacacagtcatcccaggcagttgctgcccccttgggccctttgctggatgaggccaaagcccctggtcagccagagctctggaatgcactgcttgctgcttgccgagctggagatgttggagtgctaaagctgcagctagctcccagccctgcagaccctagagttctgtctctgctcagtgcccccttgggctccggtggctttactctcctgcatgcagcagctgcagctggaagaggctcagtggttcgtctgctgctggaagcaggtgctgaccccactgtgcaggactctcgggcccggccaccttatactgttgcggctgacaaatcaacacgtaatgagttccgaaggttcatggagaagaatccagatgcctacgattacaacaaggctcaggtgccaggaccattgacaccagaaatggaggcacggcaggctacacggaaaagggagcagaaggcagcccggcggcaacgggaggaacagcagcagaggcagcaggagcaggaggagcgtgaacgagaagagcagcggcgatttgccgccctcagtgaccgagagaagagagctctggctgcagagcgccgactcgctgcccagttgggagcccctacctctccaatccctgactctgcaatcgtcaatactcgacgctgctggagttgtggggcatccctccaaggcctgactccctttcactacctcgacttctctttctgctccacacgttgcctccaggatcatcgccgtcaggcagggaggccctcttcctgatctcttacagctctacctggggccaactcagggacctgagagggcacattcacagcagccctaggttttttcttccccgtgaaaccagagatgatttggaagatgggggtgaaggacactcgggaactagggcaaagacagggctagaggtatgtggagctggtactgtctctggaattttaatcacaataaagtttggcaaggaatgtgtacttgtacttacaaaaaaaaaaaaaaaa

SEQ ID NO: 1135 - DNA, 1352 bp, Homo Sapiens
  NM_001042426
cgtgaagtgggcggagcgagcgatttgaacgcgagcggcgcggacttctgccaagcaccggctcatgtgaggctcgcggcacagcgttctctgggctccccagaagccagcctttcgctcccggacccggcagcccgagcaggagccgtgggaccgggcgccagcaccctctgcggcgtgtcatgggcccgcgccgccggagccgaaagcccgaggccccgaggaggcgcagcccgagcccgaccccgacccccggcccctcccggcggggcccctccttaggcgcttcctcccatcaacacagtcggcggagacaaggttggctaaaggagatccgaaagcttcagaagagcacacacctcttgataaggaagctgcccttcagccgcctggcagcagaagcatttctagttcatctctttgaggacgcctatctcctcaccttacatgcaggccgagttactctcttcccaaaggatgtgcaactggcccggaggatccggggccttgaggagggactcggctgagctcctgcacccagtgtttctgtcagtctttcctgctcagccaggggggatgataccggggactctccagagccatgactagatccaatggattctgcgatgctgtctggactttgctgtctctgaacagtatgtgtgtgttgctttaaatatttttcttttttttgagaaggagaagactgcatgactttcctctgtaacagaggtaatatatgagacaatcaacaccgttccaaaggcctgaaaataattttcagataaagagactccaaggttgactttagtttgtgagttactcatgtgactatttgaggattttgaaaacatcagatttgctgtggtatgggagaaaaggctatgtacttattattttagctctttctgtaatatttacattttttaccatatgtacatttgtacttttattttacacataagggaaaaaataagaccactttgagcagttgcctggaaggctgggcatttccatcatatagacctctgcccttcagagtagcctcaccattagtggcagcatcatgtaactgagtggactgtgcttgtcaacggatgtgtagcttttcagaaacttaattggggatgaatagaaaacctgtaagctttgatgttctggttacttctagtaaattcctgtcaaaatcaattcagaaattctaacttggagaatttaacattttactcttgtaaatcatagaagatgtatcataacagttcagaattttaaagtacattttcgatgcttttatgggtatttttgtagtttctttgtagagagataataaaaatcaaaatatttaatgaaaa

SEQ ID NO: 1136 - DNA, 2262 bp, Homo Sapiens
  NM_001042437
ctggggagtaatagcatgggcaaccattatcctgtctcgccgccacccaggacatggcttctgttccaatgccaagtgagtacacctatgtgaaactgagaagtgattgctcgaggccttccctgcaatggtacacccgagctcaaagcaagatgagaaggcccagcttgttattaaaagacatcctcaaatgtacattgcttgtgtttggagtgtggatcctttatatcctcaagttaaattatactactgaagaatgtgacatgaaaaaaatgcattatgtggaccctgaccatgtaaagagagctcagaaatatgctcagcaagtcttgcagaaggaatgtcgtcccaagtttgccaagacatcaatggcgctgttatttgagcacaggtatagcgtggacttactcccttttgtgcagaaggcccccaaagacagtgaagctgagtccaagtacgatcctccttttgggttccggaagttctccagtaaagtccagaccctcttggaactcttgccagagcacgacctccctgaacacttgaaagccaagacctgtcggcgctgtgtggttattggaagcggaggaatactgcacggattagaactgggccacaccctgaaccagttcgatgttgtgataaggttaaacagtgcaccagttgagggatattcagaacatgttggaaataaaactactataaggatgacttatccagagggcgcaccactgtctgaccttgaatattattccaatgacttatttgttgctgttttatttaagagtgttgatttcaactggcttcaagcaatggtaaaaaaggaaaccctgccattctgggtacgactcttcttttggaagcaggtggcagaaaaaatcccactgcagccaaaacatttcaggattttgaatccagttatcatcaaagagactgcctttgacatccttcagtactcagagcctcagtcaaggttctggggccgagataagaacgtccccacaatcggtgtcattgccgttgtcttagccacacatctgtgcgatgaagtcagtttggcgggttttggatatgacctcaatcaacccagaacacctttgcactacttcgacagtcaatgcatggctgctatgaactttcagaccatgcataatgtgacaacggaaaccaagttcctcttaaagctggtcaaagagggagtggtgaaagatctcagtggaggcattgatcgtgaattttgaacacagaaaacctcagttgaaaatgcaactctaactctgagagctgtttttgacagccttcttgatgtatttctccatcctgcagatactttgaagtgcagctcatgtttttaacttttaatttaaaaacacaaaaaaaattttagctcttcccactttttttttcctatttatttgaggtcagtgtttgtttttgcacaccattttgtaaatgaaacttaagaattgaattggaaagacttctcaaagagaattgtatgtaacgatgttgtattgatttttaagaaagtaatttaatttgtaaaacttctgctcgtttacactgcacattgaatacaggtaactaattggaaggagaggggaggtcactcttttgatggtggccctgaacctcattctggttccctgctgcgctgcttggtgtgacccacggaggatccactcccaggatgacgtgctccgtagctctgctgctgatactgggtctgcgatgcagcggcgtgaggcctgggctggttggagaaggtcacaacccttctctgttggtctgccttctgctgaaagactcgagaaccaaccagggaagctgtcctggaggtccctggtcggagagggacatagaatctgtgacctctgacaactgtgaagccaccctgggctacagaaaccacagtcttcccagcaattattacaattcttgaattccttggggattttttactgccctttcaaagcacttaagtgttagatctaacgtgttccagtgtctgtctgaggtgacttaaaaaatcagaacaaaacttctattatccagagtcatgggagagtacaccctttccaggaataatgttttgggaaacactgaaatgaaatcttcccagtattataaattgtgtatttaaaaaaaagaaacttttctgaatgcctacctggcggtgtataccaggcagtgtgccagtttaaaaagatgaaaaagaataaaaacttttgaggaaaaaaaaaaaaaaaaaaaaaaaaaaaa

SEQ ID NO: 1137 - DNA, 4252 bp, Homo Sapiens
  NM_001042445
gccccgtcgcactcagagagctgggctggagctccaagcggaaaccgcgggagccgagcccagctaggaatgcagacctcctgaaaaccaagccgaggactgcggggtccggtgtccacgcagagtgtcagcttcctctggtgcaaccagcaagtcttccagtatgaatcccacagaaaccaaggctgtaaaaacagaacctgagaagaagtcacagtcaaccaagctgtctgtggttcatgagaaaaaatcccaagaaggaaagccaaaagaacacacagagccaaaaagcctacccaagcaggcatcagatacaggaagtaacgatgctcacaataaaaaagcagtttccagatcagctgaacagcagccatcagagaaatcaacagaaccaaagactaaaccacaagacatgatttctgctggtggagagagtgttgctggtatcactgcaatatctggcaagccgggtgacaagaaaaaagaaaagaaatcattaaccccagctgtgccagttgaatctaaaccggataaaccatcgggaaagtcaggcatggatgctgctttggatgacttaatagatactttaggaggacctgaagaaactgaagaagaaaatacaacgtatactggaccagaagtttcagatccaatgagttccacctacatagaggaattgggtaaaagagaagtcacaattcctccaaaatatagggaactattggctaaacccatagggccagatgatgctatagacgccttgtcatctgacttcacctgtgggtcgcctacagctgctggaaagaaaactgaaaaagaggaatctacagaagttttaaaagctcagtcagcagggacagtcagaagtgctgctccaccccaagagaagaaaagaaaggtggagaaggatacaatgagtgatcaagcactcgaggctctgtcggcttcactgggcacccggcaagcagaacctgagctcgacctccgctcaattaaggaagtcgatgaggcaaaagctaaagaagaaaaactagagaagtgtggtgaggatgatgaaacaatcccatctgagtacagattaaaaccagccacggataaagatggaaaaccactattgccagagcctgaagaaaaacccaagcctcggagtgaatcagaactcattgatgaactttcagaagattttgaccggtctgaatgtaaagagaaaccatctaagccaactgaaaagacagaagaatctaaggccgctgctccagctcctgtgtcggaggctgtgtgtcggacctccatgtgtagtatacagtcagcaccccctgagccggctaccttgaagggcacagtgccagatgatgctgtagaagccttggctgatagcctggggaaaaaggaagcagatccagaagatggaaaacctgtgatggataaagtcaaggagaaggccaaagaagaagaccgtgaaaagcttggtgaaaaagaagaaacaattcctcctgattatagattagaagaggtcaaggataaagatggaaagccactcctgccaaaagagtctaaggaacagcttccacccatgagtgaagacttccttctggatgctttgtctgaggacttctctggtccacaaaatgcttcatctcttaaatttgaagatgctaaacttgctgctgccatctctgaagtggtttcccaaaccccagcttcaacgacccaagctggagccccaccccgtgatacctcgcagagtgacaaagacctcgatgatgccttggataaactctctgacagtctaggacaaaggcagcctgacccagatgagaacaaaccaatggaagataaagtaaaggaaaaagctaaagctgaacatagagacaagcttggagaaagagatgacactatcccacctgaatacagacatctcctggatgataatggacaggacaaaccagtgaagccacctacaaagaaatcagaggattcaaagaaacctgcagatgaccaagaccccattgatgctctctcaggagatctggacagctgtccctccactacagaaacctcacagaacacagcaaaggataagtgcaagaaggctgcttccagctccaaagcacctaagaatggaggtaaagcgaaggattcagcaaagacaacagaggaaacttccaagccaaaagatgactaaagaaatacaagttaaggtatctggtatctgcatgtaaaatcttcagctggtggatggtgacttttgaagaacaaaaggctttggcaacagaaaacaattgttctgggtgatttctagaatggtttttgttgagtctctgaacatcctaaatattggtttgttattcttttccagaaagaaaatgaatttgactggttcacctgtgtactgagtattgataaactttgaatttttttaattgccttcaattgggagagaaagctttatatttgtaagaaatatatttgataaagtttcttaaagcaacaccaaaaaaacaaaagaaaagctaagtgaatttttgcacattctacacacagtgcctgtaaatctcatttgtattttcagtttgcccttaattttttttgttagtgtttagaaaacaatgttttaaacattcttcagtgttctgatttcttattaccccctttcctcttgggcttttgaactgtatttgatgttgctttgggataatgtttataagtcaaacataagatattgtacattgggcacatatctcctcttgggctgctaataataaattaataacaggtaacctggacaaaccaggaagcaccaaaccccttttcagtttgaactcttctttgccaggtgtgaggacttctgcatcttacagtcagcacagaacacactgagacttgaatcaagtcagcaacagagcaaaataaaggttagataagtccttgtgtagcaaatttcgagcataagaaataaaatctaattaattcttagggtactcatctgacttgaactctgttggtttactgtgttagtaaactgtgctttctattatctatacataaaacctgagcagcaactgtgtctttagagctattgccacattagcctttgcactgtatagcgtctggctttatggaacttaagtttaccaaatataaaaagaaacttctgcttttaaaaaaattatatatatatattaaatttgaaacctgcatttctcccacagcaatgtaagaagtaggctctgatgtcctaccactttgaatggttttctaatatcttaatgaatagttcctgaacattgcactgatatcatcgattagaattttgatatttaatttcatctttatttcctggtagagaatgcaggaaaagatgtcaggtacataacataaaacagattgggaatttattgtttccaaagggcatggccttccttagcatcagtttgaagcttttgttatgacttagctgacttgtggcagcggggcaagcaaaaacaataacactgcttataaatggcaccacatcttgttaacctcccccccaaatactctctgaaagtcatgcacatacctatgggattttacacaccaccagcttaaaatgctatgtctctatccatcagaaatagtcattattctatttttaaggcagcaacaagaaaagaaaaaacacttttcctgagggatttctaaccatgtatctaatcctcccatttgggcagtataggtgtttgcttttttgttttctttttttaagaaaaaccttgaaacctttgacactgacagatgtgtttgcaaggatacggcttcagtattactaatttccatgtgtatctggaagtatttttaaatggcataccaaaatccagaagtttaaagatgcctataaaagtaaacaacatttatttaaaaagaactctgaatatgccttcttttttaattagaaatatcttcgagacttgggtgtttgttaataactaataactggagtaagctacaggatctaaagcagccctttttacagtctagttaggagagagaaaataattgcaaatatccacttagaggcaaagaacaattttttattatcaaaaaggtttctgcacattgttgtggcaatattgtatctgtttagaaaatgggcttttccaaaagcaaacaaagataggttcctcaggtgaccaaaactgaaaatcaatatttccatgtttcattaatcaaggcataaaatacaattaaagcaaaatattttacattaaaa

SEQ ID NO: 1138 - DNA, 697 bp, Homo Sapiens
  NM_001042462
gcagcgccttttacggcgccgtaaagcagctcggccgagcagactgctgcggttcctgggtggcggcggcatggaggcgcgcttcacgcgcgggaagtcggcgctgctggagcgcgcgctggcgcggccgcgcaccgaggtgagcctgagcgccttcgcactgctgttctccgagctggtacagcactgccagagccgcgtcttctccgtggccgagctgcagtcgcgcctggccgcgctgggccgccaggtgggcgcgcgcgtgctggatgcgctggtggcgcgcgaaaagggtgcccggcgtgagaccaaggtgctaggcgcgttgctcttcgtcaagggcgccgtgtggaaggcgctcttcggcaaggaggcggacaagctggagcaggccaacgatgacgcgcgcaccttctacatcatcgagcgcgagccgctcatcaacacctacatctccgtgcccaaggagaacagcacgctcaactgcgccagcttcacggcgggcatcgtggaggcggtgctcacacacagcggcttccctgccaaggtcacggcgcactggcacaagggcaccacgctcatgatcaagttcgaggaggcagtcatcgctcgagaccgggccctggagggccgctgaccctgccggagataaaggatacagagagcccctccccacgtgaaaaaaaaaaaaaaaaaa

SEQ ID NO: 1139 - DNA, 1812 bp, Homo Sapiens
  NM_001042470
tgtgcataggggtcgactgccgctgcggtgcatgagggcgcatgcgcagcggggccgtgggtgtacgcggcgcagcgcggcagtcctgatggcccggcatgggttaccgctgctgcccctgctgtcgctcctggtcggcgcgtggctcaagctaggaaatggacaggctactagcatggtccaactgcagggtgggagattcctgatgggaacaaattctccagacagcagagatggtgaagggcctgtgcgggaggcgacagtgaaaccctttgccatcgacatatttcctgtcaccaacaaagatttcagggattttgtcagggagaaaaagtatcggacagaagctgagatgtttggatggagctttgtctttgaggactttgtctctgatgagctgagaaacaaagccacccagccaatgaagggaaagttccccaagggagacaaagctgaggatggcttccatggagtctccccagtgaatgctttccccgcccagaacaactacgggctctatgacctcctggggaacgtgtgggagtggacagcatcaccgtaccaggctgctgagcaggacatgcgcgtcctccggggggcatcctggatcgacacagctgatggctctgccaatcaccgggcccgggtcaccaccaggatgggcaacactccagattcagcctcagacaacctcggtttccgctgtgctgcagacgcaggccggccgccaggggagctgtaagcagccgggtggtgacaaggagaaaagccttctagggtcactgtcattccctggccatgttgcaaacagcgcaattccaagctcgagagcttcagcctcaggaaagaacttccccttccctgtctcccatccctctgtggcaggcgcctctcaccagggcaggagaggactcagcctcctgtgttttggagaaggggcccaatgtgtgttgacgatggctgggggccaggtgtttctgttagaggccaagtattattgacacaggattgcaaacacacaaacaattggaacagagcactctgaaaggccattttttaagcattttaaaatctattctctccccctttctccctggatgattcaggaagctgacattgtttcctcaaggcagaattttcctggttctgttttctcagccagttgctgtggaaggagaatgctttctttgtggcctcatctgtggtttcgtgtccctctgaaggaaactagtttccactgtgtaacaggcagacatgtaactatttaaagcacagttcagtcctaaaagggtctgggagaaccagatgatgtactaggtgaagcattgcattgtgggaatcacaaagcaaatagtactccagaaagacaaatatcagaagcttcctattctttttttttttttttttttttttgagacagggtctttctctgttgcccaggctagagtgcactggtgatcacggctcactctagccttgaattcctgggcccaagcaattctcccacctcagcctcctgagtagctgggactacaagtgtgcaccaccatgcctggctaattttttgaatttttgtagtgatgggatctcgctctgttgcccagggtggtctcgaactcctggcctcaagcgatcctcccacctcgacctcccaaagtgctgggattacaggtgtgagccacctcgcctgggcccccttctccatatgcctccaaaaacatgtccctggagagtagcctgctcccacactgtcactggatgtcatggggccaataaaatctcctgcaattgtgtatctcagaaaaaaaaaaa

SEQ ID NO: 1140 - DNA, 1578 bp, Homo Sapiens
  NM_001042471
acaactttcagtttcattattttagcttcctgagattcagaggccaggaactgtgcagagatctgtggggattctcacaacttccatttctggtgaacagctgaggtcagagaggagttggtccaggcgcaatgttcagcgtatttgaggaaatcacaagaattgtagttaaggagatggatgctggaggggatatgattgccgttagaagccttgttgatgctgatagattccgctgcttccatctggtgggggagaagagaactttctttggatgccggcactacacaacaggcctcaccctgatggacattctggacacagatggggacaagtggttagatgaactggattctgggctccaaggtcaaaaggctgagtttcaaattctggataatgtagactcaacgggagagttgatagtgagattacccaaagaaataacaatttcaggcagtttccagggcttccaccatcagaaaatcaagatatcggagaaccggatatcccagcagtatctggctacccttgaaaacaggaagctgaagagggaactacccttttcattccgatcaattaatacgagagaaaacctgtatctggtgacagaaactctggagacggtaaaggaggaaaccctgaaaagcgaccggcaatataaattttggagccagatctctcagggccatctcagctataaacacaagggccaaagggaagtgaccatccccccaaatcgggtcctgagctatcgagtaaagcagcttgtcttccccaacaaggagacgatgaagaaggatggtgcttcatcctgtttaggaaagtctttgggttcggaggattccagaaacatgaaggagaagttggaggacatggagagtgtcctcaaggacctgacagaggagaagagaaaagatgtgctaaactccctcgctaagtgcctcggcaaggaggatattcggcaggatctagagcaaagagtatctgaggtcctgatttccggggagctacacatggaggacccagacaagcctctcctaagcagcctttttaatgctgctggggtcttggtagaagcgcgtgcaaaagccattctggacttcctggatgccctgctagagctgtctgaagagcagcagtttgtggctgaggccctggagaaggggacccttcctctgttgaaggaccaggtgaaatctgtcatggagcagaactgggatgagctggccagcagtcctcctgacatggactatgaccctgaggcacgaattctctgtgcgctgtatgttgttgtctctatcctgctggagctggctgaggggcctacctctgtctcttcctaactacaaaagccctttctccccacaagcctctgggttttccctttaccagtctgtcctcactgccatcgccactaccatcctgtcaccagtgggacctctttaaaacaagcagccaaccattctttgatgtatcccattcgctccatgttaacatccaaaaccagcctggatttcatacatggacttctgattaaaagtggcaggttgtgcatgttaaaaaaaaaaaaaaaaaaaa

SEQ ID NO: 1141 - DNA, 2140 bp, Homo Sapiens
  NM_001042472
ccagggatgctgggcgcgcgctccttggaactagagaggaggtggccggggcggggccgggggaggggggtagggcagagccggcgggagcccggcgctgattggccggcctggctggcgggcccccgccgctggttcgtagccggcgcagcggcctgggctgggatgtgaggagcggcgggttccgggctccgggctctgggtggcggcggctgtgagcggcggcactgcggcgcaggccagcgggcgccgtcggcggctggccctgtcggccgcgggatgaggaagcggaccgagcccgtcgccttggagcatgagcgctgcgccgccgcgggctcgtcctcctccggctcggccgccgcggcgctggacgccgactgccgcctgaagcagaacctacgcctgacgggcccggcggcggctgagccgcgctgcgcagccgacgcgggaatgaagcgggcgctgggcaggcgaaagggcgtgtggttgcgcctgaggaagatacttttctgtgttttggggttgtacattgccattccatttctcatcaaactatgtcctggaatacaggccaaactgattttcttgaatttcgtaagagttccctatttcattgatttgaaaaaaccacaggatcaaggtttgaatcacacgtgtaactactacctgcagccagaggaagacgtgaccattggagtctggcacaccgtccctgcagtctggtggaagaacgcccaaggcaaagaccagatgtggtatgaggatgccttggcttccagccaccctatcattctgtacctgcatgggaacgcaggtaccagaggaggcgaccaccgcgtggagctttacaaggtgctgagttcccttggttaccatgtggtcacctttgactacagaggttggggtgactcagtgggaacgccatctgagcggggcatgacctatgacgcactccacgtttttgactggatcaaagcaagaagtggtgacaaccccgtgtacatctggggccactctctgggcactggcgtggcgacaaatctggtgcggcgcctctgtgagcgagagacgcctccagatgcccttatattggaatctccattcactaatatccgcgaagaagctaagagccatccattttcagtgatatatcgatacttccctgggtttgactggttcttccttgatcctattacaagtagtggaattaaatttgcaaatgatgaaaacgtgaagcacatctcctgtcccctgctcatcctgcacgctgaggacgacccggtggtgcccttccagcttggcagaaagctctatagcatcgccgcaccagctcgaagcttccgagatttcaaagttcagtttgtgccctttcattcagaccttggctacaggcacaaatacatttacaagagccctgagctgccacggatactgagggaattcctggggaagtcggagcctgagcaccagcactgagcctggccgtgggaaggaagcatgaagacctctgccctcctcccgttttcctccagtcagcagcccggtatcctgaagccccggggggccggcacctgcaatgctcaggagcccagctcgcacctggagagcacctcagatcccaggcggggaggcccctgcaggcctgcagtgcccggaggcctgagcatggctgtgtggaaagcgtgggtggcaggcatgtggctctccttgccgcccctcaacctgagatcttgttgggagacttaatggcagcaggcagccatcactgcctgcttgatgctgcactgagctggacagggggagtccgggcaggggactcttggggctcgggaccatgctgagctttttggcaccacccacagagaacgtggggtccaggttctttctgcaccttcccagcacatgcagaatgactccagtggttccatcgtcccctcctgccctgtgtacctgcttgcctttctcagctgccccacctcccctgggctggcccactcacccacagtggaagtgcccgggatctgcacttcctcccctttcacctacctgtacacctaacctggccttagactgagctttatttaagaataaaatcgtggtggtggtccttttgtctctctgcaaaaaaaaaaaaaaaaaa

SEQ ID NO: 1142 - DNA, 7653 bp, Homo Sapiens
  NM_001042475
agtatcgcaaaataggccaagtcgctgccctctactcaactcgcagggcgggaggatggagacagagggatgcggcgggagggcgggacagcccagtcgccgccaaggaggcgaagcggggtcggggtagctcacccgccccccgcagtccccgccccccgcagtccccgccccgcgcggcgccgcgcacgcctgaagtcattgcccgaggccccgccccctcgcggccccagccccggctctggctctgccggcggagggggcggagagaacccgcagctgcaacttcgcctggagcctttgagcctgggctcagccggggatctagcagccgtcaccgccgagtcgccgcttccccggcgcgggcctcagcccagccggcttggccatggcaggcgccggcagtgcggcgaatctggcccctgcgctccccgcccgtagctgagcagccgttaaccagccatcccgcctttcctcctgcccgtgtcgccgaggcccacgctccgcgcaagtttccgccgccgaagaagcaggaggacggacgtgaggagtcgggcgtccctggcccacccggccctctcgcccgcgatgtgggggcgcttcctggctccggaggccagcggccgggatagccccggcggagcccgcagcttccctgccggcccagattattcatcagcatggctacctgctaatgaatcattgtggcaggccacaactgttccatctaaccatcgaaataaccatatcaggagacacagtatagcttctgacagtggagacactggcattggaacttcctgttctgatagcgtggaagatcattcaacttcaagtggcacattatcttttaagcctagtcaatcattgattactcttcctactgcccatgtgatgccgtctaattccagcgcttcaatttccaaacttagggaatcattgacaccagatggctcaaaatggagtacaagcctcatgcaaacattgggaaaccacagtaggggggagcaggactcttccctagacatgaaggacttccggccacttcggaaatggtcatctttatccaaactcactgccccggataactgtggccagggtggcactgtatgcagagaagagtcaaggaatggtttggagaagatagggaaggctaaggctttaacatcacaactgaggacaattgggcctagctgtttacatgatagtatggagatgcttaggttagaggacaaggaaataaataaaaaacggtcatcaactctggactgcaagtataaatttgagagctgtagcaaggaggactttagagcctcttcctctactcttaggagacagcctgtagacatgacatatagtgccttacctgaaagcaagcccattatgacaagctcagaggcttttgaacctccaaaatatttaatgcttggtcaacaggcagtaggtggagttcccattcagccttccgtaaggactcagatgtggcttacagagcagctgcggacaaatcctttggaaggtagaaatacagaggattcttacagtttagctccttggcaacagcagcaaattgaagactttcgacaaggaagtgaaacaccaatgcaggttttgactggatcatctcgtcaaagttattcacctggctatcaggatttcagtaagtgggaatcaatgttgaaaataaaagaaggacttctaaggcagaaagaaattgtaatcgatcggcagaagcaacaaattacccacctgcatgagaggataagggataatgaattacgggctcaacatgccatgttaggacattatgtaaattgtgaggattcttatgtggctagtttgcagccacaatatgagaacacttcactccagacaccattttcagaggaatcagtttcccattcccaacaaggggaatttgagcaaaagcttgcatctactgagaaagaagttttacagcttaatgagtttctcaaacaaagactaagcctatttagtgaagagaagaagaaactagaggaaaaacttaaaactagagatcgatacatcagtagtctgaaaaagaaatgccagaaggaatctgaacaaaacaaagaaaagcagagaagaattgagaccttggaaaagtatctggctgatcttccaactctagatgatgtacagagtcagagtctacagctgcagattctggaagaaaaaaataagaatttacaagaggctttgatagatacagaaaaaaaacttgaagagatcaaaaagcagtgtcaagataaagagacacagttaatatgccagaaaaagaaagaaaaggagttagtaactaccgttcagagtttgcaacaaaaagtagaaagatgccttgaagatggaatccgccttcccatgttagatgcaaaacagcttcagaatgaaaatgataatctcagacaacaaaatgagactgctagtaagataatagacagccaacaagatgagattgacagaatgattttagaaattcagtctatgcaaggaaagctttctaaagagaaactgaccactcaaaagatgatggaagagctggaaaagaaagaaagaaatgtacagagattaacaaaagcattgcttgaaaaccaaagacaaacagatgagacatgctctttattggatcagggccaggaacctgaccaatctaggcagcagacagttctttccaaacggccactatttgatttgactgtgattgatcagctgttcaaggaaatgtcctgttgtttgtttgacttgaaagcattgtgtagtattcttaatcagcgtgctcagggcaaggagcctaatctttcattattactgggaataagatcaatgaactgttcagctgaagagactgagaatgaccacagcacagaaacactcactaaaaagctgtcagatgtgtgccagttacgaagagacattgatgaattaaggactacaatatcagaccgctatgctcaggacatgggagacaactgcattactcagtgatcaagtgttagtcccacagcaataatgacctgttgtttaaatgctgctgtgttatggagccataatggaaggttgcaagtgacatgacttgcacttagggattttttttctgtggatttgttttgttgaaggggagaagggaagtgaagagattttgaaggggcttatctaatcaggcaaaaagaaaaaaaatcaaattacctttggaaaatatgataaaatctacaaggaaaaaaatgtctatattctcaaactactgattgtaggaccaagctgtgaagagtacccttcacatgaaggagtaggattccttttaatcctatagctttgtgtgtttgtgtgtgcatgtatgtgtgttgttgtgtgtgtgtgcacgtgctttattcacaaatttataagggtttctagggtcagagcagagcttctgagaaaggcacacgctgtttattcttatatttctttcatatagaagcttgtgttgtactttgggattttcagtggctggctgaacaagagttcaaacagcaggcaagtgttgtcatggtagtacaggaggcaaaaccatttatattttgaacacttactgcactgataggatgtttgtggttgagctgattttagtactgtagataggtcagctgtttttccagagtgattgtggatttcccaagaggtgtgaaattttgacgtgatgctctttttccttagcattgtaatgtatgtgttacaagaaaggttaacataacttgaactaattttaacatgttccttactatttacaattttttatttatatgttttatatatatacatatataaatgtaaacaaagccatatataattaataaaggcattggatcattattataaaaggaagattaacaaagttaccctggaacaatagcttacttatccaaatctcaacatttacattttaacagttttgtatgtttcaaagttgaaactactgtaagagaaagccaatactatttatatctgaatcaacagtagcataaacattttttaattgagattgtattttaatcccttttgttaaagtacattaacaacagtttttcacaggatatgaacttggcgaaattagttcttaatctgaattacagggtattactatgaaatgcagttgattttgcagtagacgtacagtcatttaaacttccaaatgagtgttgtccatgtttctgttggtattttggaaggattatacattttattgccttcagcattgattatgttcttttgaatatacttagttttggcgaaagccttgtcctttgtaagttggtttgatcttgtgatgcaaccaagtctcatttaggtcaagactaaataagagatggaggggtagagggtgtgactcaagcaggataatattgatttgataaagagcatatcacatgcctgttttcttgccagataaagggcatagcacatgcctgttttcttatatactagaataaaggctctcctaggaaagatttttcttaaatatttaaaagtgaaaatgtgagacaaggccttcaaggagactacccaggaagatacacagtttaaaatgttggctatacagctctcaatagattattttatagttatagttgaataatcagttataatacactgtaaagaaatcagattttccttctgtttggtgtctgagtccttcctgctcttcttacttctgagaatctgggcactaagaaatcagtaagtacattgtagtgctcctgcatcccagagtccttaacctaaggagggtcttagtcactggtaagaacttggctttctaattatattcacttggtttttaacattagtagcttgacgataatcagggtatagtaaatttccaccaaaaatgtgatgcgaagaattctgccttggtcctttatggtaaaacagataataacgtctaaaatagatcagccacaagtgcagcaaatatttttacactctctttgaatagaatcccaaccaccctcccccatgattttagaaataaaggcttcctaaaataatagaacaaattggcaaacaatcactaattggaccagtaggttcttacttaaatatctctcctagatttttagtgtatgttttgggattttatgggtttatttatttttttttttttaagcagacgttacagtttgttttaatctactatagatacgtttttgttttttggcttagttggggataaaataatttatttgtaagttagctttctaaaacttagagaaagtaatttaattcacgtatcttaaaaataaaattccaaagttaaaaaatttctgacttagtaggaagttaacaaaactactgctgatgcatttcagtttccaaaatctgtaccctccccccataaaaaagggagttaagatgtgctagtttaagtagttagctgaattatagattgatcctcttaaaatctggagtttgtaaaggggcctacataaacagtagatagacttggagggattttgtgggggaattgaaactaatagtattctatctagtttgtcagtatttactttttgatttttatttttcagaaaattttcctttcccaggacaccctcttgtattagaatatcctcttctgtatcacattaaaaacagattttactgttagaccaaataagatgggcaaatagcaacactagagcatctcacccagtttgaactaggatgttcgtggaagttatgacaccaatatattcctgaaatgaaaattaacctaaattttaaagtgaatctatttgaaaatttacttagataatgaaacctcgttttaattgtgctttttgtgaatccaacacttgtttgcttagaaagtatcttatccagtattaatattttgttcttttgggttttaaagttgagcttattcagcctcaatcacattacagcaagcataaagtaacagttgactcaatgaaagacccaaattgcctgtacagataaaattcactgaatcaaaggcacaatagctatcttttcacttgagctcagaaaagtaaaatggcttaatttgaactattaattttcagtggcctctaattaaacaaaaacaaaaaaccacaaatactggctaggtaagatattcctgaggtcattttaaaagaagtgtggcacctaggattcaatatttaatgctaacagtattatattttagtgaaatttattttggtggtgacagtttattaaacctaattagacttctttcaatagcttgttgtagagacaatctcaagggctggaaagtgttgctaaaatgaatgtcatacatttctgatatactaaggagcttataaagtaattctttcatagtgcaagaattattaatttcttagaggatgtttttaaaggagctacttaattgggaaaatgttctttaaatatcagtaatagttcattaagtaacatagtagctaagaacatggactatattttcacagcatagttcagcttaggcacacctttagtttggattattggcattctcttacgtaggaattatatcattgtagatatgtaattatggtaataagcaattttcataaccatgctcactcagactatatcatttgaaactgccatgtttccatttttgacaattcatgttcacaaaacaacaggaacaatttcctatttggtataaagagcaaaatttccaactttgccccaaaatgccatgggtggcatattgccatatgattatatcatatatttaatcatgtatgggaaagattttggattttttttcttatttaaaaaagtgctaaatataagaatatagttttaaatcagcaagtctaataacactattgcagctgtacacagagagaaccttttgtgcctttttgcctgcagtaagcatttatttctattttacatgagttctaagaatgttgatgattattgcaccttgttcttctgtatataaacttgattaaggaatttttttttttaaagcaaggagccgttttttgttactaggtggataccttagtaaacatgaggggaattatcagatagatgtctttggagcccagccttccctgtgtagtgagctggaaactcctttagattgtattcattggtgtgtatgtatatgtacatatatgtataaatagttaaatacataaacataaaacttaacatcgcattgttgtgatgacaagaagtagtaaggtgctaggtggttacattaaaaagcacagcacagtgtataatcagtcactatgactggtggttttgtaagctgggttcagtttttgaaccacccagaatacctcatgtgtaaatacagtgttcatgacttaattgaaatacagttattgtttaaaaaaaaaaaaaaagaatgtgaagccactggttggcttatgccttctgatctatcattcttgcctctttttttgtaaaggggttttcttcttgttgttctgttttttaatagggtttacagctagaattttgaatgccaaagttctatttattaaattaagaaaaaagttttcaatgttaatggctagtatttttccactggactattgtttgttgatgttggaatttgtatttacagagaaataaattttttataaaaagaaaaaaaaaaaaaaa

SEQ ID NO: 1143 - DNA, 3029 bp, Homo Sapiens
  NM_001042476
gcgctggagaaaaacttcacccgcgcccacaggccccctttccgcaggctgcgctggcggttcaggtttgcaggccggaagtgaaatgttcttttttgatttttaaaaaggaagcctccggccctatggttttctggggttggagtggatgtgtgtgctgggggaggcggagacgtcccgctccaggcagggccttgggtcttaataggtggggaaatctctgccaaataggaggcctctcggagcctcagtttccccatctgcagactgggctctgacttcttctggcatgagagggtgtgtgagagtaaaaggaggcagctagccccgtgccgggagacacgtcagccatgtcatctgagcctcccccaccaccacagccccccacccatcaagcttcagtcgggctgctggacacccctcggagccgtgagcgctcaccatcccctctgcggggcaacgtggtcccaagcccactgcccactcgccggacgaggaccttctcggcgacggtgcgggcttcacagggccccgtctacaaaggagtctgcaaatgcttctgccggtccaagggccatggcttcattaccccagctgatggcggccccgacatcttcctgcacatctctgatgtggaaggggagtatgtcccagtggaaggcgacgaggtcacctataaaatgtgctccatcccacccaagaatgagaagctgcaggccgtggaggtcgtcatcactcacctggcaccaggcaccaagcatgagacctggtctggacatgtcatcagctcctaggagatggtggaagcaccccttgtcctgtgcttgtgggagactttgcagggaggaggcagcagacactggagatgacattcttccacacgagacggggcttcagccgggcatggtccctctcaagtatctcctggaggaaggggtatggggggcaggtgtggggtgtggggtgttcccggccatcagcacagcctatgaccattgcaacaacctctcaccatctgaagagcattaaaagcatttaaaaaggagaggtgcccactggtggctgagtggaggttccaaccccatcccagggagtggatcaagggtggtatttctccagctgctcagacacatgggctcaacccacagaatccctcttcctcctggagctggaggccccagattcccagatctggccccctggcagcctgacagggaccttgcgtgacttctccaaggcaaatttccacctaagtgccccttgcgcctctcctggggcctgggcaaagcagttttctaattcttggcttggttggttctaggggagctggcttgaagtgggtggggaaaggcgggggtggcggtctttggattggacggatgttgccttttggtgcctttgcagtgggaggcggcatagctgcctgtctggggaagacagttctcccagcactcccacccctgggcacagcaggctggtactgggaggctgaacccctcttagagcctgaccttttcatctgccttctggttgtgtgaccatcactcaacagccatttcacagcccctgtaattatggcggcggggggctggggtggtggtggtgggaagggcttgtggagaggacacagtctttgtttaaaaactttgtcccgatccatccagaaaagagtaggtagcttgcatcctgacagcctggcaaagtcaagaaagttgaaggagaaacatacctttggagagggggttttctttaaaactagtgttaagaaatgcttagggattttttttttcttatttttcataactaaagctttcacccagagccggctctgtttgcactttgctgccgacattgcaaactttttggcagggtgggagactgagtctcattctgtcacccaggctggagtgcagtggcccgatctcagcttactgcaacctctgccctccagggttctggcaattccgcctcagtctcctgagtagctgggattacaggcatgcgccaccacacccggttaatttttgtatttttagtagagaccaggtttcatcatgttgggcaggatggtcttgaacccctgacctcagatgatctgcccatctcggcctctcaaagtgctgggattacaagtgtgagccatcgcgcccggcctgcaaacttttttgtaggtatttctggtaaacaaatccttaggttatctttgctgtggttgtggtttggctttagtcatgatttcaaagtagaaatagctaggcattattttttgaaatatatgacctatatgtagtcaagaatccactgaacagaggcaagcaaaccttttggaaactggcttttgggcagacagtaaacgtccagtttgatgctggaagcatgaacagcttcatcaggtaggtactcctcaactctgatgagtttgtcctttcagcctaagggggtggaagggagttgtttgagaatagcaaatacgcatgttgattgcgagtgtgtggagacaaaggcagttcccaccacagttaggtcctggccattgtttcctcgcctgcgatgctccttgtacatcctcaccctcctctcccgcctctgccttctgctgggtcaaaggtggccttttctctccagccttgaattgttccctgttggcttcccaagggcccatctgctggtacagtccacacttccacagccaagacccgagagggctttcactgccccaagcctctctcctgtgaccctgggattctgtcttggcagaatcctttgtcagcggctcttactctgtccttcctgtttggccacagctctttcaatcaatgggtattctagaaccgcaggatgtcagagctggaagggacgcgataccggtttacacaaggggaaactcctcgaggctctgggagggacggagggttttggtgacagagcgagagctaaaattgaggattcctgaatccagatcttgcctcccatcagccatctttctcccaataaatttttgttttgtgcaaggaaaaaaaaaaaaaaaa

SEQ ID NO: 1144 - DNA, 3171 bp, Homo Sapiens
  NM_001042479
gttccgcaccggaagcgcgcttccagtcgccccggcaacagccgcctccctcgcgtcccccactccccctctgtctctccaaggaaaactaggcccctgcgcggccaacgcccaggatccgcaagctgcgcgcccacgagctccaccagcccattggagaaaagttactgttcagtccctgaaggcttgtgccataaaagagtgggagacattcccagggagtttcagcacccatttggactttcacaatcagagatggcagcggtaaaggcatcaacatcgaaagctaccaggccttggtattctcatccggtatatgcaagatactggcaacattatcatcaagcaatggcttggatgcaaagccatcacaatgcctacaggaaggccgtggaatcctgtttcaatcttccatggtacttaccttctgcgcttcttccccaaagctcttacgataatgaggctgcgtatcctcagtccttctatgaccatcatgtggcctggcaggactacccctgcagttcttcacatttcagaagatctgggcagcatccacgttacagcagtaggatccaggcatccacaaaagaagaccaagctttgtccaaagaggaagagatggagactgagtcagatgcagaggtagaatgtgacctgagcaatatggaaatcactgaagagctccgccagtactttgcagagaccgagaggcatagagaagaacgacggcggcagcagcagctggatgcagagcgcctggacagctatgtgaacgctgaccacgacctgtactgcaacacccgccggtcggtagaagccccaactgagaggcctggtgagcggcgccaggccgagatgaagcgtttgtacggggacagtgctgccaagatccaagccatggaggccgcggtgcagctgagctttgacaagcactgtgaccgaaagcagcccaagtactggccggtcatccccctgaagttctgagctcagggcacagggtacccagcctctccttcttccttttgggtacacgctctttatctctccttctgtacatttcttagggaaaggggactttgtactggggtacaggcatgttcaccacagtcccagtgggcctgtcacggggtggatgtactatgccagccacttggaggtctgcaggacatgttctgttgccaacatgataaattttctcctgacataaaataattttgcatatactatactggttttttatgttgttggtaacagttcaattcattaacgttcttgcctagagatactgcctggtgttttgcttttttatcttttcttgtctttaacctgtctgaactacacaaatgcctttaaaaaaccagatatcctctctgactctagctccattagcccccactaaaaatgagccaagtgtgtagtgagacaaataccactacctgtagtggagagggatgcatgttctataaagggccagagagtgaatatctttggcactgcaagccacacggtcagtgttgtgactactcaaccctccctttgtagtgtgaaagcagctgtagacagtaagtaaacaaatgggtgtggctgtgttctaataaaactttatttataaaaacaggcggccgggcgcaatggttcatgcctgtaatcccagcactttgggaggccgaggtgggcagatcacgaggtcaggagatggagaccatcctggccaacatgatgaaacccgtcgctactaaaatacaaaaaatgagccgggcatggtggtgtgtgcctgtaatcccagctacgtgggagactgaggcaggggaattgcttgaacccaggaggcagaggttgcagtgagctgagatcgcgccactgcactccaacctagagaaagagcaagactccgtctcaaaacaaaaacaaaaacagactgcaggccagatttggtctacagatggtagtttgccaactgcacctctcatggaatgaaaatcacctgcctgacatttttattcttgttatctcattatgtctacagagcttagatgtcatacagaattgagagcaaagaacaataattccggcccggcgcggtggctcatgcctgtaatcccagcactttgggaggctgaggtgggcagatcacgagatcaggagatcgagaccatcctggctaacacggtgaaaccccatctctactaaaaatacaaaaaattagccgggcgtggtggcgggcacctgtagtcccagctacttgggaggctgaggcaggagaatggcgtgaacccaggaggcggagcttgcagtgagccgagctccagcctgggcaacagagtgagactccatctcaaaagaaaaaaaaaaaagaacaataattcccaaacctggtcactgctgcagtcacctctgttgcagaaaacgcacagttgatttcttactatatacagcaaatattgatttgataaaggaatacatttctgaaaatgaaatctaaaagctgatggagcaggtcatttataaaagccagctgccttttaaataagttattacagtacattgccagggtgagcccatgttgacctgagaagattagcacatccatcaaaggctggtgaaaagatttagtattgacatgtttctctctaagaacagttggcttcacattcagcccctgccctgagacaaatgcattattttcatcagccctgggtgcttatttttctaagctctcattttattactggagtcacaatttgtgtgtaggtgttgccgacaaaaatgataattaactttcccttgaggtgacacataactaaaatttcaaatctttagtatttctccctttcattttaaattcatatgcctaactataaaataactgtgactgagatacaagtacaaaccaaagcctggaattgcagcaggtgctgaggcatttgaaagtgaaatgtttctcttcgcaaaggactcttataccctcccctaaagaaatcaccatgccggtctcacccctactggctttgttacctaaggcttcacctctcagtgcttctggttccttccttatccttaaaatgagtgttaataattctctcgtggggtcattgtgcggaccacattgagtagtgcctgtaaaacagtgctggctacacggtaaatactcaataaatgttgacacgttta

SEQ ID NO: 1145 - DNA, 3089 bp, Homo Sapiens
  NM_001042480
gttccgcaccggaagcgcgcttccagtcgccccggcaacagccgcctccctcgcgtcccccactccccctctgtctctccaaggaaaactaggcccctgcgcggccaacgcccaggatccgcaagctgcgcgcccacgagtttcagcacccatttggactttcacaatcagagatggcagcggtaaaggcatcaacatcgaaagctaccaggccttggtattctcatccggtatatgcaagatactggcaacattatcatcaagcaatggcttggatgcaaagccatcacaatgcctacaggaaggccgtggaatcctgtttcaatcttccatggtacttaccttctgcgcttcttccccaaagctcttacgataatgaggctgcgtatcctcagtccttctatgaccatcatgtggcctggcaggactacccctgcagttcttcacatttcagaagatctgggcagcatccacgttacagcagtaggatccaggcatccacaaaagaagaccaagctttgtccaaagaggaagagatggagactgagtcagatgcagaggtagaatgtgacctgagcaatatggaaatcactgaagagctccgccagtactttgcagagaccgagaggcatagagaagaacgacggcggcagcagcagctggatgcagagcgcctggacagctatgtgaacgctgaccacgacctgtactgcaacacccgccggtcggtagaagccccaactgagaggcctggtgagcggcgccaggccgagatgaagcgtttgtacggggacagtgctgccaagatccaagccatggaggccgcggtgcagctgagctttgacaagcactgtgaccgaaagcagcccaagtactggccggtcatccccctgaagttctgagctcagggcacagggtacccagcctctccttcttccttttgggtacacgctctttatctctccttctgtacatttcttagggaaaggggactttgtactggggtacaggcatgttcaccacagtcccagtgggcctgtcacggggtggatgtactatgccagccacttggaggtctgcaggacatgttctgttgccaacatgataaattttctcctgacataaaataattttgcatatactatactggttttttatgttgttggtaacagttcaattcattaacgttcttgcctagagatactgcctggtgttttgcttttttatcttttcttgtctttaacctgtctgaactacacaaatgcctttaaaaaaccagatatcctctctgactctagctccattagcccccactaaaaatgagccaagtgtgtagtgagacaaataccactacctgtagtggagagggatgcatgttctataaagggccagagagtgaatatctttggcactgcaagccacacggtcagtgttgtgactactcaaccctccctttgtagtgtgaaagcagctgtagacagtaagtaaacaaatgggtgtggctgtgttctaataaaactttatttataaaaacaggcggccgggcgcaatggttcatgcctgtaatcccagcactttgggaggccgaggtgggcagatcacgaggtcaggagatggagaccatcctggccaacatgatgaaacccgtcgctactaaaatacaaaaaatgagccgggcatggtggtgtgtgcctgtaatcccagctacgtgggagactgaggcaggggaattgcttgaacccaggaggcagaggttgcagtgagctgagatcgcgccactgcactccaacctagagaaagagcaagactccgtctcaaaacaaaaacaaaaacagactgcaggccagatttggtctacagatggtagtttgccaactgcacctctcatggaatgaaaatcacctgcctgacatttttattcttgttatctcattatgtctacagagcttagatgtcatacagaattgagagcaaagaacaataattccggcccggcgcggtggctcatgcctgtaatcccagcactttgggaggctgaggtgggcagatcacgagatcaggagatcgagaccatcctggctaacacggtgaaaccccatctctactaaaaatacaaaaaattagccgggcgtggtggcgggcacctgtagtcccagctacttgggaggctgaggcaggagaatggcgtgaacccaggaggcggagcttgcagtgagccgagctccagcctgggcaacagagtgagactccatctcaaaagaaaaaaaaaaaagaacaataattcccaaacctggtcactgctgcagtcacctctgttgcagaaaacgcacagttgatttcttactatatacagcaaatattgatttgataaaggaatacatttctgaaaatgaaatctaaaagctgatggagcaggtcatttataaaagccagctgccttttaaataagttattacagtacattgccagggtgagcccatgttgacctgagaagattagcacatccatcaaaggctggtgaaaagatttagtattgacatgtttctctctaagaacagttggcttcacattcagcccctgccctgagacaaatgcattattttcatcagccctgggtgcttatttttctaagctctcattttattactggagtcacaatttgtgtgtaggtgttgccgacaaaaatgataattaactttcccttgaggtgacacataactaaaatttcaaatctttagtatttctccctttcattttaaattcatatgcctaactataaaataactgtgactgagatacaagtacaaaccaaagcctggaattgcagcaggtgctgaggcatttgaaagtgaaatgtttctcttcgcaaaggactcttataccctcccctaaagaaatcaccatgccggtctcacccctactggctttgttacctaaggcttcacctctcagtgcttctggttccttccttatccttaaaatgagtgttaataattctctcgtggggtcattgtgcggaccacattgagtagtgcctgtaaaacagtgctggctacacggtaaatactcaataaatgttgacacgttta

SEQ ID NO: 1146 - DNA, 7754 bp, Homo Sapiens
  NM_001042496
agctgcgcgcgcacccgcatcagctggcgccgggatactgcacctgcgacctccttctccctcaccctgctgcccagtcaggccagcctgcgtggccgtctcctcctctactgggaccctgaggaagaacgacgagggggtgacctgcgccggggcgggggtaggggagaacgcgcctccggcaaagggggtggctcgtcctgtcacacgcaggagaaacctagcgagcggaccgtggctcagtggactagctacgacttgccacgactctgagctgcagtccgaggtgtcttgatccgctaacctcctcccagaccccgaggacctttctgctaggagaagagcgggcgcgccacccccaccgacctctcggagacaggaatccgctctgcccctgcatcctcctctgctcacccttctctcagtagtaaaccaccaccaagatggcttcagttcggttcatggtgacaccgacaaagatcgatgacattccaggtttgtcagacaccagtccggacctcagctctcgatctagttcccgagtaagatttagctcccgggaaagcgtgcctgaaacaagccggagtgagcctatgagtgagatgtctggggccaccacttcgctggcaactgttgcactggatccacccagtgaccggacttctcacccccaggatgtcatcgaggacctgagtcagaactccatcacaggggaacacagccaactgttagacgacggacataagaaagctcgaaatgcttatctcaataattccaattatgaagaaggagatgaatattttgataaaaatttggcactctttgaggaagaaatggacaccagaccgaaggtgtcttccctcctcaaccgcatggccaattacactaatctgactcaaggagcaaaggaacatgaagaggcagaaaacatcactgaagggaaaaagaagcccaccaagaccccccaaatgggtaccttcatgggtgtctacctcccatgtctacaaaatatttttggagtgatcctttttttacgccttacatgggtggtgggcacagctggagttcttcaggcttttgcaattgtccttatctgctgctgctgtacaatgttgactgctatctccatgagtgccattgccactaatggagtggtgccagctgggggctcatactttatgatttcccgggcactgggcccagagtttggtggggctgttggcctctgcttttatcttggtaccacatttgcagcagccatgtacatccttggtgccattgaaatctttctggtctatatcgtcccccgagctgccatctttcacagtgatgacgcactcaaggaatcagcagccatgctaaataacatgcgtgtctacggcacagctttcttggtccttatggtattagtggtatttatcggcgtacgctatgtgaacaagtttgcctcacttttcctggcctgtgtcattgtgtccatcttggccatctatgctggagccatcaagtcttcttttgctcctccacacttcccggtctgcatgctgggtaaccgcaccctttcatcaagacacattgacgtttgctctaagaccaaggaaattaacaacatgacagtcccatcaaagttatggggattcttctgtaactcgagtcaatttttcaatgccacctgtgatgaatactttgttcacaataacgtcacttcaatccagggcattcctggattggctagtggtataattacagagaatctttggagtaattacctacccaagggagagatcatcgaaaagccttcagccaaatcttctgatgtcttaggcagcttaaaccatgaatatgttcttgttgacatcaccacctccttcacgcttctggtgggaatcttctttccctctgttacaggtatcatggctggatcaaacagatctggagatctgaaagatgctcagaagtctattccgattggtactatccttgccatcctgaccacctcctttgtttatttaagcaatgttgtcctttttggtgcatgtattgaaggggttgttctcagagacaagttcggtgatgctgtgaaaggtaatttggtggtaggcaccttatcttggccatccccatgggtgattgttattggctccttcttttcaacatgtggggctggacttcagagcctcacaggtgcaccgaggctgctacaagctattgccaaggataacatcataccgtttctgagggtttttggccacagcaaagccaatggggaacctacctgggctttacttctaactgctgccattgcagagcttggaatactcattgcctccctggatcttgtggccccaattctttccatgttttttctcatgtgttacctctttgtaaacttggcatgtgccttgcaaacattacttcgaacacccaactggagaccccgattccgctactaccattgggccctttctttcatgggaatgagtatctgtctggctctgatgttcatttcttcctggtattatgccattgtagccatggtaatagctggtatgatctacaagtacattgaataccaaggagctgagaaagaatggggtgatggtatccgtgggctgtccctcagtgcagcccggtttgctttgcttcgattggaggaaggacctccacacactaaaaactggaggcctcagttgcttgtattactgaaactagatgaagacttacatgtcaagcatcctcgcctcctcacctttgcctcacagctcaaagcaggaaaaggtctcactattgtgggctctgtcatcgtggggaacttcctagagaactacggtgaagctttagctgctgagcagaccataaagcacctaatggaggcagagaaggtaaaaggattctgccagctggtggtggccgccaagctgagagagggcatttcccacctcatccagtcatgtggccttgggggcatgaagcacaacacggtggtgatgggctggcctaatggctggcgtcaaagcgaagatgcccgcgcttggaagacttttattggcacagttcgagtgacaactgctgcccatcttgcactgctggtggctaaaaacatctccttctttcccagcaatgtggagcaattttctgagggcaacattgatgtgtggtggattgtgcatgatggggggatgcttatgctactaccattcctactgaaacagcacaaggtgtggcgaaagtgcagcatacggatcttcacagtagcccaattagaagacaacagtatccaaatgaagaaggacctagccaccttcctatatcacttacgcattgaggcggaggtagaagtggtggagatgcatgacagtgatatatcagcatatacttacgagcgcactttgatgatggaacaaaggtcccagatgctccggcacatgcggctatccaaaacagagcgagacagagaggcacaattggtgaaagaccgaaactcaatgctacgattgaccagcattggctctgatgaggacgaagagacagaaacctatcaggagaaggtgcacatgacttggacaaaagacaagtacatggcatcccggggacaaaaagcgaagtcaatggaaggattccaggacctgcttaacatgcgtccggaccagtccaatgtgaggcggatgcatacagcagtgaaactcaacgaggttatagttaacaagtcccatgaagcaaagctggttttattgaatatgccagggccaccccgaaaccctgagggtgatgaaaactacatggagttcctagaggtgcttaccgagggactagagcgagtcctacttgtccggggtggtggcagtgaagtgatcaccatttattcataacctactctgaatgaccgtgcttgacctgttttcttaaaaggcctacgtcctccatggaagtgccagctcattactaccactcccactcaactagaagcctgtgttctgtacacatcatactgaactcttgatgagctgagcctcaagtacctgtgtaaaagagctcccatctgatctgcagtcattacagaaaaagcaaatattccctcaacatcagaacaatgctcaagtctttcaagccacgtctgagcagtcaaaggcaaattagaattaacaagctgagccaataaatgaattggtaaaagggatgctagaaattcaactgaagaaaaaaagcaagtcaagtacgtattcagcattaaagatgaatctcagaagtcatggttcaatgttgacactgtgaggataacaactagagacagcttcatcttactaaagaatttatggtcaagtatatttggacctattatcctcggcaagccaagatgcaaacattttttagctatatttctttagtatacccactgctgtaattttatattaggatactaacttgaaacatggctgcagcctctacttcttcaaaaacatccccccaaaataccagatttaaatatccaaatactgtgtcagtgtatacttcaactgttttgtttctcttaactcaaaacccattctgtcattgtaacacaggcagtgttaccatggaaattgtttttggtaaggtaaaaattatttctttcaggttcctttcaaatggccgaactaagagaactccaaaaggaagctattaacatttactgaaatagtctgtggttctctatacaacatggacaaaacatacaagctgttgtctaagaaatgcaggtcatggtgcacattaatcaacaggttcttctccccccgcccccacccccgcgcctttttttatgccctcttattaagcacaggtcaaaaaatcttaaggaacaaatactaggaaaactggctaaacatccttccctgaaagcactggaccatcttttaaagggcacatctagcaatggaattggaagttctagagccacactctttctttagtgccaacgttactgagcggctactctccttacctactttactaaaatggcatacagattggcattgacctgttgaagaaattttaccactaagaaatcttttgcctcatctacaaagccatagttaagacttgaggcattcaacttaatgccaagtataagcatttccccctttttctttcaattttattcttcattctgactacagaaacttggccctgaactacgagattagccaagccaacagtcttctaatttgttttcagaaacttcaggccgggtgccgtggctcacacctgtaatcccagcactttgggaggccaaggcaggtgaatcacttgaggtcaggagttcgagaccatcctggccaacatggtgaaaacctgtctatactaaaaatacaaaaattagctgggcatggtggtgcatgcctgtgatcccagcaacacggaaggctaaggcaggaggatcatttgaacccaggaggcggaggttgcagtgagccaggattgcacctctgcactccagcctgggtaacagagtgatatgtttcaaaaagaaagttcagtgtgccaaggaaatacttgtgtaagctcagctttttatttactaatatactgatcaaacatctggcttacaagcatagggaaactacttatgtggctggctgagcagtaatttcaagtatgtgaaatcttcatttcttttacagaatagttatttagagaaacttttcttgcctgtattcatggctgtttttgaatttcaatttattagtcataaatagtgccactcttctttgattactaaataggacatggagcaagctgacctaggtgtcacaaattattcatttgacctgtaaggacagagaaaacccttcaatatagcttaagaaattgagtaattttgggccgggtgcagtgactcacgcctgtaatcccagcactttgggaggccgaggcaggcggatcacgaggtcaggagatttgagaccatcctggctaacacggtgaaaccctgtctctacaaaaatacaaaaaaattagtcgggcatggtggcgggcgcctgtagtcccagctacttgggaggctgaggcgggagaatggcgtgaacccgggaggtggaacttgcagtgaaccgagattgcaccactgcactccagcctgggcgacagagggagactccatctcaaaaaaaaaaaaaaagaaagaaagaaagaaattgagtaattttgatttgttccctttgcttgcttcaacctccaggcccactgaggatggcaaagcggataggatcttaagtctttttttctgttacttcctacagatggtagaagcattatttacaactcccactgcaacactccattgcttagttgagtttaacagtagtgagtcatgtcctgcaggatccagtatcttttttttttttttccgagacgtagtttcgctcttgttgcccaggctggagtgaaatggcacaatcttggctcaccgcaacctctgcctcctgggttcaagcgattctcctgcctcagcctcccgagtagctggaattacaagcatgtgccaccacacccagctaattttgtattttcagtagagacggggtttctctactgaaactgatgttggtcaggctggtctcgaactcccaacctcaggtgatccgcccgccttggcctcccaaagtgctgggattacaggcgtgagccactgtgcccaaccaggatccagtatcttaaaggcccatactgtaaaggtcagcctgcctaggaattctgccacatttacacacacccctggccaaagtaatattttttttttccatgtagaacaaattatgggcagaaagtaaagttagttttagaagtgctgtttgtggttggagaattgtaaaaatcttttaaagggataagggaattagtggcttttaatataaccactgcttcagcccgaaacacaaaatcactgttacatggaaaactggttattaggccagatttatattcatgtctgtctagagtatttcatgtgtgtatgtgttgcttacgttgtctgtctccaaagtctctcatctcttttaatcactgcaaataaagcaatactgaaaacttgagagaatgcaccttaggggaaggggctatttcaagacagaaaacaaaggaaatacctgccttttgaataagatcccgcttttgagtcttacctatgactttaccagggtagattagaaatacacatcctcctgctgaccctctgccttcaatagctatctatcttaaaagctgaagtttgaactgcagcatctgcttgacaggtgccaggttccttcggcagggggacgatcactctatatatcttccgttgcctcagattcctgtggcccaaggatcccaccaatcctcgttccccctaaacatgctaacaaaaatcccttatcgtgggtattaaaataataacagttacactgtatgcatatttatgtgctccttttgtctggtttttcttttcatcatgtataagctgaattcagcattagtttctcacatcttcccccaggtatccccaacagaatttttatgtcccagcttgtattaaatagaagtgaaatattaaggaaaataaggaacttgtgcaactttttttatgcattgttctcaaccatttaatttattgaaaggagatgctgcaacagttcttgatttagcagcagttattctcttgtttacatagttatgtttttttgttgttgttttgctctgtactggaaacaaaaataaagttttctacattattttca

SEQ ID NO: 1147 - DNA, 498 bp, Homo Sapiens
  NM_001042500
ggctgctccttgctatagaagacctgggacagaggactgctgtctgccctctctggtcaccctgcctagctagaggatctgtgaccccagccatgaggaccctcgccatccttgctgccattctcctggtggccctgcaggcccaggctgagccactccaggcaagagctgatgaggttgctgcagccccggagcagattgcagcggacatcccagaagtggttgtttcccttgcatgggacgaaagcttggctccaaagcatccaggctcaaggaaaaacatggcctgctattgcagaataccagcgtgcattgcaggagaacgtcgctatggaacctgcatctaccagggaagactctgggcattctgctgctgagcttgcagaaaaagaaaaatgagctcaaaatttgctttgagagctacagggaattgctattactcctgtaccttctgctcaatttcctttcctcatcccaaataaatgccttgttacaaga

SEQ ID NO: 1148 - DNA, 2673 bp, Homo Sapiens
  NM_001042511
agcgggtggtctcccctaaggctgaggcggcggcgggcgcgcggcggcggcgggcgtgcgaggctgttgtgctcccggctctcgtgtttcccctcctgagcgggtggaggaggcccaagcggtgctgggcgcgctcccccttcctttccctccggcgtcctctcccggccctctcgcgctgcactgtctctccgacgcaagactgtcccggcccggatatggctcgtggacagcagaaaattcagtctcagcagaaaaatgccaaaaagcaagctggacaaaagaagaaacaaggacatgaccaaaaggctgctgccaaagctgccttaatatatacctgcactgtctgtaggacacaaatgccagaccctaagaccttcaagcagcactttgagagcaagcatcctaagactccacttcctccagaattagctgatgttcaggcataaggttgtttacaggtgaattcatgacacctttgactcttctactgtctcagaccttaggtaacatacctgcagctgcttttctaacaaactgttgatcagcaaaaataaaggggctacagaaacactcatttttatgctgttccctcttgggcttcatgcaaagacaattctgtgtaaatgtacagttgactctgatttggaaatatgaaaatcagtccatccttgttataaaaaatttttttacaattgtaattatattgatgttcatattgtgtaaaataactcatttaataaaatagtactttgatttacgacatcacaggataaatggttttagaaattctgttctaactttccacattatttgccttataaaaatctaatgaattcatcagctagaattgcaagtgcaattcttatatccctttctctgctcagtggcaggttcctcagttaaactagagcagactgattcattaaaattgtgcatacgattttatgggcagctgatgatctaggtgaaaaatgacttatctgctgccttagtatattgcggttatgtgtcattgtacccctctgatcatttcctgtgtttgagttggaatatttaaaattgcagtatgacctggctctaactgccagtcaggtgtaccctgtagataactgatagcttcctaaaagcggttggattgtcagtgagcccttgtgaaaggttaggttctaatgtatatgccgtaatgaaataatcattaagcctattgtttaatgcaaaatatggaacaaatgtgaactggtaaaggtcgatcttgatactatattctttgaaaattcttgaagttctttaatttgaaattgaaacattaatttttgaggtttttggaagttactatttggccatttttacaaatggattttgcattaacaggaagattggaatgacttgtggctggattaattcccagaaccctctccctcctttcttttctaagtgagttgttgattttaggagtttgctttgtgctgttacctaaaatcagagactggtgtacagtatgacttccatctgaacttgaaaagtattaaaatgggtcaatattcacattcttttagatctcaggatgggaaaatgggtttgttcagatggatatggtaaatcttacccaattaaggaaggctaattttagagttcttctaatttgcttgtgtcaactcttaacttgtaaaactgctgttaactcggtttaaatttttaaattaatataatagaaagaacactaaaatacttactggtaactgcttagagccatttatctgatcctgtggattacagaatgcattccctcttctgctgtagcttatcattgctttgttttgtagctctgcatattttgcccaccttgtcttccctgtaagtttaagacgtttccaaggaaaagcttcagggctgatagtttcttagcaattcctattcttatgcccttactttaaaatagtccttttattttgtgtattttatttcctaagtttcagatgtaatatctgttgtttcctaacatgtcgattaccagaacgttagaattttacctaatttcttgtggatattgcagaagttctggttaaatcacaacttaaaagtttttaaaagtgctttgagcatatgtatatgtttagtgacaaatcatataaaaccattcacaagttttggttttttttttttcgtttgttttagtgactaattcaggatgaaagtttttttgttcttgtatttaacccttttttataagcagctgaagacaccatatttaacactatatctcagtgatagggaaatagctgcattgatcttacatgagcataatcatccttatacttcatgaggggattattagtacaatccccattttactgtgtttgagttaaaaaccaaacatccctgtaatttaatttgaagattctttaacagattgcagcaaagttcattataaaactgttatggtgtcttcaaagacttgataaaataacactgagagagaattggtccatttgtatgctgtatttctattacttgccaaaaggaatggggttaagattaaacttgtttccattctcttcacatggatatacatccccatgtttaactgacacactgggggctcagttgtgtgctgtaatgtcttattaaagaagatattaaagaaaactaaactagtctaaaaaaaaaaaa

SEQ ID NO: 1149 - DNA, 4051 bp, Homo Sapiens
  NM_001042519
acatgctgccacttggctgagccgggcgccggcgagaaggcggcgccgctgccctggcagctggactgcactttgcccccgcccggcctcagctgccgcccgcccagacgccagcaagcccccctcccacgacagggctgctccgggagcttcggagacccgccccgggcctgagcgcaggctgcctccgggaccccacggctgtccggacgtgccatgggcgcgcagctgccgggcaacgtgttgtgtaaacactacacgtgaagagtggtgaaagggaacattgattactgaagtgccctggagagggaaagcactggtcaacatcacatggacaaatttcattgttttctaaagatggcctggaagtagtctttgccactgcttcctccacaaacagctcttcataacatgggctgcatgaaatcaaagcaaactttcccatttcctaccatatatgaaggtgagaagcagcatgagagtgaagaaccctttatgccagaagagagatgtctacctaggatggcttctccagttaatgtcaaagaggaagtgaaggaacctccagggaccaatactgtgatcttggaatatgcacaccgcctgtctcaggatatcttgtgtgatgccttgcagcaatgggcatgcaataacatcaagtaccatgacattccatacattgagagtgaggggccttgaggctgtaggatgacaacactttgactgtggaggtgctagtttgaataaatgtgacaaaagcaaaaactggtgtgaaaaagtacaaataactatctggatttaaaaatgtgtctacgataatgtcactattataagaacaactaggatgaaatgcattttaagtacttctatgttaacagcaatttctgtttagtcttagattttagtcatctgaagggctgaacagaggtcctgtgacacccaataatcagctgaatgtcacagcacttcttcctaagtaatggcatcaccaaagaaaatgctaaggaataaaaactgccccaaattccaatggttgaagtttatcctttaaaataacaatttttgtttgtttatacccaaaaaaagtccagatatgaaaagggcttttctaaaatttcttggcgagggaatggcactcaaatcatagtgattaacagtaagtcttgtttgtttgtcaaggatctctacttcttgacacaaatgaaccctgtctttaataagataagatatttatttttgtagatgagaagtgtaactaccaccttggacctcagggccctaactaattacagctgttactggacgactcagactttgtgcctaaagccatcttagagataacagtttatagaagccatgacattagtgtttattgcattgaattaagcccagtgatataactatacaagaaaacaagtaggggtaccttttacaaagagcaatccaataaatcttaaaaataacagaaacttagtctgcaaggtagaaagtttcagttttaattctgtattaagctttactatctcagaggtacagagggctggaatatgggcatttatttccagttttttcttgactagtaaggcggtcaccattaaaatagaccagataatgcatgaagatttacagttgtattgcaaaacggaaaagataaaactgtcctttgaggagagtactcgttttctgggtttttgttattttttagtggtaacacaagcctatagggcatttatagccacctattatactgtttccataagcctggctaccttttagggaagctattttttctctttcatttttactgtcacagcacatacacacacacctttttgttttaaaggattaagtactgtttgaagatcagtggtaacagaaaatttgggagggagaagaagaaattaagacatgacttgttagaaaattaagacttcagtttctagaattatcttttcatcaagatttggtagacattgagtttaaatggaaaggaaattatttaagcctgtgtatgttagatccacaatacaccattggtattgaaatataaaggttaaaaaaaaggcttatgacctctttaatgagataaatatgtatttgtcttgtaagcaggcagaaaatctacctctaattttaacactaatactttgaaacccacaatcaaatagagtgaattctccaagttacataagcaaggaaaacattatttgaaatatgccatgttttcgttgcctttggacacctcatcattcaactctaattttaccgagtcccgggatttgtactgtcccattgtacttgcaatctacaatttatataatagaaaaacaaccaaacccattcatacaaggatctgaagttataaggttaagggcagaaagtttcccataagtataaaacatttccaggtcatgaagagtagtttaggttgagtgacaaaagcctaggtgtggttgtttttcattcattttgcatctcacaccaagacatttttgctgcaaggtcatctgctgcttaaaatgtacaattaggtatataaaataagtacaatggtgaaaacacaaagccaggtaaagcagcatgccccactaaacttttcagtatacatagggacagacaagtgagttttggttgtatctaaatattttaatttcaggttccttctgtgccctgggccactatttcccaggggtgtgacagagatgcctgccagatccatatcaactagaagtctgatttctgttgctgcccttcctcagcaactatggcagtatacttttatcaccaagcaccactcccttgtccctgaatcacattttaatagagtacaatatcttctgtacaatatttctgaaacacttatgtctgaaatatatgctgtattgtatgttaacccatgacatatatgaactacaaggcttgcataatcagtgagctagtggataaatcaagacaggagcaaatgggagaaagatgaataaacaaatgaaaaaagatgaataaatgaataagagagatgaataaacaaatttacattacatgtgatagttatcatggtatggccttcatgacaagatggatgagaatatcactgataggatattagccttctttcatatctttatattgaaatatgggctttacttcaatttgaaggtctttcatgaacaataaaagagagtagaaggactgtctgagaaggcaggagacatataaaacagatgactgaaagactgactagctcctggaaagggaaacatttggaacatccagagtaagggcaaatgggcttctaccagcacaacaaagagcctccaggtggcaacatggaagcaggttatcagagaaaataaatgtgcaaattccttatttacaatgactcacttaaccccacaaacatgtttcactgctgccttccccagttgtcgcttatgtactgttgttacctttcagttacatgcctttgatcctaaaattctctacttttgttgccttatcagttctttgcaatctgcctgtggttatcagcacttaaagcacaattttgaaggggaaaaaaatgataatcaccttagtcccaaagaaataatttgtcaaactgccttattagtattaaaaacagacacactgaatgaagtagcatgatacgcatatatcctactcagtatcattggccttttatcaaatggggaaactatacttttgtattacatagttttagaaatcgaaagttagagactctttataagtaatgtcaaggaacagtaatttaaaaacaaagttctaacaaatatattgtttgcttaatcacaatgccctcaacttgtatttgaataactaaataggacatgtcttccttggagctgtgggcattagttcagaagcactacctgcatcttaattttcaaaacttaagttttattagcaaatcctcttctctgtaagacttagctatgaagtggtatattttttccaaatatttttctgaaaacatttgttgttgtaactgcacaataaaagtccagttgcaattaaaaaaaaaaaaaaaaaa

SEQ ID NO: 1150 - DNA, 2894 bp, Homo Sapiens
  NM_001042536
tctggagctccagctgccccccgccaccactggccgctcgcactaccagcctgtctcgcacgctaaggtcacgaccgctgcaagcaggctttgctgcagattgggatcaacatgatggcactgcctggaggtcgccacctggactccgtcaccctgccgggtcagcggctacacctgatgcaggtggactcagtccagcgctggatggaagatctgaagctcatgaccgagtgcgagtgcatgtgtgtcctgcaggccaagcccatcagcctggaagaggatgcacagggtgacctcatcctggcaggtggccctggccctggagaccccctgcagctgctgctcaaacggggttgggtcattagcacagagctgcgcaggatcgggcagaagctggcccaggaccgctgggcacgggtgcacagcatgagcgtgcgtctgacctgccatgcccgctccatggtcagcgagtacagtgctgtcagcaggaactccttgaaggaaatgggcgagattgagaagctgctaatggagaaatgctcggagctctcggcagtcacagagaggtgccttcaggttgagaatgagcatgtcctgaagtcaatgaaggcctgcgtgagtgagaccctgagcatgctgggccagcactttggccagctgctggagctggccctgacacgggaggttcaggcactggtgagaaaaattgatgcctcagacaatatctacaccacagagtccaccacagggaacctgttcagcctgacccaggagggggctcccttgtgccgcatcatagccaaggagggtggggtcgtagcactcttcaaggtttgccggcaggacagtttccggtgcttgtacccccaggcgctccgcacgctggcctccatctgctgcgtggaagagggtgtccaccagctggagaaggtggatggcgttctgtgcttggccgacatcctgaccgacaacagccactcagaggccacacgggctgaggctgcggctgtggtggcccaggtcacctccccacacctgcccgtcacccagcacctcagtagcttcctggagagcatggaggagatcgtgacagccctcgtcaaactgtgccaagaggcctcatcaggggaagtcttcctactggcctctgcggcccttgccaacatcacgttctttgacacaatggcctgcgagatgctcctgcagttgaatgccatccgtgttctcctggaagcctgcagtgacaagcagagagtggacacgccttacactcgggaccagattgtgaccatcttggcaaacatgtctgtcctagaacagtgtgcctctgacatcattcaggaaaatggggtccagcttatcatgggcatgctgtctgaaaaaccaaggtctgggactcctgctgaagtggcagcctgtgagcgagtccagcagaaagctgcagtgaccctggctcgtctcagccgagacccagatgtggcacgggaggccgtgcggctcagctgcatgtcccgtctcatcgagctctgcagatccccatcagagaggaacagcagtgacgccgtgcttgtggcctgcctggctgctctgcgtagattggctggggtctgccctgaaggcctccaggactctgactttcagcagttggtccagcctcggctggtggactccttcttactctgcagcaacatggaggagagttttgtgtagtgagtgtgggcgaagaaatacatttggctgttctcacaccccctctgactatgcaccagtgaacacatctgagtacataccagctctcctcatcttcttatttatacttaacttatttttgtgtgaaataaatggaggacaaaatcttagagcaacatcatcaaacagtctttggtccttgagaatcttctttgtgttttattttttgatttctgtagcttttcagttgcagatgttgaaattcgtaatgacaaatatgacaaattgtcatgggtgattccacttcatcttattttttctactctcactatacaatcttgcctcattttttaaaactttggaaccagaggatttcaactgcctagcaagttttttttttaagttggatttgctcttcccaaaaatctaaaatgaatttaataattgggtagaatatattggaaagaagtttctttttctttaataaatggaatcatataaaatgtatcccggattttcttattaaattgtattttaaactaggttcttgcttcccaggtttcattccccaaaaacttttccaaccattaaaagtacacacagaattgtcttgttttcataggtgtataaataggttaagttctgagtgacttagtgagaaaccaaagtgactttcaaaaatacacccaaaggcaccagaaaccctgcttcctttggcttctttgcttttgtgtaacctcctgttcacctcctggtgaatagaatcctcagatgaggcttattgaatgattgattcctcctcaaaagtatacttgaaagcagtggtgtgctgaagccagctcatgcccactcacaagggacaactgtgagaatttcttcctaactctgcactcagtgaccttgcgttggtagccatgagctacttcatgagccctcatgttgaaattggccatagtgggagtatttacaccacagaaattcacagatgctataaagcacagctttcgctttttttttttttagagagagctggtttaccaatttcactgcttgaaagtatcacaaaaatctggggatccttttgaaaatataaatgccatcatattgtgatataatttatacaatataatataattgtgtaaaatcatgattataataatgtttcaataaacatttcttaaattcccaaaaaaaaaaaaaaaaaa

SEQ ID NO: 1151 - DNA, 2789 bp, Homo Sapiens
  NM_001042539
ttcctccctcccgccggccggggtgcgcgggcggcggggcggcccgcgggccatgcgttcggcgcggcccagcccggccggccgggggcggcgccccgagcccgggccccgcgcggcccgcgcccccggcccccgctgagccccgggggccccgctgcggccgaggccatgttcccggtgtttccttgcacgctgctggccccccccttccccgtgctgggcctggactcccggggggtgggcggcctcatgaactccttcccgccacctcagggtcacgcccagaaccccctgcaggtcggggctgagctccagtcccgcttctttgcctcccagggctgcgcccagagtccattccaggccgcgccggcgcccccgcccacgccccaggccccggcggccgagcccctccaggtggacttgctcccggtgctcgccgccgcccaggagtccgccgcggctgctgcggccgctgccgccgctgctgccgccgtcgctgccgcgcccccggcccctgccgccgcctctacggtggacacagcggccctgaagcagcctccggcgccccctccgccacccccgccagtgtcggcgcccgcggccgaggccgcgccccccgcctccgccgccactatcgccgcggcggcggccaccgccgtcgtagccccaacctcgacggtcgccgtggccccggtcgcgtctgccttggagaagaagacaaagagcaaggggccctacatctgcgctctgtgcgccaaggagttcaagaacggctacaatctccggaggcacgaagccatccacacgggagccaaggccggccgggtcccctcgggtgctatgaagatgccgaccatggtgcccctgagcctcctgagcgtgccccagctgagcggagccggcgggggagggggagaggcgggtgccggcggcggcgctgccgcagtggccgccggtggcgtggtgaccacgaccgcctcggggaagcgcatccggaagaaccatgcctgcgagatgtgtggcaaggccttccgcgacgtctaccacctgaaccgacacaagctgtcgcactcggacgagaagccctaccagtgcccggtgtgccagcagcgcttcaagcgcaaggaccgcatgagctaccacgtgcgctcacatgacggcgctgtgcacaagccctacaactgctcccactgtggcaagagcttctcccggccggatcacctcaacagtcacgtcagacaagtgcactcaacagaacggcccttcaaatgtgagaaatgtgaggcagctttcgccacgaaggatcggctgcgggcgcacacagtacgacacgaggagaaagtgccatgtcacgtgtgtggcaagatgctgagctcggcttatatttcggaccacatgaaggtgcacagccagggtcctcaccatgtctgtgagctctgcaacaaaggcttcaccacggcagcatacctgcgcatccacgcggtgaaggaccacgggctccaggccccgcgggctgaccgcatcctgtgcaagctgtgcagcgtgcactgcaagacccctgcccagctggccggccacatgcagacccatctggggggggccgccccccctgtcccgggagacgccccccagccacagcccacctgctgagggggacccccgcacccaccaggtactggtgaggtttgtccaatggcggcggcagcggcagcggcggcagcggcagcagcggcagcagtagcagcccctcccacagctgtgggctccctctcgggggcggagggggtgcctgtgagctctcagccacttccctcccaaccctggtgagctccaagttggttgcgggggagaggggagaatggagtagagtcccttggtacaagctcctctcccccctcttttcccaccaactcctatttccctaccaaccaaggagcctccagaaggaaaggaggaagaaatgttttcttaggggaattcgctaggttttaacgatttgtttctcctgctcctcttctgtcagacctgaccccacacaaacctgtcccctcggttgtgttgaagtcccctggacagtgggcaggggtggcagaggacacgagcagccactgcccgtaccccctctcctctctgtaagcccatgccctgtcttcccagggacttgtgagcctcttccctcgacggtcctcttctctccttccagtcctctccccctgctgtctgcagcccctccccggggagttggtgctttcttttccttttttttttttttccagggggagggaggagaggaaggagggggatcagagctgtcccaaagagggaaagcggtgaggtttgaggaggggcagaagcagggccggcaaaggttgtaccttcataaggtggtatggggggttggggtcaggccctgaacatcgtcctacttgagaatctgtcaggggaaaaagtcaaggggagcaggaggaagagccaggagggccagaggcagagaagagatggagtcttaggggccagggtgagcgaggggtccagggcctagaggtgcttcctgggggcgggggaatgcagccagtgtccccctcccctcttccaccccagctccagccctggtcttgtcttttcatccctcttccccacgacagaagaagttgtggccctggccatgtcatcgtgttcctgtgtcccctgcatgtaccccaccctccaccccttccttttgcgcggaccccattacaataaattttaaataaaatcctgtttctggctctggattgaaaaaaaaaaaa

SEQ ID NO: 1152 - DNA, 4979 bp, Homo Sapiens
  NM_001042545
agcgcggcgctgcagccatggcgggcggcgtgcggctgctctgggtgtcgctattggtgctgctggcgcagctagggccgcagcctggactgggccggctcggagagcgtctccgcgtgcgcttcaccccggtcgtgtgcggcctgcgctgcgtccatgggccgaccggctcccgctgtaccccgacctgcgcgccccgcaacgccaccagcgtggacagcggcgctcccggcggggcggccccggggggacccggcttccgcgccttcctgtgtcccttgatctgtcacaatggcggtgtgtgcgtgaagcctgaccgctgcctctgtcccccggacttcgctggcaagttctgccagttgcactcctcgggcgcccggcccccggccccggctgtaccaggcctcacccgctccgtgtacactatgccactggccaaccaccgcgacgacgagcacggcgtggcatctatggtgagcgtccacgtggagcacccgcaggaggcgtcggtggtggtgcaccaggtggagcgtgtgtctggcccttgggaggaggcggacgctgaggcggtggcgcgggcggaagcggcggcgcgggcggaggcggcagcgccctacacggtgttggcacagagcgcgccgcgggaggacggctactcagatgcctcgggcttcggttactgctttcgggagctgcgcggaggcgaatgcgcgtccccgctgcccgggctccggacgcaggaggtctgctgccgaggggccggcttggcctggggcgttcacgactgtcagctgtgctccgagcgcctggggaactccgaaagagtgagcgccccagatggaccttgtccaaccggctttgaaagagttaatgggtcctgcgaagatgtggatgagtgcgcgactggcgggcgctgccagcacggcgagtgtgcaaacacgcgcggcgggtacacgtgtgtgtgccccgacggctttctgctcgactcgtcccgcagcagctgcatctcccaacacgtgatctcagaggccaaagggccctgcttccgcgtgctccgcgacggcggctgttcgctgcccattctgcggaacatcactaaacagatctgctgctgcagccgcgtaggcaaggcctggggccggggctgccagctctgcccacccttcggctcagagggtttccgggagatctgcccggctggtcctggttaccactactcggcctccgacctccgctacaacaccagacccctgggccaggagccaccccgagtgtcactcagccagcctcgtaccctgccagccacctctcggccatctgcaggctttctgcccacccatcgcctggagccccggcctgaaccccggcccgatccccggcccggccctgagcttcccttgcccagcatccctgcctggactggtcctgagattcctgaatcaggtccctcctccggcatgtgtcagcgcaacccccaggtctgcggcccaggacgctgcatttcccggcccagcggctacacctgcgcttgcgactctggcttccggctcagcccccagggcacccgatgcattgatgtggacgaatgtcgccgcgtgcccccgccctgtgctcccgggcgctgcgagaactcaccaggcagcttccgctgcgtgtgcggcccgggcttccgagccggcccacgggctgcggaatgcctggatgtggacgagtgccaccgcgtgccgccgccgtgtgacctcgggcgctgcgagaacacgccaggcagcttcctgtgcgtgtgccccgccgggtaccaggctgcaccgcacggagccagctgccaggatgtggatgaatgcacccagagcccaggcctgtgtggccgaggggcctgcaagaacctgcctggctctttccgctgtgtttgcccggctggcttccggggctcggcgtgtgaagaggatgtggatgagtgtgcccaggagccgccgccctgtgggcccggccgctgtgacaacacggcaggctcctttcactgtgcctgccctgctggcttccgctcccgagggcccggggccccctgccaagatgtggatgagtgtgcccgaagccccccaccctgcacctacggccggtgtgagaacacagaaggcagcttccagtgtgtctgccccatgggcttccaacccaacactgctggctccgagtgcgaggatgtggatgagtgtgagaaccacctcgcatgccctgggcaggagtgtgtgaactcgcccggctccttccagtgcaggacctgtccttctggccaccacctgcaccgtggcagatgcactgatgtggacgaatgcagttcgggtgcccctccctgtggtccccacggccactgcactaacaccgaaggctccttccgctgcagctgcgcgccaggctaccgggcgccgtcgggtcggcccgggccctgcgcagacgtgaacgagtgcctggagggcgatttctgcttccctcacggcgagtgcctcaacactgacggctcctttgcctgtacttgtgcccctggctaccgacccggaccccgcggagcctcttgcctcgacgttgacgagtgcagcgaggaggacctttgccagagcggcatctgtaccaacaccgacggctccttcgagtgcatctgtcctccgggacaccgcgctggcccggacctcgcctcctgcctcgacgtggacgaatgtcgcgagcgaggcccagccctgtgcgggtcgcagcgctgtgagaactctcccggctcctaccgctgtgtccgggactgcgatcctgggtaccacgcgggccccgagggcacctgtgacgatgtggatgagtgccaagaatatggtcccgagatttgtggagcccagcgttgtgagaacacccctggctcctaccgctgcacaccagcctgtgaccctggctatcagcccacgccagggggcggatgccaggatgtggacgaatgccggaaccggtccttctgcggtgcccacgccgtgtgccagaacctgcccggctccttccagtgcctctgtgaccagggttacgagggggcacgggatgggcgtcactgcgtggatgtgaacgagtgtgaaacactacagggtgtatgtggagctgccctgtgtgaaaatgtcgaaggctccttcctctgtgtctgccccaacagcccggaagagtttgaccccatgactggacgctgtgttcccccacgaacttctgctggcacgttcccaggctcgcagccccaggcacctgctagccccgttctgcccgccaggccacctccgccacccctgccccgccgacccagcacacctaggcagggccctgtggggagtgggcgccgggagtgctactttgacacagcggccccggatgcatgtgacaacatcctggctcggaatgtgacatggcaggagtgctgctgtactgtgggtgagggctggggcagcggctgccgcatccagcagtgcccgggcaccgagacagctgagtaccagtcattgtgccctcacggccggggctacctggcgcccagtggagacctgagcctccggagagacgtggacgaatgtcagctcttccgagaccaggtgtgcaagagtggcgtgtgtgtgaacacggccccgggctactcatgctattgcagcaacggctactactaccacacacagcggctggagtgcatcgacaatgacgagtgcgccgatgaggaaccggcctgtgagggcggccgctgtgtcaacactgtgggctcttatcactgtacctgcgagcccccactggtgctggatggctcgcagcgccgctgcgtctccaacgagagccagagcctcgatgacaatctgggagtgtgctggcaggaagtgggggctgacctcgtgtgcagccaccctcggctggaccgtcaggccacctacacagagtgctgctgcctgtatggagaggcctggggcatggactgcgccctctgccctgcgcaggactcagatgacttcgaggccctgtgcaatgtgctacgcccccccgcatatagccccccgcgaccaggtggctttggactcccctacgagtacggcccagacttaggtccaccttaccagggcctcccatatgggcctgagttgtacccaccacctgcgctaccctacgacccctacccaccgccacctgggcccttcgcccgccgggaggctccttatggggcaccccgcttcgacatgccagactttgaggacgatggtggcccctatggcgaatctgaggctcctgcgccacctggcccgggcacccgctggccctatcggtcccgggacacccgccgctccttcccagagcccgaggagcctcctgaaggtggaagctatgctggttccctggctgagccctacgaggagctggaggcggaggagtgcgggatcctggacggctgcaccaacggccgctgcgtgcgcgtccccgaaggcttcacctgccgttgcttcgacggctaccgcctggacatgacccgcatggcctgcgttgacatcaacgagtgtgatgaggccgaggctgcctccccgctgtgcgtcaacgcgcgttgcctcaacacggatggctccttccgctgcatctgccgcccgggattcgcacccacgcaccagccgcaccactgtgcgcccgcacggccccgggcctgagccctggcacccgctggccgcccacccgcgcccgccactcggggcccctgccgcgcatcctgcagcccgcttatgcgtatgtgcacggggccgcccgcctggacctggagaagggacctacggacgcctggaagctgcgacgccctgcactgctcccgcctccaccagcgcctcccactgatgtcgtggtcccgggcctggcccaggggcccctttacatgccctctcccttttataaaattttccattaaaaaccacctattttctatcaaaaaaaaaaaaaaaaaa

SEQ ID NO: 1153 - DNA, 3936 bp, Homo Sapiens
  NM_001042546
ggtgccggagcgcgggcgcggcgcactcggagcgggatggagcgggcgcgcgggccgcgggccgaggccgacgcgcctgaggaggaggaggaggcgggggcggccatggctgctgtggtggtggcggctgcgggtggcgcgggaccggcggtcctgcaggtggccggtctctaccggggcctgtgcgcggtgcgcagccgcgccctgggcctggggctcgtgtcacccgcgcagctgcgcgtcttcccagtgcgccccggctcgggccggcccgaggggggcgccgacagcagcggggtcggggccgaggccgagctccaggccaaccctttctacgaccgctaccgcgacaagatccagctgctgcgcaggtcagacccagctgcttttgagtcccgcctggagaaacgcagtgaatttcggaagcagccagtggggcattccaggcaaggtgattttatcaaatgtgtggaacagaagacagatgccttggggaaacagtctgtgaacagaggattcactaaggacaagactctcagttcaatctttaacattgagatggtaaaagaaaaaactgcagaagaaataaaacagatttggcagcaatattttgcagcaaaagatacagtctacgcagttattcctgcagaaaagtttgatttgatctggaaccgggctcagtcctgtccaacaaatgttgctgaggcacagtgcatcgccaaccaagttcagctcttctacgctactgatcggaaagagacctacgggttagtggagacctttaacctcagaccaaatgagttcaaatatatgtctgtcatcgctgaattggagcaaagcggacttggagcagaactgaaatgtgcccagaaccaaaataagacttagaactgtacaggttggcccttcacctagttgactcagccctcgatagtctagagcccaccccctcctcaggaactcaagagctcagcatttataatgagcagttggtaatgagttgccctatgtgcttgtcgcaagcagtcacagagatgagccctattacttgatattcaggaacaaaggtacctgaacattctgataattatctcagcatacttgaggtttccttttttaagtgttcgaggttataacaagagacagccaaggacctacaagacagttgacttgattttgcacagtgtaacagcgcagttgcattctggccactttgaccttatagctcccaaatgatgagtttgtcatctttatgaactcatgacaggataataagcttgaagacctgctgtagttagatatgggctttaatccttcccaggcaccagtcagctgaacaaaagcataagccaaacatcctgtttaaactgtagaataaccagatattcccatcaggttaaagacttcatctagatgatgccccccagagatgcctttagtgtaagtagctggcttggggtatcagcaaatttcaggtatagttagataaacaggtacagggcctgcatactattaaaccatagtttgtggcacccgcttttctaactccacctgttagaagctatgtgtttgaaggaatgaatcagtgcagtataaataaaattcttttgtaaggagaagattaatcctggtttgcatgatttttttaaaaacaactctaaacatgatacgaaaaagtggatgaaagcaaatgttcccagattggatgtggggaaaatatagcaataattttttttttaagtctggcttacaatgtttgttatacaaaataatgaaatctgagttatgtactgtccattgtgtcagggctatgggctgattttatcaaaactcatcttgggactgaaaaattgtttggaatgccagaaataagaaagttgttctccagagctggaaacccatctttcgtttgtagtgtcactgttgtggctccaagctcagtgataggaaaggacggtggttacacaccagccttctgaacccaaggcccccagtattgttgtcagctgcctttaccatggcatttctttctctttctttttttcctgagatgaagtcttgctctgtcttgcccaggctggagtacagtagcgtgatctcagctcgctgcaacctctacctccctggttcaagtgattctgctgcgtcagcctcctgaggagctaggattacaggcgcatgccaccatacctggcttatttttgtattgttgtagagacagggtttcactttgttggccaggctggctggtctcgaactcctggcctcaagtgatccaccaccttggcctcccaaagtgctgggattacaggtgtgagccaccgtgcctggcctgacatttctttattgatctaacatgctccactctgctgctcctgcctaagatctggttatatgacactgaatgtggtgagtgggaatttaagcagtattcgcagtttgtgtgtgtgtgttttcttccttccagaagaatttttataggttgggcctgtccctaagctctttaaatagggtggacatcccactattctctgagccgtgtctattttgttgcacctttgagtctatgtattgagagagacagatagtatttttttaaactggggaagctgctatcctttcactatttctctaaaggttgagctgttaactaatgtaaattctggacctgcttctggtcctggcagtttatcttttgagaaacttgagtcttatctgccctgccattttcattaaatgccttctgaccttctgaatgttttgggtcccaagaatttttgacatcagatggggttgtttttattggtatccagttatgtttgcttgtctttccagatgggcccagttattagccatacatagtacattgatacacctccaccagcgggtgaggaaatgatggaaaaaggagtaagaagtggccattcgttttaatcattcctcctggatttgtcctcagtccccaactgccaagtaggatgtgtccatggataaatgtgtggggcatgactaaagtaccacgtagctgttctttatatttatttacctagaaagatctggcaaagaactcaaagaaaattgtaccatttaatcagtaaatttgtcccctggtgctagcatggtgttatagaaagtggacaggctttagagttaagtgaatctgggttcatatgttagtgttgctattcattagctctatactgttgaacaaattgcttaaactatctaattttggggttttttttccatctaaaatagggataataatatctacctcataggattattgtgagaattaaattaacttcactatagtagaaaatatcaactaccatccttttctctacttcccttgcccctcattaaagactaatacaagttagcatttcagatgtgtagatcattctttattccagttaaaagaacaaactttatctcatcagttctgaaactttaagatgcagtagcatcacctaaagtgcttttaaaatgcagattctcaggcctcaaccgtacaccacccccccacacacgtactaaatcaagaatatgtgcagaaggtactgggaatctacttgttaatatgtgctccaaatgattctgatgtaggtaattagccagccacactttgagaaccactgccttatctattctttacaaaaatgtacattgccaggtctttctttcctgtggatgctaactataggatatttaggttcctctgttctttgtctcccatagtggccccctttgcaaactccaaatacattatatttatttattcttgtgtcttttttcccccactagactgtgagctccttgagggccaggacttatctctgttcgcagtgccaaggacatggcctggaccatagaagatactcagttttttgttgaataaataggtaatatggatttcaaccaaaaaaaaaaaaa

SEQ ID NO: 1154 - DNA, 6054 bp, Homo Sapiens
  NM_001042550
ggggcgcggggcgcgggggctgtagggagggggaccagtggcagagggaccttaggtgatccttagaaataaaggctagcttctgttcgaccttggagtagggcgaagaggtgtagacaggcctggagaagcgaggtaaaagcctgagtaaaagcaagaagttggagaatatgagatacatctcatctctagtaaatacttaaatgacttcccctcctcccggagtcaagcacaattcggggatgcaatgacggacgtaggtgaagacactgcgggaacttacagacaaaactggtttgtggcctgtttgattcctgtcagaggtttgctgacccaagacagtatcgaaaatgcatattaagtcaattattctagagggattcaagtcctatgctcagaggaccgaagtcaatggttttgaccccctcttcaatgctatcactggcttaaatggtagtgggaaatccaacatattggactccatctgctttttgctgggcatctccaacctgtctcaggttcgggcttctaatttacaagatttagtttacaaaaatgggcaggctggtattaccaaagcctctgtgtcaatcacttttgataattctgacaaaaagcaaagtcctttaggatttgaggttcatgatgaaatcacagtaacaaggcaggtggttattggtggtagaaataaatatttaatcaatggagtcaatgccaacaacaccagagtacaggatctcttctgttctgttggccttaatgttaacaaccctcactttctcatcatgcagggccgaattacaaaagtattgaatatgaaacctccagagattttatccatgatagaagaagcagctggaaccaggatgtatgaatacaaaaaaatagctgcacagaaaactatagaaaaaaaggaggctaagctgaaagaaattaagacgatacttgaagaagagattactccaaccattcaaaaattaaaagaggaaagatcgtcctacttggagtaccaaaaagtaatgagagaaatagaacatttgagtcgtttatatattgcttatcagtttttgctggctgaagataccaaagtacgctcagctgaggaattaaaagaaatgcaagataaagttataaagcttcaggaagaattgtctgagaatgataaaaaaataaaagcacttaatcatgaaatagaagaattggaaaaaagaaaagataaggaaactggaggtatacttcgatctttagaagatgctcttgcagaggctcagcgagttaatactaaatctcaaagcgcatttgatctcaagaagaaaaatctggcatgtgaggaaagcaaacgcaaagagctggaaaaaaatatggttgaggactcaaaaactttagcagcaaaggaaaaagaggttaaaaagataacagatggactgcatgcccttcaagaagcaagtaataaagatgctgaagctctggcagctgcacagcagcacttcaatgctgtttccgctggcctgtccagtaatgaagatggagcagaagcaactcttgctggtcaaatgatggcctgtaaaaatgatataagtaaagctcagacagaagccaaacaggctcagatgaagttgaagcatgctcaacaggaattaaagaataaacaagctgaagttaagaagatggatagtggctacaggaaggatcaagaagctctagaagctgtaaaaagacttaaagaaaaacttgaagctgaaatgaaaaagctaaattatgaagaaaataaagaggaaagccttttggaaaagcgcaggcagctgtctcgtgatattggtagattgaaagaaacatatgaagctctattagccagatttcccaatcttcgatttgcatacaaggatccagagaagaactggaatagaaattgtgtgaaaggacttgtggcttctctgattagtgtgaaagacacttctgcaaccacagctttagaattagtggctggagaacgactctacaatgttgtagtagacacagaagttactggtaaaaagctactagaaaggggggaactgaaacgtcgatacactataattccactcaataaaatttcagccagatgtattgcaccagaaactctgagagttgctcagaatcttgttggccctgacaacgttcatgtggctctttccttggttgaatataaaccagaacttcagaaagcaatggagtttgtctttggaacaacatttgtttgtgacaatatggataatgccaaaaaagtggcctttgataagaggataatgactagaactgtaactctcggaggtgatgtgtttgatcctcatgggacattgagtggaggtgctcgatcccaggcagcttccattttaaccaagtttcaagaactcaaagatgttcaggatgaactgagaatcaaagagaatgagctgcgggctctagaagaggaattagcaggtcttaaaaacactgctgaaaagtatcgccaactaaaacagcagtgggagatgaaaactgaagaggcagatttattacaaaccaagctccagcaaagctcatatcacaagcaacaagaagaattagatgcccttaaaaaaaccattgaggaaagtgaggagactttgaaaaacactaaagaaatccaaagaaaagcagaagaaaaatatgaagtattggaaaataaaatgaaaaatgcagaagctgaaagagagcgagaactgaaagatgctcagaaaaaactggattgtgccaaaacaaaggcagatgcatctagcaagaagatgaaagaaaaacaacaggaagttgaagctatcactctggaactggaagagctcaagagagagcatacatcttacaaacaacagcttgaagctgtaaatgaagctatcaaatcctatgaaagtcagattgaagtaatggcagctgaggtggctaaaaataaggagtcagtaaataaagctcaagaagaggtgaccaagcaaaaagaggtgataacagcccaagacactgtaattaaagctaaatatgcagaagtggcaaaacacaaggagcaaaacaatgattctcagcttaaaattaaggaattagaccacaacatcagcaaacataaacgggaggctgaagatggtgctgcaaaggtatccaaaatgttgaaagattatgactggattaatgcagagagacacctctttggccaacccaatagtgcctatgatttcaaaactaacaaccctaaagaagctggtcagagacttcagaagttgcaagaaatgaaggagaaactaggaagaaatgtcaatatgagagctatgaatgtattgacagaagctgaagagcgatacaatgacttgatgaagaagaagagaattgtagaaaatgacaaatccaaaattcttacaactatagaagaccttgaccagaagaaaaaccaagccctaaatattgcatggcaaaaggtgaacaaggactttgggtctattttttctactcttttgcctggtgctaatgctatgcttgcaccaccagagggtcaaactgttttggatggtctggagttcaaggttgccttgggaaatacctggaaagaaaacctaactgaacttagtggtggtcagaggtctttagtggccttgtcattaatactgtccatgcttctcttcaaacctgctccaatttatatccttgatgaggtagatgcagccttggatctttctcatacccaaaacattggacagatgctgcgtactcatttcacacattctcagttcattgtggtgtcactaaaagaaggtatgttcaacaatgcaaacgttcttttcaaaaccaagtttgtggatggtgtttctacagtagccagatttactcaatgtcaaaatggaaagatttcaaaggaagcaaaatccaaggcaaaaccacccaaaggagcacatgtggaagtttaaactacaaagttatttcttcatcttgacctgtttttttaaatgtaaacttttaaggacttgagataactaatttgtttatatacaaaaattaatgttactgtgttacttaacccatgttttctctttatataatcacttatcgcttacaaatgagcatatattcctcatctcttaactagtctaattatggtccaattattgtggttgtgattttatgcatatcatcaaatgtttttttcttatgcgggtcttttatatattagggatcctgagatacccgattctatatgtaaaagctaatatacaaaaaagcagattaaattacatgataaatgtagctgatcatcagtgtttaattgatttaattcctaaggcaatattaatgtgttttctaaagtcattcaggtaaggaagaattataaatcaggtaactggaccaacaaagggaacacatataaagctattatgcatgcatggagccgtttgaggctagttttttaaggccacaactccagacccctgatttagactgagataggaaacagatcttgaaagaatccttattttaatgatacatgaatatcatgttcctatacgcttaataattggtctctacgttttaatgatacatgaatatcatgttcctatacgcttaataattggtctctacgactttaatgtttttgtttttttaagctgtgtaagtatttttaaatcaaagcttaggaggtgtgttgcgtggtactatctgctgcaaatttatctgaagtttgttaatattttccaagatttttgtcagccttttcataatccagtcattaacaacctattggtaaacaagaatgtaggtgccagtagactaaaccaaatttatttttccctgagtctgatatatatatgtataaatataaataactcaatccatctgttccaccaaaataactcaaaagttggatgattatttgtcttccgctttccagttcaaagggatgaaattcctttagaacttgaaagatgacactagcgaacaccatgagaatactgtctacagtttttggtacgtcatcactagaacagtgaccccaaactgaatcatgaaaggtctgacatgatgtaatctgatcttccatgtgttattttggccccacatctcttcttgattttttagtcttatttccttagtgttattatcatacttcccctgatatatggccgtacttcctggccctgggcttgacatttcccacccttcattctccatacatatgagatgtcagaaaacatgcagtaattgatattatgggacacattggaaaggattgaatctggaattagttctgtccactgtggaggggagaggaaataatgctgtaaatgttgagttacagaaagtccaatgtcaaatatagtttttttgtttcctttcaaatgtattacagactgtgccaaaacagttaccaattcacactgtcaatattaaagtataccatagtatacaaattagtcagtacttgctgttaattttaatatttctgatttaacagttagttattaagtggtacttcattgctgttttagccaacgttttaaaaataatttgggagtttgactattttggcttacgtactcatttccttttctctgctaaaaatgttttgcttgtgtgcgttcctgatttttgtcttgtataatcttgatctttgaaaaccctcaaacatgtattaaattgttgtaactttttttcattagagggaagacattaaggggattggggacatttgtttcacacatctgcagtaatatgagttaactaatatttaacaagctctttctttacattagctgctgttctcatttgtatgtattgtcatatttaatcctcagagtaacctagtgaggtaaatactgttgttgtcagcatggtgtaatcgaggaattgagtgagttgagcagaaaagttaggaaacttgctcagggtgataatacagttaggagtgtcagggcccatggacaaatcttgtcagtctccagaacctaagatatactacgtcactgacagcttgaacatttgtatttattgtacagaataaatttaagaaaaataaaaaaa

SEQ ID NO: 1155 - DNA, 2588 bp, Homo Sapiens
  NM_001042552
agcatgcatccggctggaaactcaggacgctgcagctgaaacgttccggctccggctctgctggccggtctaaagcggcagccgccggggcgcaatgcgagcggctggcgtaggcttggtggactgtcactgccacctctccgccccggactttgaccgcgatttggatgatgtgttggagaaagccaagaaggccaatgttgtggcccttgtggcagttgccgaacattcaggagaatttgaaaagattatgcaactttcagaaaggtataatgggtttgtcctgccatgcttgggtgttcatccagttcaaggacttccaccagaagaccaaagaagtgtcacactaaaggatttggatgtagctttgcccattattgagaattataaggatcggttgttggcaattggagaggttggactagatttctcccccagatttgctggcactggtgaacagaaggaagagcaaagacaagtcctaatcagacagatccagttagccaaaagactaaatttgcctgtaaatgtgcactcacgctctgctggaagacctaccatcaaccttttacaagagcaaggtgctgagaaggtactgctgcatgcatttgatggtcggccatctgtagccatggaaggagtaagagctgggtacttcttctcaattcccccttctatcataagaagtggacagaagcagaaacttgtgaaacaattgcctttaacttctatatgcttagaaacagattcacctgcactaggaccagaaaaacaggtacggaatgagccctggaacatttctatttcagcagaatatattgcccaggtgaaagggatctcagtggaagaagttatagaagtgacgacacagaatgcattaaaactgtttcctaagctccgacacttgctccagaaatagcttcaaaaccatccattacaaaatcgaatcaactgcagggggcagcatttgaaaaatagaaatgttctgatgaagaatctgaactgaagaagctgttttatagggttatagaagattgtaattgtagagaaatatttctcttagaaataaaactgggcttggatcctgaaaccctgggttctgattctagccttgtgctgcttttcaattagccgagttctggcaggatattgggaaaatactgctacttcttacattgcccttttatatagaaccaccacctgaactgaaaccattgctactgggaagggtggctcccacaggaagagtataagcactactgtgatgaggatggagtaagctaaagtatacttttttttttttttgatggagtttcgctgttgttgcccaggctggagtgcaatggcacgatcttggctcactgcaacctccacttcccaggttctagcgagtctcctccctcagcctcccaagtagctgggattacaggcatgtgccaccatgcccagctaattttgtatttttagtagagacagggtttctccatgttggtcaggctggtctcgaactcccgacctcaggtgatccgcccgcctcggcctcccaaagtgctgggattacaggcatgagccactgcgccagcctaaagtgtgttcttaccacctatttttcttcccataggagttagccagtgaagggagaatgtctggttttctatgctgtcagaaatctcttttctaggtttgtaaaattgaacttttagtacttcgaattatttctctttaagataaaaatgcatacgatttttacactgatcttagatttttgacttatgaggccagtggtttaaacaatcattattgaataccaagcccaaaagtttagttaatacaccaattgtaagttctggtctgaattttgtcaacatatttagaatgtaaatggcattattaaaaatgtatctgatttctctgtgaacagtaatatttcatatttttaagtttaaaaatgttagtgtaagccaggcacagtggcattcacctgtagtgccaaccactcaggaggctgagatgggagaccttttaagcctgagtttgagtcaggcctgggcaacatagatgtgagcacctatctctaaaaatgtaaataaataaaaatctcaaaaaaattaaaaatctcaagtgtaaaaacagttctgtagatagatggtagtgatggtagcacatcaatgtgaaggtatttaatgccactgaactgtacacttataacgaattaggataaattttatgttatgtgtatttactacaattttttaaaaatcgtatatgtagtttaacaggtgtggtcaatatcaaaacttaggtatttaatcttgttaaattatataagcagaaaatgctggaaaaagtacctgtcatagaaaaaaataaacttcctaaatcaaagtgattttatgaaatgatcttcaataaatattttgaaatgaattcatttatggaagaatcaaaactaggtcagattgtccaaaccagactaagaaactgaatagggtattttatgaggtatttaatgactcatcagcaccattttaaatgaaattcctacatttaacaggagattatattaaaactggacttttaagctctct

SEQ ID NO: 1156 - DNA, 2585 bp, Homo Sapiens
  NM_001042553
agcatgcatccggctggaaactcaggacgctgcagctgaaacgttccggctccggctctgctggccggtctaaagcggcagccgccggggcgcaatgcgagcggctggcgtaggcttggtggactgtcactgccacctctccgccccggactttgaccgcgatttggatgatgtgttggagaaagccaagaaggccaatgttgtggcccttgtggcagttgccgaacattcaggagaatttgaaaagattatgcaactttcagaaaggtataatgggtttgtcctgccatgcttgggtgttcatccagttcaaggacttccaccagaagaccaaagaagtgtcacactaaaggatttggatgtagctttgcccattattgagaattataaggatcggttgttggcaattggagaggttggactagatttctcccccagatttgctggcactggtgaacagaaggaagagcaaagacaagtcctaatcagacagatccagttagccaaaagactaaatttgcctgtaaatgtgcactcacgctctgctggaagacctaccatcaaccttttacaagagcaaggtgctgagaaggtactgctgcatgcatttgatggtcggccatctgtagccatggaaggagtaagagctgggtacttcttctcaattcccccttctatcataagaagtggacagcagaaacttgtgaaacaattgcctttaacttctatatgcttagaaacagattcacctgcactaggaccagaaaaacaggtacggaatgagccctggaacatttctatttcagcagaatatattgcccaggtgaaagggatctcagtggaagaagttatagaagtgacgacacagaatgcattaaaactgtttcctaagctccgacacttgctccagaaatagcttcaaaaccatccattacaaaatcgaatcaactgcagggggcagcatttgaaaaatagaaatgttctgatgaagaatctgaactgaagaagctgttttatagggttatagaagattgtaattgtagagaaatatttctcttagaaataaaactgggcttggatcctgaaaccctgggttctgattctagccttgtgctgcttttcaattagccgagttctggcaggatattgggaaaatactgctacttcttacattgcccttttatatagaaccaccacctgaactgaaaccattgctactgggaagggtggctcccacaggaagagtataagcactactgtgatgaggatggagtaagctaaagtatacttttttttttttttgatggagtttcgctgttgttgcccaggctggagtgcaatggcacgatcttggctcactgcaacctccacttcccaggttctagcgagtctcctccctcagcctcccaagtagctgggattacaggcatgtgccaccatgcccagctaattttgtatttttagtagagacagggtttctccatgttggtcaggctggtctcgaactcccgacctcaggtgatccgcccgcctcggcctcccaaagtgctgggattacaggcatgagccactgcgccagcctaaagtgtgttcttaccacctatttttcttcccataggagttagccagtgaagggagaatgtctggttttctatgctgtcagaaatctcttttctaggtttgtaaaattgaacttttagtacttcgaattatttctctttaagataaaaatgcatacgatttttacactgatcttagatttttgacttatgaggccagtggtttaaacaatcattattgaataccaagcccaaaagtttagttaatacaccaattgtaagttctggtctgaattttgtcaacatatttagaatgtaaatggcattattaaaaatgtatctgatttctctgtgaacagtaatatttcatatttttaagtttaaaaatgttagtgtaagccaggcacagtggcattcacctgtagtgccaaccactcaggaggctgagatgggagaccttttaagcctgagtttgagtcaggcctgggcaacatagatgtgagcacctatctctaaaaatgtaaataaataaaaatctcaaaaaaattaaaaatctcaagtgtaaaaacagttctgtagatagatggtagtgatggtagcacatcaatgtgaaggtatttaatgccactgaactgtacacttataacgaattaggataaattttatgttatgtgtatttactacaattttttaaaaatcgtatatgtagtttaacaggtgtggtcaatatcaaaacttaggtatttaatcttgttaaattatataagcagaaaatgctggaaaaagtacctgtcatagaaaaaaataaacttcctaaatcaaagtgattttatgaaatgatcttcaataaatattttgaaatgaattcatttatggaagaatcaaaactaggtcagattgtccaaaccagactaagaaactgaatagggtattttatgaggtatttaatgactcatcagcaccattttaaatgaaattcctacatttaacaggagattatattaaaactggacttttaagctctct

SEQ ID NO: 1157 - DNA, 2248 bp, Homo Sapiens
  NM_001042572
ctcagagctgggaaggaggctctagatggcggctgtgccttagagagagcgcgctctgctccctgcctttgcctcactttacgcaactttccctaactttcgggcagcctcagggggcccccgtagccccctgcctttcctagggacttactggggtcgattcgaacctttttttgggagaaaagcagcttttaggagctttcttttcgtgccttgttggaaagaagcagccgtactgagagcccaggtcgttgttttttccagcttagaagccatggcgcacctccatttttgtgcgctctcctaatgaggttttttttctttcggacctgttttagtattaattattgctttatttttttgaccagttaacatatttgagggttattttatttatttttcgttttttaacggaggattttgcctttatttttaattatttgggatctgatatttttctactagtagataggactcttggtttggacatactacatggatcagtaaatacctgggcacaggacttcaaagcaaacacagattccccctcccccttaatatttaagaattaaaagatgatgagaaataaggacaaaagccaagaggaggacagttcgctacacagcaatgcatcgagtcactcagcctctgaagaagcttcgggttcagactcaggcagtcagtcggaaagtgagcagggaagtgatccaggaagtggacatggcagcgagtcgaacagcagctctgaatcttctgagagtcagtcggaatctgagagcgaatcagcaggttccaaatcccagccagtcctcccagaagccaaagagaagccagcctctaagaaggaacggatagctgatgtgaagaagatgtgggaagaatatcctgatgtttatggggtcaggcggtcaaaccgaagcagacaagaaccatcgcgatttaatattaaggaagaggcaagtagcgggtctgagagtgggagcccaaaaagaagaggccagaggcagctgaaaaaacaagaaaaatggaaacaggaaccctcagaagatgaacaggaacaaggcaccagtgcagagagtgagccagaacaaaaaaaagtaaaagccagaagacctgtccccagaagaacagtgcccaaacctcgtgttaaaaagcagccgaagactcagcgtggaaagagaaaaaagcaagattcttctgatgaggatgatgatgatgacgaagctcccaaaaggcagactcgtcgaagagcggctaaaaacgttagttacaaagaagatgatgactttgagactgactcagatgatctcattgaaatgactggagaaggagttgatgaacagcaagataatagtgaaactattgaaaaggtcttagattcaagactgggaaagaaaggagccactggagcatctactactgtatatgcgattgaagctaatggcgaccctagtggtgactttgacactgaaaaggatgaaggtgaaatccagtacctcatcaagtggaagggttggtcttacatccacagcacatgggagagtgaagaatccttacagcaacagaaagtgaagggcctaaaaaaactagagaacttcaagaaaaaagaggacgaaatcaaacaatggttagggaaagtttctcctgaagatgtagaatatttcaattgccaacaggagctggcttcagagttgaataaacagtatcagatagtagaaagagtaatagctgtgaagacaagtaaatctacattgggtcaaacagattttccagctcatagtcggaagccggcaccctcaaatgagcccgaatatctatgtaaatggatgggactcccctattcagagtgtagctgggaagatgaagccctcattggaaagaaattccagaattgcattgacagcttccacagtaggaacaactcaaaaaccatcccaacaagagaatgcaaggccctgaagcagagaccacgatttgtagctttaaagaaacaacctgcatatttaggaggggagaatctggaacttcgagattatcagctagaaggtctaaactggctagctcattcctggtgcaagtaggtagaaaaatatgagtgcaattttccttactgtttctggcttctttattgttagatgtcaagaattttttttttcttttttcacacccttattgtatctcaaccaagaaatctttatgctgcatattacagaaataaaagatgattgagagaaaaaaaaaaaaaaaa

SEQ ID NO: 1158 - DNA, 3792 bp, Homo Sapiens
  NM_001042576
cggcgatcccggcggagggggccgttcgccagctctgaggcagaaagtgccacgactccacacgcgcgcacgcagccagcgagcggccggagcggacggcagacggggcgggcggcgtcagggtcgcagcgtctacagctgctcgggggcggtttcttggcggaggcttggccggctcctctctcccggctccgcggcggctgcgaaggcggcggctcctgccctctcgctttccctctcgcgtctctggctgcagaaagaagcttccggttctgaggtcctggaggtgccatttccctctctgttgaagcaaaggccggggcagacctcctagtgaaaggaaagcaagccaggatggatatttacgacactcaaaccttgggggttgtggtctttggaggattcatggttgtttctgccattggcatcttcctggtgtcgactttctccatgaaggaaacgtcatatgaagaagccctagccaaccagcgcaaggagatggcgaaaactcaccaccagaaagtcgagaagaaaaagaaggagaaaacagtggagaagaaaggaaagaccaagaaaaaggaagagaaacctaatgggaagatacctgatcatgatccagcccccaatgtgactgtcctccttcgagaaccagtgcgggctcctgctgtggctgtggctccaaccccagtgcagccccccattatcgttgctcctgtcgccacagttccagccatgccccaggagaagctggcctcctcccccaaggacaaaaagaagaaggagaaaaaagtggcaaaagtggaaccagctgtcagctctgtagtgaattccatccaggttctcacttcgaaggctgccatcttggaaactgctcccaaggagggcagaaatacagatgtggcccagagcccagaggcaccaaagcaagaggctcctgccaagaagaagtctggttcaaagaaaaaagggcccccagatgccgacggccctctctacctcccctacaagacgctggtctccacggttgggagcatggtgttcaacgagggcgaggcccagcggctcatcgagatcctgtctgagaaggctggcatcattcaggacacctggcacaaggccactcagaagggtgaccctgtggcgattctgaaacgccagctggaagagaaggaaaaactgctggccacagaacaggaagatgcggctgtcgccaagagcaaactgagggagctcaacaaggagatggcagcagaaaaggccaaagcagcagccggggaggccaaagtgaaaaagcagctggtggcccgggagcaggagatcacggctgtgcaggcacgcatgcaggccagctaccgggagcacgtgaaggaggtgcagcagctgcagggcaagatccggactcttcaggagcagctggagaatggccccaacacgcagctggcccgcctgcagcaggagaactccatcctgcgggatgccttgaaccaggccacgagccaggtggagagcaagcagaacgcagagctggccaagcttcggcaggagctcagcaaggtcagcaaagagctggtggagaagtcagaggctgtgcggcaagatgagcagcagcggaaagctctggaagccaaggcagctgccttcgagaagcaggtcctgcagctgcaggcgtcccacagggagagtgaggaggccctgcagaagcgcctggacgaggtcagccgggagctgtgccacacgcagagcagccacgccagcctccgggcggatgccgagaaggcccaggagcaacagcagcagatggccgagctgcacagcaagttacagtcctccgaggcggaggtgcgcagcaaatgcgaggagctgagtggcctccacgggcagctccaggaggccagggcggagaactcccagctcacagagagaatccgttccattgaggccctgctggaggcgggccaggcgcgggatgcccaggacgtccaggccagccaggcggaggctgaccagcagcagactcgcctcaaggagctggagtcccaggtgtcgggtctggagaaggaggccatcgagctcagggaggccgtcgagcagcagaaagtgaagaacaatgacctccgggagaagaactggaaggccatggaggcactggccacggccgagcaggcctgcaaggagaagctgcactccctgacccaggccaaggaggaatcggagaagcagctctgtctgattgaggcgcagaccatggaggccctgctggctctgctcccagaactctctgtcttggcacaacagaattacaccgagtggctgcaggatctcaaagagaaaggccccacgctgctgaagcacccgccagctcccgcggagccctcctcggacctggcctccaagttgagggaggccgaggagacgcagagcacactgcaggccgagtgtgaccagtaccgcagcatcctggcggagacggagggcatgctcagagacctgcagaagagcgtggaggaggaggagcaggtgtggagggccaaggtgggcgccgcagaggaggagctccagaagtcccgggtcacagtgaagcatctcgaagagattgtagagaagctaaaaggagaacttgaaagttcggaccaggtgagggagcacacgtcgcatttggaggcagagctggaaaagcacatggcggccgccagcgccgagtgccagaactacgccaaggaggtggcagggctgaggcaacttctcctagaatctcaatctcagctcgatgccgccaagagcgaagcccagaaacagagcgatgagcttgccctggtcaggcagcagttgagtgaaatgaagagccacgtagaggatggtgacatagctggggccccagcttcctccccagaggcgcccccagccgagcaggaccccgttcagctgaagacgcagctggagtggacagaagccatcctggaggatgagcagacacagcggcagaagctcacggccgagtttgaggaggctcagacctcggcatgtcggttacaagaagaattggagaagctccgcacagccggccccctagagtcttcagaaacagaggaggcctcacagctgaaggagagactagaaaaagagaagaagttaacaagtgacctggggcgcgccgccacgagactgcaggagcttctgaagacgacccaggagcagctggcaagggagaaggacacggtgaagaagctgcaggaacagctggaaaaggcagaggacggcagcagctcaaaggagggcacctctgtctgagtttcctctttggaaaaagaagttactgttcaacttaccaaaatgccttacacattccttacaaataaaccaaccaacctacacagcgttatccaggcccaacttccggtagctccgagagaagccatgagagacaagtctcttagagccacagaagtagaccttccagagccccagtttgtaaatgaacctgtgtcacatttgataaacactatcctgggcgcagccccgggccaccgccgagtgacgccaaagccctggttgactctgacagccccgtgggtgtgtgggaggccgggcgctctggggtctgtctgtcagtgcaatcgtttagtgttttttcagtggggcggggcgggaagcgggtgggaccgggcagccagttctcaaaggctgtggggccgactggaggccacagcccctcacccctagacgttgccaaccagaactgacgtgtgacctcctgggtgttgatgccattaaaaccaacgttggtgcccggtg

SEQ ID NO: 1159 - DNA, 1698 bp, Homo Sapiens
  NM_001042581
gggactccaggtgaagccctaaggcccgggaagatctgcgggaggcggcagggcccagggcgttgaatgcccggccacaagatcagcctcctcccattggcgaaaggagccccgaagagcttgtgttcaggagggaggcctcggcctggtcaagtcatctagcaggaagagtcccggacagtgcaaagcaaatgcaagaagaccccctccctagccgatgggaaatgccccagccgttgaaggcggaaataacggcctgtaggcaacggaactcccagcgttcgcaaaggagggaggagccggaaactcagggcgcgaggcctgtgggcccagcgggaagatggaagagttgagtcaggccctggctagtagcttttctgtgtctcaagatctgaacagcacagctgccccacacccccgcctatcccagtacaagtccaagtacagttccttggagcagagtgagcgccgccggaggttactggaactgcagaaatccaagcggctggattatgtgaaccatgccagaagactggctgaagatgactggacagggatggagagtgaggaagaaaataagaaagatgatgaagaaatggacattgacactgtcaagaagttaccaaaacactatgctaatcaattgatgctttctgagtggttaattgacgttccttcagatttggggcaggaatggattgtggtcgtgtgccctgttggaaaaagagcccttatcgtggcctccaggggttctaccagtgcctacaccaagagtggctactgtgtcaacaggttttcttcacttctgccaggaggcaacaggcgaaactcaacagcaaaagactacaccattctagattgcatttacaatgaggtaaaccagacctactacgttctggatgtgatgtgctggcggggacaccctttttatgattgccagactgatttccgattctactggatgcattcaaagttaccagaagaagaaggactgggagagaaaaccaagcttaatccttttaaatttgtggggctaaagaacttcccttgcactcccgaaagcctgtgtgatgtgctatctatggatttcccttttgaggtagatggacttctcttctaccacaaacagacccactacagccccggaagcactcccttggtgggctggctgcgcccctacatggtgtcagatgtccttggtgtagctgtgccggctggcccgctgaccaccaagccagactatgctgggcaccagctccagcagattatggagcacaagaagagccagaaggaaggcatgaaggagaaactcacacacaaggcctctgagaatgggcactatgaattggagcacctgtctactcccaagttgaagggttcttcccatagcccagaccaccctggatgcctcatggagaattaaagagagaagcctccttaaggagccacaggatggtacctggccccaaaaggaatcctggagaggaggacagtgacaacaggtgacttcattctttagagtgaactttccaaacccagtccagctggaaacagcttatctataatctgaaatgctggctcaaacagttatggggaggttcccagattgcgtagcattcagattgatttgagcagctcctactgtgataagtgtatcccagatccacaatgtaaatatatgtgatttgtaagaaagaa

SEQ ID NO: 1160 - DNA, 1514 bp, Homo Sapiens
  NM_001042586
ttccagcagttagtgcaattagggaggttgggaggatgtacacaagagcagggagaaaatctggagccagacagtgagagaggcagaggggaaatgaaaaaccccgtgggaggctgcagcaaagcgaggcagtgtggcttctctgacagggaagtcagcagagggagaggtttgtctgtctgtacagcaagggaagtcagacgagagtgcaagagggtgtggagaggggtactgatatctgaattattagggcaggtgtcctgccaaggaatccctcctttaacagagcttcaatgctgctcctgttcctcctcttcgagggtctctgctgtcctggggaaaatacagcagtgaagccagaggcctggctgtcctgtggccccagtcctggccctggccgtctgcagcttgtgtgccatgtctcaggattctacccaaagcccgtgtgggtgatgtggatgcggggtgagcaggagcagcggggcactcagcgaggggacgtcctgcctaatgctgacgagacatggtatctccgagcaaccctggatgtggcggctggggaggcagctggcctgtcctgtcgggtgaaacacagcagtctagggggccatgatctaatcatccattggggtggatattccatctttctcatcctgatctgtttgactgtgatagttaccctggtcatattggttgtagttgactcacggttaaaaaaacagagccctgtctttctcatgggagccaacactcaggacaccaagaattcaagacatcagttctgcttggcacaagtatcgtggatcaaaaacagagtattgaagaagtggaagacacgcctaaaccaactctggtgacatttgctttaccttatacataaaatccttgtctgcatcttcttaaacaccgtccatgtcccataagggaagcatgcttttatttaaacagtttatactagcaaagatactgacccctttaggaatactttttccccatcttccagagattttttttttcctgctttggctacatatccatcattgtttatttttgaaactataatccagatacttctttttcatggattcccgagatcacccaattgatagctcttctgtactccccaaattgaactgatcttcacaagcacattcatctcttcctactctgaacagtagttatttaggtttttgctctttttttttttttaatctcagttgcttgaaagtaggatttaggtatttgtgtctgtattcatgaccaaaaatcttatctgaattcagggccagcttcataagcatgtgacctgtgcagacacatggaatcgtatgctctgcaagaacccatgctagatttaatgctctgctgttgtcatcttggaatccttagtcattttcaaacaagagatattgtattttcatttttcactgaccccacaaattatatagctgattcagtgtgaatgtaatatttctcaataaatgctgactgaaataaatttgttgttagatcaa

SEQ ID NO: 1161 - DNA, 1503 bp, Homo Sapiens
  NM_001042588
cacgcagggtctactgagcgccatcccttgtgctggactctggctacttaaataggaatcaagccaggtccctaccattgctcagcccgcagccgagtgggaaagaagctcgcaaaagcagcaaacaggcagtaatcgagggaagatggaagagttgagtcaggccctggctagtagcttttctgtgtctcaagatctgaacagcacagctgccccacacccccgcctatcccagtacaagtccaagtacagttccttggagcagagtgagcgccgccggaggttactggaactgcagaaatccaagcggctggattatgtgaaccatgccagaagactggctgaagatgactggacagggatggagagtgaggaagaaaataagaaagatgatgaagaaatggacattgacactgtcaagaagttaccaaaacactatgctaatcaattgatgctttctgagtggttaattgacgttccttcagatttggggcaggaatggattgtggtcgtgtgccctgttggaaaaagagcccttatcgtggcctccaggggttctaccagtgcctacaccaagagtggctactgtgtcaacaggttttcttcacttctgccaggaggcaacaggcgaaactcaacagcaaaagactacaccattctagattgcatttacaatgaggtaaaccagacctactacgttctggatgtgatgtgctggcggggacaccctttttatgattgccagactgatttccgattctactggatgcattcaaagttaccagaagaagaaggactgggagagaaaaccaagcttaatccttttaaatttgtggggctaaagaacttcccttgcactcccgaaagcctgtgtgatgtgctatctatggatttcccttttgaggtagatggacttctcttctaccacaaacagacccactacagccccggaagcactcccttggtgggctggctgcgcccctacatggtgtcagatgtccttggtgtagctgtgccggctggcccgctgaccaccaagccagactatgctgggcaccagctccagcagattatggagcacaagaagagccagaaggaaggcatgaaggagaaactcacacacaaggcctctgagaatgggcactatgaattggagcacctgtctactcccaagttgaagggttcttcccatagcccagaccaccctggatgcctcatggagaattaaagagagaagcctccttaaggagccacaggatggtacctggccccaaaaggaatcctggagaggaggacagtgacaacaggtgacttcattctttagagtgaactttccaaacccagtccagctggaaacagcttatctataatctgaaatgctggctcaaacagttatggggaggttcccagattgcgtagcattcagattgatttgagcagctcctactgtgataagtgtatcccagatccacaatgtaaatatatgtgatttgtaagaaagaa

SEQ ID NO: 1162 - DNA, 983 bp, Homo Sapiens
  NM_001042595
tctgtggtttgtgatgcagtggggagtagggttgtgcacggagtcaattgggataaatgtgaaacccctcctggagtttccccaaagccatggacagccctagtcttcgtgagcttcaacagcctctgctggagggcacagaatgtgagacccctgcccagaagcctggcaggcatgagctggggtcccccttaagagagatagcctttgccgagtccctgaggggtttgcagttcctgtcaccgcctcttccctccgtgagcgctggcctgggggaaccaaggccccctgatgttgaggacatgtcatccagtgacagtgactcggactgggatggaggcagccgtctttcaccatttctaccccacgaccacctcggcttggctgtcttctccatgctgtgttgtttctggcccgttggcatcgctgccttctgtctagcccagaagcatccccagtgcctgacctatagtaggtgctacgtatctgcttttggaatacatgcatgaatgaatgaatgggtatgttgggtgggggagggaccaggggaagggtctgggactgaggggatgcctgggtcactgctgcccactgcctctacagaccaacaaggcttgggccaagggggacatccagggggcaggggccgcctcccgccgtgccttcctgctgggggtcctcgccgtcgggctgggcgtgtgcacgtatgcggctgccctggtgaccctggctgcctaccttgcctcccgagacccgccctagttgcccctacagccctcactgtgaaccctgaggccggcagcccagcaaatctgtgggcagagagtggagaatcttggtggatgaggctgcggcggcggcaggagcatctagaaacgggagcgagctggactggaacccttccccttcctggccaccgctcttcgggcggcagcaacctgagattaaacaccagacacccttgcagccaaaaaaaaaaaaaa

SEQ ID NO: 1163 - DNA, 2688 bp, Homo Sapiens
  NM_001042600
gcggaggcaaggcgggtgcagggcttctggggacggagggaggtgccagaagttgagccctgaggccctgctggcccctgggcgcaggcccagctcaggcccccagggatggacgtcgtggaccctgacattttcaatagagacccccgggaccactatgacctgctacagcggctgggtggcggcacgtatggggaagtctttaaggctcgagacaaggtgtcaggggacctggtggcactgaagatggtgaagatggagcctgatgatgatgtctccacccttcagaaggaaatcctcatattgaaaacttgccggcacgccaacatcgtggcctaccatgggagttatctctggttgcagaaactctggatctgcatggaattctgtggggctggttctctccaggacatctaccaagtgacaggctccctgtcagagctccagattagctatgtctgccgggaagtgctccagggactggcctatttgcactcacagaagaagatacacagggacatcaagggagctaacatcctcatcaatgatgctggggaggtcagattggctgactttggcatctcggcccagattggggctacactggccagacgcctctctttcattgggacaccctactggatggctccggaagtggcagctgtggccctgaagggaggatacaatgagctgtgtgacatctggtccctgggcatcacggccatcgaactggccgagctacagccaccgctctttgatgtgcaccctctcagagttctcttcctcatgaccaagagtggctaccagcctccccgactgaaggaaaaaggcaaatggtcggctgccttccacaacttcatcaaagtcactctgactaagagtcccaagaaacgacccagcgccaccaagatgctcagtcatcaactggtatcccagcctgggctgaatcgaggcctgatcctggatcttcttgacaaactgaagaatcccgggaaaggaccctccattggggacattgaggatgaggagcccgagctaccccctgctatccctcggcggatcagatccacccaccgctccagctctctggggatcccagatgcagactgctgtcggcggcacatggagttcaggaagctccgaggaatggagaccagacccccagccaacaccgctcgcctacagcctcctcgagacctcaggagcagcagccccaggaagcaactgtcagagtcgtctgacgatgactatgacgacgtggacatccccacccctgcagaggacacacctcctccacttccccccaagcccaagttccgttctccatcagacgagggtcctgggagcatgggggatgatgggcagctgagcccgggggtgctggtccggtgtgccagtgggcccccaccaaacagcccccgtcctgggcctcccccatccaccagcagcccccacctcaccgcccattcagaaccctcactctggaacccaccctcccgggagcttgacaagcccccacttctgccccccaagaaggaaaagatgaagagaaagggatgtgcccttctcgtaaagttgttcaatggctgccccctccggatccacagcacggccgcctggacacatccctccaccaaggaccagcacctgctcctgggggcagaggaaggcatcttcatcctgaaccggaatgaccaggaggccacgctggaaatgctctttcctagccggactacgtgggtgtactccatcaacaacgttctcatgtctctctcaggaaagaccccccacctgtattctcatagcatccttggcctgctggaacggaaagagaccagagcaggaaaccccatcgctcacattagcccccaccgcctactggcaaggaagaacatggtttccaccaagatccaggacaccaaaggctgccgggcgtgctgtgtggcggagggtgcgagctctgggggcccgttcctgtgcggtgcattggagacgtccgttgtcctgcttcagtggtaccagcccatgaacaaattcctgcttgtccggcaggtgctgttcccactgccgacgcctctgtccgtgttcgcgctgctgaccgggccaggctctgagctgcccgctgtgtgcatcggcgtgagccccgggcggccggggaagtcggtgctcttccacacggtgcgctttggcgcgctctcttgctggctgggcgagatgagcaccgagcacaggggacccgtgcaggtgacccaggtagaggaagatatggtgatggtgttgatggatggctctgtgaagctggtgaccccggaggggtccccagtccggggacttcgcacacctgagatccccatgaccgaagcggtggaggccgtggctatggttggaggtcagcttcaggccttctggaagcatggagtgcaggtgtgggctctaggctcggatcagctgctacaggagctgagagaccctaccctcactttccgtctgcttggctcccccaggcctgtagtggtggagacacgcccagtggatgatcctactgctcccagcaacctctacatccaggaatgagtccctaggggggtgtcaggaactagtccttgcaccccctcccccatagacacactagtggtcatggcatgtcctcatctcccaataaacatgactttagcctctgcaaaaaaa

SEQ ID NO: 1164 - DNA, 4813 bp, Homo Sapiens
  NM_001042601
ggttgtgctgtctgtgtacttccggcagcctccagacagtttcttccgcttcctgtaccacccggctcaagtagcggacacggaacagggaactatcagcccgtcggcctccgggccctgcattctctagccatggaccgggaccttttgcggcagtcgctaaattgccacgggtcgtctttgctctctctacttcggagcgaacagcaggacaatccacacttccgtagcctcctggggtcggccgccgagccagcccggggcccgccgccccagcacccgttgcagggcagaaaagagaagagagttgacaacatcgagatacagaaattcatctccaaaaaagcggatctgctttttgcactttcctggaaatcagatgcacctgcaacttctgaaattaatgaagacagtgaagatcattatgcaatcatgccacctttagagcaattcatggagatacctagtatggatcggagagagctgtttttccgagatattgagcgtggtgatatagtgattggaagaattagttctattcgggaattcggttttttcatggtgttgatctgtttaggaagtggtatcatgagagatatagcccacttagaaatcacagctctttgtcccttaagagatgtgccttctcacagtaaccatggggatcctttatcatattaccaaactggtgacatcattcgagctggaatcaaggatattgacagataccatgaaaagctagcagtatctctgtatagctcttctcttccaccacacctatctggtattaaattaggtgtaattagctctgaagagcttcctttatactacaggagaagtgttgagctaaatagcaattctttggagtcctatgaaaatgtcatgcagagttccttgggatttgttaatccaggagtagttgaattccttctagaaaaactaggaatagatgaatctaatccaccatctttaatgagaggcctacaaagcaaaaatttctctgaagatgattttgcttctgcattgagaaaaaaacaatccgcatcttgggctttaaaatgtgtgaagatcggagttgactattttaaagttggacgccatgtggatgctatgaatgaatacaataaagctttggaaatagacaaacaaaacgtggaagctttggtagctcgtggagcattatatgcgacaaaaggaagtttgaacaaagcaatagaagattttgagcttgcattagaaaactgtccaactcacagaaatgcaagaaaatacctctgccagacacttgtagagagaggaggacagttagaagaagaagaaaagtttttaaatgctgaaagttactataagaaagctttggctttggatgagacttttaaagatgcagaggatgctttgcagaaacttcataaatatatgcaggtgattccttatttcctcttagaaatttagtgatatttgaaataatgcccaaacttaattttctcctgaggaaaactattctacattacttaagtaaggcattatgaaaagtttctttttaggtatagtttttcctaattgggtttgacattgcttcatagtgcctctgtttttgtccataatcgaaagtaaagatagctgtgagaaaactattacctaaatttggtatgttgttttgagaaatgtccttatagggagctcacctggtggtttttaaattattgttgctactataattgagctaattataaaaacctttttgagacatattttaaattgtcttttcctgtaatactgatgatgatgttttctcatgcattttcttctgaattggaccattgctgctgtgtctgtgacatctggtgctgctcatccccatccacaaactggaaaatgatttcctatgtaatcatgcatccaactgggctgtgctatttttttaaatggtttgtatttgaacatggtgattcctccttcacttcaccttaacggaatgtctttatttgaattttatttgtaaaatgtgtcctgtttaaatttttcaatctttaaaaataatttttatgtactttttttttttttttaacctttcttgcactctgggtcatgggtaccactgcaatggcttcccctttttttatgggataccaactgcaatatggtcctcaatgctgttctggccatttcaatgactaatgccaaacatctgtatgactaatttttttatgttaaaaaaatactgtttaatgctggctctatggtgatttggttttactaaattgggtttctcgttgggggtggtcttttgaatactgggttttatatattctgctatttttaacgtgtggtttttttcgatatctgggttctaaaagaaatctttggaattaagagaaaaacaagctgaaaaggaagaaaagcagaaaacaaagaaaatagaaacaagtgcagaaaagttgcgtaagctcttaaaagaagagaagaggtaaactataatattcagtatttttaaacttaaggcaactactgaattgaacccaaagtgccatactggaggtaaagtaaataaaaatatgaaagtatttcaagtgccaatcagtgactgttaagaatctttagcaaatatgtgttccatgtattttcttattaaagagatgaagtggaatttaaggctagaattctacaaaaaaagagtatcttagaattaaaatatagaataagttactttaattatgttttaggaagaaatattttagaactagagcagtggttctcaactaggggtggatttattcacccggggacatttgacaagatgtggagacatttttgattgccataactgatagggtgctactgcatctagtgtataatggtcagggatgctcttaaacattctgtaatgcacaggtcagctcccacccgcacccccaccccctaccaagaattatttggctgaaaataccaataatcaggtgaagaaaccatgaactagaggtagccaaataaaaaagttgagttctcctttatgtgttcagtagtcttaagtttttaaggtagtgttgaaaaaagtctgtctttcagagatgatggatttgcttacaatgatacctgtctgcaagcattttttcccccaaaagtgcttaatagtaaaattagatcttgtagtagccgagattattgtatcatttatctgaaccacagcttttataaaatctttaaaggaaacaaatagggcccacatctttatgaataatttagaaacatttttgtatatatatgacaaatgaactgttttttttaggctaaagaagaaaagaagaaaatcaacttcttcttcaagtgtttcttctgctgatgaatcagtgtcttcatcatcatcctcttcctcttctggtcacaaaaggcataagaaacataagaggaaccgttcagagtcttctcgcagttccagaaggcattcatctagggcatcctcaaatcagatagatcagaataggaaagatgagtgctacccagttccagctaatacttcagcatcttttcttaaccataaacaagaagtggagaaactactggggaagcaggataggttacagtatgaaaagacacagataaaagagaaagatagatgccctctctcttcatcttcacttgaaataccggatgattttggaggtaggtctgaagatccaagagatttttataacagctataaaacccaagcaggtagtagcaaaacagaaaagccatataaatcagaaagacatttttccagtagaagaaattcctcagattccttctgtaggaattcagaggacaagatttatggttataggagatttgaaaaggatatagagggaagaaaagagcactatagaaggtgggaaccaggttctgtgaggcattctacctcaccagcaagctcagaatactcttggaagtcagttgagaaatacaaaaaatacgctcactctggatcacgtgatttcagtagacatgagcaaagataccgtttaaatacaaatcaaggagaatatgaaagagaggacaattatggggaggatatcaaaacagaggttccagaagaagatgcactaagtagcaaagaacactcagaaagcagtgttaagaaaaatttacctcagaatttactgaatatatttaatcagatagctgaatttgaaaaagaaaaaggaaataagtcaaaaaattaatacaccaaggatatcggcaccattacacaaaatgccattaagtgaagtttttggttgtattagtcataacagttgagtgcagaaatctctgcttctaaaattatttgtagagattacaggaaacaaatgcttttaagtaagtttttctcaaattttgtttcagttctaggtcccttgtcacagcttggtttttagactttttatgtatatgtttatgtacagtatattactcttgacagtttgaatttcttcacctaaagataattctctgaaagtactgtttcttcattctattgcggtatatgagaattcctgggtgcatcttattctgctgtttgagagaaaaatttgtgcattgaacacttggatcatttttataaaaattaatttcattttcttttctgttaaattaaaaatcgtcagcttttgaaagattatatgttcgaatgtttcttgaacacttttatatttatcagtttaaatattacattttttgcccaattttttttaaaatttttaaatggtagattatatgtcttaattttcctctaaagcccaatttgattaaaagtggtttgtgaacagtcaaaaaaaaaaaaaaaaaaaaaaaaaaa

SEQ ID NO: 1165 - DNA, 2150 bp, Homo Sapiens
  NM_001042610
gccggggcccgggagcagctgcgcgccccgccccgccccgcgggctcctccctgccgccgcggccccccggttgctgccccgatgcgctgcgcccggagccggggccgagtcgctgccgcagctgttggggcgcccgggccaggcgacgccgccgtcgcccgtgcccctcccagaccgcaccggccgcatggagcccccggagggcgccggcaccggagagatcgttaaggaggctgaggtgccgcaggctgcgctgggcgtcccagcccaggggacaggggacaatggccacacgcctgtggaggaggaggtcgggggcatcccagtaccagcaccggggctcctgcaggtcacggagaggaggcagcctctgagcagcgtctcctctctggaggtccacttcgacctcctggacctcactgagctcaccgacatgtcggaccaggagctggccgaggtctttgctgactcggacgacgagaacctcaacaccgagtccccagcaggtctgcacccgctgccccgggccggctacctgcgctccccttcctggacgaggacaagggctgagcagagccacgagaagcagcccctaggcgaccccgagcggcaggccacagtcctggacacgtttctcactgtggagaggccccaggaggactagaccatctccacctgccccagctcctgcagggatggggtccgaacacgatggcagatctgggcagtgctgacccagcagacacacttcacccgcccacgaggctccagccgtcacctcctgacacacaccctgggggcagctctctgccagccccgagaccggccttgtctgctgggcacgggtcttcgcctcacttggagaccagccggctttcctgggggacacacggggcccccggatgcctctgggagccccagcacaagcacagcccagtggccttacgtccagctcgttcctgggccccgagtcaggaagacagcgtcacggagtcactgccaggaacgtgctgaggaatggagtggcccacggcggccttggggtgaaggggacccaggcctgtgacagccactccaggaactcctgggggtgctccaacctccgcgttttcctgtgctgccaagctcagaagccagaggcgggtttggtagtggctaatgggacaatgtgctgtccagcaaagcacacatggagaagcggccccaaaattcccaccttgatttccatcctgccccttcttctactccacggaggcgctgtctcactagggtcccctccccaaggctcagctctaagacctgcacctgcttctcttggcccctgcgtgacagacaagtccattccctccttagctcagaacaccaaatatcaccagactgcctaagagacttgatgacacctcccggaatgctctcggggtggggttcacctctccttgtcctgcacccactgctaggccacattctcgtttctgctcacatcccattgcccggctacaaggcctgcccacggcccttaaacttgctgggcaggtttggagcccatgggaccccgtgggtctctgtccaggagcagcagaggaggctgacaggccctgctccctctgctctgggggtgtctgggagccccagctcacaccctcccaatgcttatatgctgaagctcacagaatgggcttcttgcctgacagcaagtcaaagaatgagtttaatatcaaagtgtaagcttactttccatccccaagccagcctgccccctgccccatttcccatgagcacacttctggggaaggaaaacaggctcctggccttcactctcagcagagctttggagatgccccaggcatgccctgagctccttctgtgtacctgctcccacttctgagccacccgctgcccctccgcactgctggcaaacccagttcctgcctcagccaggtctccttccctggtttccagtcacacagagcccagcagctttctctttcagtcccataagggcagccttgtgtccctggccacacttccacccgccagggtcttcctccccatctttccatccttcctgctgagcttccacagagctcgtttgcaaacagggggattaaagcatcactgcgcattcgaaaaaaaaaaaaaaaaaaaaaaa

SEQ ID NO: 1166 - DNA, 1353 bp, Homo Sapiens
  NM_001042616
accagggggcggggcctgcccggctggcctggacgaacgggaagccgggagctcggccacgggtggcgaggctgcggtgaggcctggtctccggctgccagaccatgctgagtggagcacgctgcaggctcgcctcagcgctgcggggaacgcgcgcgccgccgtccgcggtcgcccgtaggtgcctgcacgcgtcggggtcgcggcctttggccgaccggggcaagaagactgaggagccgccccgcgacttcgatccggcgctgctggagttcctggtgtgcccgctctccaagaagccgctcagatatgaagcatcaacaaacgaattgattaatgaagagttgggaatagcttatccaatcattgatgggatccctaatatgataccacaggcagctaggatgacacgtcaaagtaagaagcaagaagaagtggagcagcgctagttcataatttaaaaaaattaaaaaaacgcaacagccaacttttcttaataccatataccttttaaaacacagtggcaggtaataagtggaagagaagaatgtttctgtctcttcctacgttgactgttcttattccactggtttctttagcaggactgttctactcagcctctgtggaagaaaacttcccacagggctgcactagcacagccagcctttgcttttacagcctgctcttgcctattaccataccagtgtatgtattcttccacctttggacttggatgggtattaaactcttcaggcataattgatgcaactagagtcaatatgctgtatatattaatgatagctcttgggcatcgatctctgaaagctcaaatggatggaatttagtttgcgggaaagaggctttgctttgcgcatatcaggcttaggactgtgggaggcttaagttgcagatgcttcttttattgtactcttgttctgcccttgttttttgaaggctctgacttataactgctgtatcagaagaaacattttgacagtgtcttggttggagatgaacatccctaattgacatgtgatgactatttcttattccattcatctaagagtcattgaaattttgttttgcttgtttgtttagcttcaaggtctttggtaaagtcacatgttaaggatgactgaaataattccaaaggagtgatgttggaatagtccctctaagggagagaaatgcatttgaacgaatgtgatataaaaccacataatcaaatagaaacttcatgtacttacaaaaactgagtttgtaaaattaccttcatttctttgacattaaatgcttatattagcaataaacatgttgacactttcctataaaaaataaaccagtttgcagtag

SEQ ID NO: 1167 - DNA, 1865 bp, Homo Sapiens
  NM_001042618
gggttgatgacgtcagcgttcgaattccatggcggcgcggcggcgacggagcaccggcggcggcagggcgagagcattaaatgaaagcaaaagagttaataatggcaacacggctccagaagactcttcccctgccaagaaaactcgtagatgccagagacaggagtcgaaaaagatgcctgtggctggaggaaaagctaataaggacaggacagaagacaagcaagatgaatctgtgaaggccttgctgttaaagggcaaagctcctgtggacccagagtgtacagccaaggtggggaaggctcatgtgtattgtgaaggaaatgatgtctatgatgtcatgctaaatcagaccaatctccagttcaacaacaacaagtactatctgattcagctattagaagatgatgcccagaggaacttcagtgtttggatgagatggggccgagttgggaaaatgggacagcacagcctggtggcttgttcaggcaatctcaacaaggccaaggaaatctttcagaagaaattccttgacaaaacgaaaaacaattgggaagatcgagaaaagtttgagaaggtgcctggaaaatatgatatgctacagatggactatgccaccaatactcaggatgaagaggaaacaaagaaagaggaatctcttaaatctcccttgaagccagagtcacagctagatcttcgggtacaggagttaataaagttgatctgtaatgttcaggccatggaagaaatgatgatggaaatgaagtataataccaagaaagccccacttgggaagctgacagtggcacaaatcaaggcaggttaccagtctcttaagaagattgaggattgtattcgggctggccagcatggacgagctctcatggaagcatgcaatgaattctacaccaggattccgcatgactttggactccgtactcctccactaatccggacacagaaggaactgtcagaaaaaatacaattactagaggctttgggagacattgaaattgctattaagctggtgaaaacagagctacaaagcccagaacacccattggaccaacactatagaaacctacattgtgccttgcgcccccttgaccatgaaagttatgagttcaaagtgatttcccagtacctacaatctacccatgctcccacacacagcgactataccatgaccttgctggatttgtttgaagtggagaaggatggtgagaaagaagccttcagagaggaccttcataacaggatgcttctatggcatggttccaggatgagtaactgggtgggaatcttgagccatgggcttcgaattgccccacctgaagctcccatcacaggttacatgtttgggaaaggaatctactttgctgacatgtcttccaagagtgccaattactgctttgcctctcgcctaaagaatacaggactgctgctcttatcagaggtagctctaggtcagtgtaatgaactactagaggccaatcctaaggccgaaggattgcttcaaggtaaacatagcaccaaggggctgggcaagatggctcccagttctgcccacttcgtcaccctgaatgggagtacagtgccattaggaccagcaagtgacacaggaattctgaatccagatggttataccctcaactacaatgaatatattgtatataaccccaaccaggtccgtatgcggtaccttttaaaggttcagtttaatttccttcagctgtggtgaatgttgatattaaataaaccagagatctgatcttcaagcaagaaaataagcagtgttgtacttgtgaattttgtgatattttatgtaataaaaactgtacaggtctaaaaaaaaaaaaaaaaaa

SEQ ID NO: 1168 - DNA, 1147 bp, Homo Sapiens
  NM_001042631
gtggctttgccctttggcctttgctggctgtgtggcggctccgcggttcgcaggtcgttcgctgagcgtctctgcttagccgcggtcatgagccggcacagccggctgcagaggcaggttctgagcctgtaccgcgatctgctgcgcgccgggcgtgggaagccgggcgccgaggcgcgagtgcgggcagagttccggcagcatgcgggcctgccgcggtccgacgtgctgcgcatcgagtacctgtaccgccgcgggcggcgccagctgcagctgctacgctcgggccacgccaccgccatgggcgccttcgtacgcccgcgggccccgaccggggagcctggcggcgtgggttcccagcctgacgacggcgacagtccaaggaacccccacgacagcacgggggcaccggagacccgccccgacggacggtgacaggcgaagagccgaactcgctcgatggcgtggtggagccaggaggctcgcctgactgcatggggggactggggaacccgcctaaggtgagaggtcttaagagactagcttgacgaattggggatgtcagagactcctccttggcgacgcagggggcctagagagccccgtgatggacggcaagggaggcccgccttttccgatgcttggagacaggtcggtgctcctcccccatgagggcttggggcggcctgggacgctggcgggctggacagtgtcaagccaagagctacttgcccgaaggtacggggagccaggacgacccccggtggacagggagagcctgagacgcccttctcttgacccctgagaacatacccacttctggctcctcaaggagtctcccctctcctgtatttaactctgagaagtgcagactttttgctgagaacgttttgggaaggtgccctgatgagcggtgagaagcccggaatccccttctggaaaactttcccccattaattgtgacaagccaggaccatgaggaaggggtaggggtctatcaccctggttgatcaactgaagacccccaaaggcccctacttgatggttttgaggggcaacattgactcatttgccccttccctctcggaatgttggacaaagggaataaaattggggatatgtctacttcccaaaaaaaaaaaaaaaa

SEQ ID NO: 1169 - DNA, 1142 bp, Homo Sapiens
  NM_001042635
acaccggaaggggtgggctttgcgaagatggcggcgctgggggtgctggagtccgacctgccaagtgccgtgacacttctgaaaaatctccaggagcaagtgatggctgtaactgcacaagtgaaatcactgacacaaaaagttcaagctggtgcctatcctacagaaaagggtctcagcttcttggaagtgaaagaccagctgctgctcatgtaccttatggatttgacccacctcattctggacaaagcctcaggaggatctcttcagggacatgatgcagttttgagactggtggagattcgcacggttttggaaaagcttcgtcccttggaccaaaagctgaagtatcaaattgacaagctgatcaagactgcagtgacaggcagccttagtgagaatgacccacttcgttttaagcctcatcccagcaatatgatgagcaagttgagctctgaggatgaggaggaagatgaagcagaagatgaccagtctgaggcttcagggaagaaatctgtgaagggagtgtctaagaaatatgttcctccacgcttggttccagtacattatgatgaaacagaagctgagcgggagaagaagcgtctagaacgagccaagagacgggcattgagcagctctgtcattcgtgaacttaaggagcagtactcagatgctccagaggaaatccgtgatgctcggcatccccatgttacccgccagagtcaggaggaccaacacaggattaactatgaggagagcatgatggtgcgtttgagcgtcagtaagcgagagaaaggacggcgaaaacgagcaaatgtcatgagctcacaacttcattcccttacacacttcagtgacatcagtgctttgacagggggaactgttcatcttgatgaggatcagaatcctattaagaagcggaagaagatacctcagaaaggtcggaagaaaaaaggttttcggaggcggcggtgattatgggtgtacatatttgtatattttttgtcatcctgagatacttctaatttcattgtatataggtggttttccctggaattcattaattgtttgctttggacatgtggaaagagccttactaataaaattgattttgcttatgaattaaagcccctttttgcaca

SEQ ID NO: 1170 - DNA, 5123 bp, Homo Sapiens
  NM_001042646
aacaagatgagctgatagggttcccaggctgcctggagttacataacccattgtgcttccaggacagctcacaatcttaggatttgccctaacaagcaaactcagaaaactgctgaggaaggcacgggagggtggctgtgcgaggtactgccggggctgagctctcatggaggctctctctgttctctgaagtgcctttggagtttatgtctgcacatggcattggtttttcaattcgggcagcccgtcagggctcagcctctgccaggactctgccacggcaagctcattcggacaaacgcctgtgatgtgtgcaacagcaccgatcttccggaagtcgagatcattagcctgctggaggagcagctgccccattataagttaagagccgacaccatctacggttatgaccacgacgactggctccatacacctctcatttctccagatgccaacattgacctcacaaccgagcaaattgaagagacgttaaaatacttccttttatgtgctgaaagagttggccagatgactaagacatataatgacatagatgctgtcactcggcttcttgaggagaaagagcgggatttagaattggccgctcgcatcggccagtcgttgttgaagaagaacaagaccctaaccgagaggaacgagctgctggaggagcaggtggaacacatcagggaggaggtgtctcagctccggcatgagctgtccatgaaggatgagctgcttcagttctacaccagcgctgcggaggagagtgagcccgagtccgtttgctcaaccccgttgaagaggaatgagtcgtcctcctcagtccagaattactttcatttggattctcttcaaaagaagctgaaagaccttgaagaggagaatgttgtacttcgatccgaggccagccagctgaagacagagaccatcacctatgaggagaaggagcagcagctggtcaatgactgcgtgaaggagctgagggatgccaatgtccagattgctagtatctcagaggaactggccaagaagacggaagatgctgcccgccagcaagaggagatcacacacctgctatcgcaaatagttgatttgcagaaaaaggcaaaagcttgcgcagtggaaaatgaagaacttgtccagcatctgggggctgctaaggatgcccagcggcagctcacagccgagctgcgtgagctggaggacaagtacgcagagtgcatggagatgctgcatgaggcgcaggaggagctgaagaacctccggaacaaaaccatgcccaataccacgtctcggcgctaccactcactgggcctgtttcccatggattccttggcagcagagattgagggaacgatgcgcaaggagctgcagttggaagaggccgagtctccagacatcactcaccagaagcgtgtctttgagacagtaagaaacatcaaccaggttgtcaagcagagatctctgaccccttctcccatgaacatccccggctccaaccagtcctcggccatgaactccctcctgtccagctgcgtcagcaccccccggtccagcttctacggcagcgacataggcaacgtcgtcctcgacaacaagaccaacagcatcattctggaaacagaggcagccgacctgggaaacgatgagcggagtaagaagccggggacgccgggcaccccaggctcccacgacctggagacggcgctgaggcggctgtccctgcgccgggagaactacctctcggagaggaggttctttgaggaggagcaagagaggaagctccaggagctggcggagaagggcgagctgcgcagcggctccctcacacccactgagagcatcatgtccctgggcacgcactcccgcttctccgagttcaccggcttctctggcatgtccttcagcagccgctcctacctgcctgagaagctccagatcgtgaagccgctggaaggttccgccacacttcaccactggcagcagttggcccaacctcaccttgggggcatcctggacccccggcccggtgtggtcaccaagggcttccggacgctggatgttgacctggacgaagtgtactgccttaacgactttgaagaagatgacacaggtgaccacatttctctcccacgcctagctacctccactccagttcagcacccagagacctcagcgcaccatcctgggaagtgcatgtctcagaccaactccaccttcaccttcaccacctgtcgcatcctgcatccttcagatgagctcactcgggtcacaccaagccttaactcagccccaactccagcttgtggcagcaccagccacttgaaatccacgccggtggccacaccatgcactccacggagactgagcctggctgagtccttcactaacacccgtgagtccacgaccaccatgagcacatccctggggctcgtgtggctgttgaaggagcggggcatttctgctgccgtgtacgacccccagagctgggacagggccggccggggctccctcctgcactcctacacgcccaagatggctgtgatcccctctactccgccgaactcgcctatgcagacacccacatcctccccaccctcctttgagttcaagtgcacgagccctccctacgacaatttcctggcttccaagccagccagctccatcctgagggaagtgagagaaaagaacgtccgcagcagcgagagccagaccgacgtgtccgtctccaacctcaacctcgtggacaaagtcaggaggtttggggtggccaaagtggtgaactcagggcgagcccatgtccccaccttgactgaggagcagggacccctcctctgtgggcccccggggccagcaccagcccttgttcccagaggcctggtacctgagggcctgcccctcagatgccccactgtcaccagtgccatcggtgggctgcagctcaatagtggcatccggcggaatcgcagcttccccaccatggtgggatctagcatgcagatgaaagctcctgtgactctcacctcgggcatcttgatgggtgctaagctctccaaacaaactagcttacggtgaggactggaggggggccggttgccctagaggagacccacgttctcctctcttgctcccacctccctctcttccccccacagtgcactccctccctctgcccttctctgtccaccccctcctaagctagacaaatcaacctcgtgcctaatggaggaagtgtggaaactttgtaaaatgtgtacataggacttggagaccttgtgtccgccctgctctttcttccgatcccacaggaagtgcccctgcactgtcatcactctcacgaggacgtcacctgtgctaacctgggggaaggtggggtcctttcttctttccttttgagaagcactgaaactcccaagtgtgttcttatcccatggataggaaaccagtgaattccgtggctggcacaccacgagctgtcacgcggcacgggtcataacacatctgggtgtcatcggacacctcacctcgcccaccctgtaggagcgtaaggagcctccatcctcagccacgtgcagctgacgtggctttcctgatcggagggcttttcttttatgggtggcccagcttcttcaagaccttcactgctctgcctcagtggacagtcgtttcttttttgaggtgtgaccttttgttttcatgccttccccttgaagtcatcctgtgttttgtaatcagctgtcaggccaaatgtctgacccgaaagagaatgtatttacactcatgctgcgttgttcagcagcccctctgtgttctgtgtgatttgttttatttttccttttttttacatatatatgcagggaagtaatggtactggtagtgtatgttttctatgtggttcaaatatgaatttcgaacacaccaagccgctaatgagatagcagcttttttctgggacccagagtcacaaccaaattgatttaagaccggacccaagacacctttaacaataggactgaaaggaaaaaggatagggaaaaagcttattaaagaaatgtgtcaacaccaaatgtagaggggaagaaccacaaccaggcataataccaaaccggttccagggggaaacaaggctttggtattccgctggctccagcgctttttctgaaacccgaggctggccagggtgctgtcaccatgcggtctttgattgcagccattcaatgcccacatgcttttccttcttgtttcagaacagcacatggtcacaacaagatattttctttccctccaaagccttttgtctccttgtgcctctttttatccttaggaaaagatccaggtgcttgtgaaaagaatcatgaatgcaacaagggaggctggtcctgttgctgtcgccgattaagttttaaacttttatttattatttatgtctgccgtattttaaataaacattctcgttccttccagtttcagtcatagtgtgtctgtggcattccagtccaaccatgtgacttatttattctaatttgagggctgcactgtacaccatggtgtcctgtgacaccgtgttccagacatttatggaaggaaaacatcccatataaatgaaactgtcatgctgtgtcctccccggcagcagaagatgtgtccttccattgagtgagggtaaccttatgtccaccaaggatactttgagaaagcccctaaggaacaagcctcagtcccacggtttcagactatttattctctgaacacaagagtattggttaattatgttctcagctctccctgctgttgtatgtgtgcattcactgcaagtaacttatatctttttatttgaatgtattttaaagcagtagatagaataacaaaggaatatgaaaaccatggactgaatggaccattttatgtattcagagagagaagccactcatcattgccagaaataccatgtaaaaattggcagttcagaggttgcaatacttagtatagtaaataaataaacggtcaacattgtgcaaccactaccaaaaagtgtgttgtaatgcatcaaaaatcaacacaattttattcactaatgagtatcaataaaataagttcaaatgatggaaaccacaaaaaaa

SEQ ID NO: 1171 - DNA, 4195 bp, Homo Sapiens
  NM_001042669
aatatatgggatgggaggatactgactaagtctgagaaggaggagaaagaaaattagctacaggaagagtttatatccccttctacaagaaaacttaaatatagctaccaccgctttgaaaggaatggtttgtgtccaaacagcattttccagacaagctctgtacttttttgccaaaagaattaactttaaactgaaggcagtggacagttaaacaagagtcggcactgggaacagctgtgcgtagaccagaccagtgacttataaggaggcgatcgagatcggatgacagcaaatcatgaaagctacctcctcatggcaagcacccagaatgatatggaagactgggtgaagtcaatccgccgagtcatatggggacctttcggaggaggcatttttggacagaaactggaggatactgttcgttatgagaagagatatgggaaccgtctggctccgatgttggtggagcagtgcgtggactttatccgacaaagggggctgaaagaagagggtctctttcgactgccaggccaggctaatcttgttaaggagctccaagatgcctttgactgtggggagaagccatcatttgacagcaacacagatgtacacacggtggcatcacttcttaagctgtacctccgagaacttccagaaccagttattccttatgcgaagtatgaagattttttgtcatgtgccaaactgctcagcaaggaagaggaagcaggtgttaaggaattagcaaagcaggtgaagagtttgccagtggtaaattacaacctcctcaagtatatttgcagattcttggatgaagtacagtcctactcgggagttaacaaaatgagtgtgcagaacttggcaacggtctttggtcctaatatcctgcgccccaaagtggaagatcctttgactatcatggagggcactgtggtggtccagcagttgatgtcagtgatgattagcaaacatgattgcctctttcccaaagatgcagaactacaaagcaagccccaagatggagtgagcaacaacaatgaaattcagaagaaagccaccatggggcagttacagaacaaggagaacaataacaccaaggacagccctagtaggcagtgctcctgggacaagtctgagtcaccccagagaagcagcatgaacaatggatcccccacagctctatcaggcagcaaaaccaacagcccaaagaacagtgttcacaagctagatgtgtctagaagcccccctctcatggtcaaaaagaacccagcctttaataagggtagtgggatagttaccaatgggtccttcagcagcagtaatgcagaaggtcttgagaaaacccaaaccacccccaatgggagcctacaggccagaaggagctcttcactgaaggtatctggtaccaaaatgggcacgcacagtgtacagaatggaacggtgcgcatgggcattttgaacagcgacacactcgggaaccccacaaatgttcgaaacatgagctggctgccaaatggctatgtgaccctgagggataacaagcagaaagaacaagctggagagttaggccagcacaacagactgtccacctatgataatgtccatcaacagttctccatgatgaaccttgatgacaagcagagcattgacagtgctacctggtccacttcctcctgtgaaatctccctccctgagaactccaactcctgtcgctcttctaccaccacctgcccagagcaagacttttttggggggaactttgaggaccctgttttggatgggcccccgcaggacgacctttcccaccccagggactatgaaagcaaaagtgaccacaggagtgtgggaggtcgaagtagtcgtgccaccagtagcagtgacaacagtgagacatttgtgggcaacagcagcagcaaccacagtgcactgcacagtttagtttccagcctgaaacaggaaatgaccaaacagaagatagagtatgagtccaggataaagagcttagaacagcgaaacttgactttggaaacagaaatgatgagcctccatgatgaactggatcaggagaggaaaaagttcacaatgatagaaataaaaatgcgaaatgccgagcgagcaaaagaagatgccgagaaaagaaatgacatgctacagaaagaaatggagcagtttttttccacgtttggagaactgacagtggaacccaggagaaccgagagaggaaacacaatatggattcagtgagcctgctttcgcctgctgtctctgatggctctggcaaggactccagggattctggtgggatatgacttagaaccaggtggctggtcacctggatgtacagaagtctaactggtgaaggaatatcatttacagacattaaacatccatatctgcaatgtgtaccaaagttatatcatgccccataatgctactgtcaagtgttacaactggatatgtgtatatagagtagtttttcaaaagtaaactaaaaatgagaagcatatttcaagaattattttattgcaagtcttgtatttaaatgttaaatcaatatgttgttgcaatttagcttgctttcaagcttcaccccttgcacttaacataagctatttttggcattgtgttatcatcggcttattttatagatcaatatttttatttcccttttttgctgaggaaatgaagataagcaaaaatataaatatatatataaatatatgagttattaaaatcagaagaatactttgtggctgtgctgtttgtgccaatagactttgtcatgaccaaaaagagaaatgtaaatagttttataaaatacagtcgaatcaccaggaacctttgagctgcttttaaaattcttcccctggcaccactcagttttgcttttgcgaggcgatttgacataggaactttgagactccatgagaaagtccctttctgaggcccactgtctaccttgccagatcctcagtgcgtatcgccaatgcaggatgctccttagaaaagaaaaaatggtaaagaatggcatttaacgattcaggctttgaattactctgtccctctggaccgaatctctttaactgctggatagttttagaggaattctcctgctacttaggtactgggaaacaatgcttgctaaaccatgcccacgtgagcacctgtctcccactcaaacctctcccatctcccaacaactgcactttagaataccagcagtgaaatggtattactgtttccctctgagtgaaactgctagagtatatgtcacgtagtgacatttttttctcactcaggctattgccatctgggattctctccctactacagctggcaaagttggtttgcagcaagaagatagtgggagggggccaggctgcaggagaaggagaaaagtttagaagaaacaaaccattttgcttctaattttgacagtatcactttcctgttaaaacatacaataattttaaaaggtgaatgcctaaagttccaattttagcaaatatgggaacctcagcaatgctaattttctagaaaaacccagggctctttggagctagagttttgggagaacagttcttcacaataaggcaatggttttgagaggccaggcaaataatctttctcaccgtagaacaaaaagttacaaaaggcataatcggaaatagagactacatacttgagtttatggggtttgtgttgtttgaaggttcaatgcttgcatgtgtttatttattttcaagagggaaagtggtctgtactgctttcatccttgccactgtcttgcttttattttttactctcccactgagcaagcgtctgtggtcctatggtatcaaccagtatctttatagcaataatttctttaattcccttttctctctctttccaattatttaaccagttacttccacctggacatacgataggaaattcaaactcaaaatatgaaaattgatcttaataactctcccttcatatcttttcacctatttccagtccttatcatagttgataaaaacctcagactcatccagaaagctatatgatgcactagtaaaaaaaacaaagatattcaaactgcttgggttcaaatggtatacaatttgccagctgttactgaaccttctatgcataactttttttttcctctgtgcaattggaataataaaaatactactcccataga

SEQ ID NO: 1172 - DNA, 698 bp, Homo Sapiens
  NM_001042693
ctcaggctcagctccgtctcgctcggtccctcgcttccccgccgggctctagccggccgtctggtggcccgaggtggcggcgggctgggcgcggggcgcgatgagcggcgcctgcacgagctacgtgagcgcagagcaggaggtggtgcgcggcttcagctgcccgcggccggggggcgaggcggccgctgtcttctgctgcggcttccgcgaccacaagtactgctgcgacgacccgcacagcttcttcccctacgagcacagctacatgtggtggctcagcattggcgctctcataggcctgtccgtagcagcagtggttcttctcgccttcattgttaccgcctgtgtgctctgctacctgttcatcagctctaagccccacacaaagttggacctgggcttgagcttacagacagcaggccctgaggaggtttctcctgactgccaaggtgtgaacacaggcatggcggcagaagtgccaaaagtgagccctctccagcagagttactcctgcttgaacccgcagctggagagcaatgaggggcaggctgtgaactccaaacgcctcctccatcattgcttcatggccacagtgaccaccagtgacattccaggcagccctgaggaagcctctgtacccaaccctgacctatgtggaccagtcccataaacattcaataaatgtctccatacca

SEQ ID NO: 1173 - DNA, 7313 bp, Homo Sapiens
  NM_001042717
ggggatgacgtaaaaaggccgcgctgtactgcggcttgtgccgcttccgcaagaaggtttcctggcctgttgcagccatggtgcattgcagttgcgtgttgttcagaaagtatggaaatttcatcgataagctaagactcttcaccaggggaggatccggtggaatgggttatcctcgtttaggtggagaaggtggaaaaggtggtgatgtctgggttgtagcccagaacagaatgactttaaaacaacttaaagacaggtatcctcggaaacggtttgtggctggagtaggagcaaacagcaaattcccaaatgctggaaaatcctctttgctaagttgtgtttctcatgcaaaacctgcaattgcagattacgcatttacaacattaaagcctgaacttggaaagataatgtacagtgatttcaaacagatatcagtagctgatcttccgggtttaatagaaggagcacatatgaacaaaggaatgggccacaaattcctcaagcatatagaaagaactagacaactactttttgttgttgatatttctggatttcagctttcttctcacactcaatacaggacagcttttgaaaccataatactgcttacaaaagagttggaattgtacaaagaggaacttcagacaaaacctgcactcttggcagttaataaaatggacttgccagatgcccaagataagttccatgaattgatgagccagctccagaatcctaaagattttctgcatttatttgaaaaaaacatgattccagagaggactgtagagttccaacatatcatccccatatctgcagttactggagaaggaatcgaagaattaaagaattgtataagaaagtcactggatgaacaggccaaccaggaaaatgatgcacttcataagaaacagttgcttaatttgtggatttctgatacaatgtcttctactgagccaccatcaaagcatgctgttactacttccaaaatggatataatttaaatatattaaaaatggtattgatggaacagtatttaatgcttaaaaacaaggaaatcctttcatctgtgacaacctggaggacatgttaagtaaaataagccaggcttagaaagacaaatgctgcataatctcactgtggaatcttaagttgaactcatagaaggagagaatagaatggtggttatcaagggctggtggggcagtggaggattgaggagatattggtcaaaatttacaaaatttcagttagacaaggcaactgagttcaagagatctgttgtacagcttggtgactgtaattaacaacaatgtattttgaaagtcactgagtaaattttaagtggtttttccaaaaaagcacataaggtaatgcacgttaattagctatattgagccattccacaatgtatagatatttcaaaacatgttacacatgataaatccagtttttctacgtcattttttaaaattatatttaatttttttattttgaaagttttttcacagatcttttttttagtattattaccttctgatatatgtgtcattattgaagaaccataccttttaaagttattattttgtaattaagtatgtcaacagtaaaaaataaccagtggccaggcatggtggctcatgcctgtaatcccagcacttttcggaggccgaggagggcagatcacttgaggtcaggagttcaagaccagcctggccaacatggcgaaaccccgtctctactaaaaatataaaaaattagccaggcatagtggcgcatgcctgttgtagccccagctactcaagaggctgaggcaggagaattgcttgaacgcgggaggtggaggatacaatgaacccgaggtcgcgccactgcacttcagcctgggtgacagagctagactccatctcaaaaaaaaaaaagagctaaaaaattacattttacaagtttatggccagcccacctgtaataacattctctgatattcctttacttaggatgtccctattgagatcattttttaaatttatgtggaaggattctctagattattattagaatgagcaattcagttttgtttgtttttgagcctgtcttgtacctggttgcactaaatatataatagttatcttttgtggagaccttaaaaccctaaatttgaatacatgttcaatgatagtaaagatatgacagaaactagaagatagctgtttatgatttgagcttttggaaaattttcgtttcttgaatgtaatagtattttttcctgaattggaggagactgatctatattgtttcatttttcttttgtcctagtctatttcactttcttttgtcataatctatttaatttcccactttcttattttagtaaagagagaataaatagcaagtgcaggccaggcatggtggtgcaggccagacatagcggtacatgcctgtaatcctagcactttgggatgccaaggcgggaggattgcttgagcccaggagttcatgcctgagcaacatagcaagaccctggctctctataaaacagaaaacgcaaactttaatattatcaacaatcaatatattataagagattgcaatttctaagtttctacctgagtgtttcacaaatacaaactggacattttccctttaaatgagttttattataaaatgtacatattgattgtaaaaacaaaaaattcaaatagtacaaaagcatataagtaactaataaaagctccctttctgcattaggcccctcagttcttcccagggaaaatgattaatagtttacattcttgcagaaattttttatgtataaatttttacccaaatgaattcattatataaattttttccaacttagtgtttttttacataatagtagcaagttaaaaaattgtacttcaggccaggcacggtgggtcacgcctgttaatctcagcactttgggaggctgaggcaggaagaccacttgaggtcaggagttcaagaccagcctggccaacatggtgaaaacccatctctactaaaatacaaaaatcagctgggcatggtggcgcatgtctgtaatcccagctactcgggaggctgaggcaggagaatcgcttgaacccgggaggcggaggttgcagtgagctgagattgcgccattgcactccagcctggaggacaagagggagacttcctctcaaaaaacaaaatattgtacttcaaaaaattattcttcaatgctatttttaaattactagaaattattttggaatttaatgttgcatacagcctgagatatggctgttcaccctttggtaaagtattaaagaaaaataatgcattgttctcagcttaaatttttttctgatttgacaacatgagtgatgttttcccagtattatttcaattatatttgttttattttctgttcctcactcctacctctcattccagtccccaaactggcttttcttttatttcttttttcttcattgctgatgtatttattgagcaatgtcctgtatcaggcactgtccaaggtgctgtatgtgccatgttgaagagaacagacaggacctactgtccttgtatatcttgcctttgataacagaaactgcaggggattggaatagcctctttacaagaaaagaataagagtgaggaaaagcgtttggaatttatagtgatcacagtgaccaggttttgtattgggtatgttttacatttgtaacttcagtgctatttttttttaagctccattgttttctaaatgtaaacaagtatcaatgtaaggacagtttcatcaggtgaatatcagaagtactgacaccataatctcattttgcactgtggcaaagggtagtagatgtgtgttcaggattatttgctctgtcagtagtgcccagggtgccactccatgactaaccgaaacattttattatgtgactcactaagatgttcaattcattagtattttctggttactcaaagtgtactctatgtacctttttttgacctttgatttttattctgatggagaagatcagattccttttttatcttataaaaaataattttgaaacaaagacttattttgaagtaagtcttttaacattatctcagatgcattttattttgtccttaagtaagacttttcatttttacctttcaaaatgcaattttcaaaatatatgcttttttgaaacacttattatgttactgaataaccagagtattaaattcaatgtacagcaaatttttacaaagtcccagtagttcttgcagagctttctataatatcagatttatttaccatcatgaaatatgtttatacagtattaagtatattgtactatgaagttggacctgcacactgaaaaattccaaaatacctattatgttgtgctttttgtgatatatattcatattattatttgtcataacaaggtgaacttttttaaaatggtaaacatgtattagttacataatcaggaaaaaagtcatcttttataatgagaaaaattaggtcaaggatatttcaggttttatccaattagatttcttgtaaagttatgtgttttcttttatctcagtgcttatttgctttgcaaggatgaaggttagagattcctttcagtagttaatgaaagctacagacttgtcttgccgaaaaatgtacataaacacataaactattttccaagcagtttcacagtgtttgcaaagttcagattgaaaacccagttttacaaatcccatctacaaatttgcattgtcattaagatatattaaaaataatttttcaaagcaacagcacagatgcactttaaaactgtagcttaaaaataaaaattagtaatataacttgtgtaaacctacacaaaagataaaagatatcttattgcaaaaatagggcaacattttgttttaaagaccaaatagtgaattgaatttaatgcatatctttaaatccttaatagtatctcaaatctggtttaaatctgtctctccttaacggaatagaaagtgaaacaaatccagaaatcttgttcgagtacatggtctgtgctagtaatcatatctaaagtggtaatgttaccatatgctgggtactgggctgagtaaatcacatattttaacttatttaaacactgcactgtattgcctgctagcgatgtcatttttttaaagttggatggtgaatacatgagttgttttttaaactcttttgggagcctaaaaaatttgaatttttttttttccccccccagacggagtctcgctctcttgccaggctggagtgcagtgacattatcttggctcactgcagcctctgattccctggttcaagcaattctcctgcctcagcctcccgagtagctgggattacaggcatccaccaccacgtccagctaatttttgtatttttagtagagacggggtttcaccatgttggccaggatgggaaaattttttaaaagacatttattaaaaaaaaatgtctatgccttatcaaagtttataactcaagaattaatgagataaacagtggacaaaaagtgttggcagataacatgcataattttaattaaaagttaagcagtgaaaaataaacatctttttttcttaaagagatatttcatatctgttctatttgtttagttttatttattctttttagagacagggtctctctgtggagtgcagtggcatgattatagccctctgcggcctcaatcttcagggcttaagttatcctcctgcctcatcctcccaagtagctaggactacaagtgtgtgccaccatacctggctaatttttaaaaactattttgtagagacagggtcttactatgttgcccagagtggtcttgaactcccatcctcatggaatcctcccacttcagtctctgaaagtgctaggattataggcatgagccatttatgcccagccagttttcttttttctaattgaagcttggcaagcagagggaaatgtattagggaaatagctttagttttgagtgggtgtcagtagccagctgaagaaaaagcaaaatgaaataggtagtagaaatgagaaagggagagagggaagaagaaaaaaatggatgttggaaagttgttgcatgtctctctggatagctcagaagtatcagttgtggttattgcctcacttggcttttgtaagcatgaaaaagccagggacaatttcaactaccatttctgaccatcatcaaccacaaattttaggcaatttgttagaattttttttaaatgttcttaatagttgttgggtacctgggagatttcagagaaagtaatcacctttgtatatattattaatgtgtttataatagaaattaaattctttgggatgtacaggtaagataagctatgtgaagcatagctgttatccaagtcgtgtgcctttgaaatacttggaatttgaagaacaggacatgcagcttatgttataattaatttgcgagcaatatatggcatgatagtattttcttatctaaattctgagtgcattgaaagtttaaagcaaaggacaaaagcttcctttgttcatggcccatattccagtatatttttctgaaactgccaatattttctgatcggtactttcatttttctagttggttaccaaatactgttattggtattatttctatataaaaggctttaagaagactatagtataattttcttaagaaaaaagacatgattataagctaaaatatgccttcggttttgtgtgctacaaattgagggagattgagaatattttaaatcaagggcagacattgagtaaaagcttatgactttggatggatttgaaacatgattaaatgacagagtaaataaaagcccctagtcaagtgaattctaatgggggaaataagaggactatataaaaattgaacctctgttttgaaaacaaatctttccaggaagtggtaccactctggggtcaagagaaattgtaagaacaataaaatgagcacacatgaccttcctttcctataaaaatatgaagcagaaaactcccccatgatttcctcatgttgcttagaatagtgtgtatttcagaacttttccatttaatatttttggaccacagttgactgaaactgaggatgggaggaagggatgcttaaaaccttggatagtaccaaaccctatatatattatgtttttttctatatatacacagctatgataaagttcataaattaggcacagtaagagattaaaaatattaaattgggccaattaatatattgtaataaaagctatgttaatgtggtcaaaaaaaa

SEQ ID NO: 1174 - DNA, 15376 bp, Homo Sapiens
  NM_001042723
tctacctcgcgggtgcctctggtgtctccagaggtctccgaccccagcccgcccccagccctcccgcccagcccgcagccccctccctctgttccccgacctcagaccctgggcttccgacctcgacatcatgggtgacgcagaaggcgaagacgaggtccagttcctgcggacggacgatgaggtggtcctgcagtgcagcgctaccgtgctcaaggagcagctcaagctctgcctggccgccgagggcttcggcaaccgcctgtgcttcctggagcccactagcaacgcgcagaatgtgccccccgatctggccatctgttgcttcgtcctggagcagtccctgtctgtgcgagccctgcaggagatgctggctaacacggtggaggctggcgtggagtcatcccagggcgggggacacaggacgctcctgtatggccatgccatcctgctccggcatgcacacagccgcatgtatctgagctgcctcaccacctcccgctccatgactgacaagctggccttcgatgtgggactgcaggaggacgcaacaggagaggcttgctggtggaccatgcacccagcctccaagcagaggtctgaaggagaaaaggtccgcgttggggatgacatcatccttgtcagtgtctcctccgagcgctacctgcacctgtcgaccgccagtggggagctccaggttgacgcttccttcatgcagacactatggaacatgaaccccatctgctcccgctgcgaagagggcttcgtgacgggaggtcacgtcctccgcctctttcatggacatatggatgagtgtctgaccatttcccctgctgacagtgatgaccagcgcagacttgtctactatgaggggggagctgtgtgcactcatgcccgctccctctggaggctggagccactgagaatcagctggagtgggagccacctgcgctggggccagccactccgagtccggcatgtcactaccgggcagtacctagcgctcaccgaggaccagggcctggtggtggttgacgccagcaaggctcacaccaaggctacctccttctgcttccgcatctccaaggagaagctggatgtggcccccaagcgggatgtggagggcatgggcccccctgagatcaagtacggggagtcactgtgcttcgtgcagcatgtggcctcaggactgtggctcacctatgctgctccagaccccaaggccctgcggctcggcgtgctcaagaagaaggccatgctgcaccaggagggccacatggacgacgcactgtcgctgacccgctgccagcaggaggagtcccaggccgcccgcatgatccacagcaccaatggcctatacaaccagttcatcaagagcctggacagcttcagcgggaagccacggggctcggggccacccgctggcacggcgctgcccatcgagggcgttatcctgagcctgcaggacctcatcatctacttcgagcctccctccgaggacttgcagcacgaggagaagcagagcaagctgcgaagcctgcgcaaccgccagagcctcttccaggaggaggggatgctctccatggtcctgaattgcatagaccgcctaaatgtctacaccactgctgcccactttgctgagtttgcaggggaggaggcagccgagtcctggaaagagattgtgaatcttctctatgaactcctagcttctctaatccgtggcaatcgtagcaactgtgccctcttctccacaaacttggactggctggtcagcaagctggatcggctggaggcctcgtctggcatcctggaggtcctgtactgtgtcctcattgagagtccagaggttctgaacatcatccaggagaatcacatcaagtccatcatctccctcctggacaagcatgggaggaaccacaaggtcctggacgtgctatgctccctgtgtgtgtgtaatggtgtggctgtacgctccaaccaagatcttattactgagaacttgctgcctggccgtgagcttctgctgcagacaaacctcatcaactatgtcaccagcatccgccccaacatctttgtgggccgagcggaaggcaccacgcagtacagcaaatggtactttgaggtgatggtggacgaggtgactccatttctgacagctcaggccacccacttgcgggtgggctgggccctcaccgagggctacaccccctaccctggggccggcgagggctggggcggcaacggggtcggcgatgacctctattcctacggctttgatggactgcatctctggacaggacacgtggcacgcccagtgacttccccagggcagcacctcctggcccctgaagacgtgatcagctgctgcctggacctcagcgtgccgtccatctccttccgcatcaacggctgccccgtgcagggtgtctttgagtccttcaacctggacgggctcttcttccctgttgtcagcttctcggctggtgtcaaggtgcggttcctccttggtggccgccatggtgaattcaagttcctgcccccacctggctatgctccatgccatgaggctgtgctccctcgagagcgactccatcttgaacccatcaaggagtatcgacgggaggggccccgggggcctcacctggtgggccccagtcgctgcctctcacacaccgacttcgtgccctgccctgtggacactgtccagattgtcctgccgccccatctggagcgcattcgggagaagctggcggagaacatccacgagctctgggcgctaacccgcatcgagcagggctggacctacggcccggttcgggatgacaacaagaggctgcacccgtgtcttgtggacttccacagccttccagagcctgagaggaactacaacctgcagatgtctggggagacgctcaagactctgctggctctgggctgccacgtgggcatggcggatgagaaggcggaggacaacctgaagaagacaaaactccccaagacgtatatgatgagcaatgggtacaagccggctccgctggacctgagccacgtgcggctgacgccggcgcagacgacactggtggaccgtctggcagaaaatgggcacaacgtgtgggcccgagaccgcgtgggccagggctggagctacagcgcagtgcaggacatcccagcgcgccgaaaccctcggctggtgccctaccgcctgctggatgaagccaccaagcgcagcaaccgggacagcctctgccaggccgtgcgcaccctcctgggctacggctacaacatcgagcctcctgaccaggagcccagtcaggtggagaaccagtctcgttgtgaccgggtgcgcatcttccgggcagagaaatcctatacagtgcagagcggccgctggtacttcgagtttgaagcagtcaccacaggcgagatgcgcgtgggctgggcgaggcccgagctgaggcctgatgtagagctgggagctgacgagctggcctatgtcttcaatgggcaccgcggccagcgctggcacttgggcagtgaaccatttgggcgcccctggcagccgggcgatgtcgttggctgtatgatcgacctcacagagaacaccattatcttcaccctcaatggcgaggtcctcatgtctgactcaggctccgaaacagccttccgggagattgagattggggacggcttcctgcccgtctgcagcttgggacctggccaggtgggtcatctgaacctgggccaggacgtgagctctctgaggttctttgccatctgtggcctccaggaaggcttcgagccatttgccatcaacatgcagcgcccagtcaccacctggttcagcaaaggcctgccccagtttgagccagtgccccttgaacaccctcactatgaggtatcccgagtggacggcactgtggacacgcccccctgcctgcgcctgacccaccgcacctggggctcccagaacagcctggtggagatgcttttcctgcggctgagcctcccagtccagttccaccagcacttccgctgcactgcaggggccaccccgctggcacctcctggcctgcagccccccgccgaggacgaggcccgggcggcggaacccgaccctgactacgaaaacctgcgccgctcagctgggggctggagcgaggcagagaacggcaaagaagggactgcgaaggagggcgcccccgggggcaccccgcaggcggggggagaggcgcagcccgccagggcggagaatgagaaggatgccaccaccgagaagaacaagaagagaggcttcttattcaaggccaagaaggtcgccatgatgacccagccaccggccacccccacgctgccccgactccctcacgacgtggtgcctgcagacaaccgcgatgaccccgagatcatcctcaacaccaccacgtactattactccgtgagggtctttgctggacaggagcccagctgcgtgtgggcgggctgggtcacccctgactaccatcagcacgacatgagcttcgacctcagcaaggtccgggtcgtgacggtgaccatgggggatgaacaaggcaacgtccacagcagcctcaagtgtagcaactgctacatggtgtggggcggagactttgtgagtcccgggcagcagggccggatcagccacacggaccttgtcattgggtgcctggtggacttggccactggcttaatgacctttacagccaatggcaaagagagcaacacctttttccaggtggaacccaacactaagctatttcctgccgtcttcgtcctgcccacccaccagaacgtcatccagtttgagctggggaagcagaagaacatcatgccgttgtcagccgccatgttccaaagcgagcgcaagaacccggccccgcagtgcccaccgcggctggagatgcagatgctgatgccagtgtcctggagccgcatgcccaaccacttcctgcaggtggagacgaggcgtgccggcgagcggctgggctgggccgtgcagtgccaggagccgctgaccatgatggcgctgcacatccccgaggagaaccggtgcatggacatcctggagctgtcggagcgcctggacctgcagcgcttccactcgcacaccctgcgcctctaccgcgctgtgtgcgccctgggcaacaatcgcgtggcgcacgctctgtgcagccacgtagaccaagctcagctgctgcacgccctggaggacgcgcacctgccaggcccactgcgcgcaggctactatgacctcctcatcagcatccacctcgaaagtgcctgccgcagccgccgctccatgctctctgaatacatcgtgcccctcacgcctgagacccgcgccatcacgctcttccctcctggaaggagcacagaaaatggtcacccccggcatggcctgccgggagttggagtcaccacttcgctgaggcccccgcatcatttctcgcccccctgtttcgtggccgctctgccagctgctggggcagcagaggccccggcccgcctcagccctgccatcccgctggaggccctgcgggacaaggcactgaggatgctgggggaggcggtgcgcgacggtgggcagcacgctcgcgaccccgtcgggggctccgtggagttccagtttgtgcctgtgctcaagctcgtgtccaccctgctggtgatgggcatctttggcgatgaggatgtgaaacagatcttgaagatgattgagcctgaggtcttcactgaggaagaagaggaggaggacgaggaggaagagggtgaagaggaagatgaggaggagaaggaggaggatgaggaggaaacagcacaggaaaaggaagatgaggaaaaagaggaagaggaggcagcagaaggggagaaagaagaaggcttggaggaagggctgctccagatgaagttgccagagtctgtgaagttacagatgtgccacctgctggagtatttctgtgaccaagagctgcagcaccgtgtggagtccctggcagcctttgcggagcgctatgtggacaagctccaggccaaccagcggagccgctatggcctcctcataaaagccttcagcatgaccgcagcagagactgcaagacgtacccgcgagttccgctccccaccccaggaacagatcaatatgctattgcaattcaaagatggtacagatgaggaagactgtcctctccctgaagagattcgacaggatttgcttgactttcatcaagacctgctggcacactgtggaattcagctagatggagaggaggaggaaccagaggaagagaccaccctgggcagccgcctcatgagcctgttggagaaagtgcggctggtgaagaagaaggaagagaaacctgaggaggagcggtcagcagaggagagcaaaccccggtccctgcaggagctggtgtcccacatggtggtgcgctgggcccaagaggacttcgtgcagagccccgagctggtgcgggccatgttcagcctcctgcaccggcagtacgacgggctgggtgagctgctgcgtgccctgccgcgggcgtacaccatctcaccgtcctccgtggaagacaccatgagcctgctcgagtgcctcggccagatccgctcgctgctcatcgtgcagatgggcccccaggaggagaacctcatgatccagagcatcgggaacatcatgaacaacaaagtcttctaccaacacccgaacctgatgagggcgctgggcatgcacgagacggtcatggaggtcatggtcaacgtcctcgggggcggcgagtccaaggagatccgcttccccaagatggtgacaagctgctgccgcttcctctgctatttctgccgaatcagccggcagaaccagcgctccatgtttgaccacctgagctacctgctggagaacagtggcatcggcctgggcatgcagggctccacgcccctggacgtggctgctgcctccgtcattgacaacaatgagctggccttggcattgcaggagcaggacctggaaaaggttgtgtcctacctggcaggctgtggcctccagagctgccccatgcttgtggccaaagggtacccagacattggctggaacccctgtggtggagagcgctacctggacttcctgcgctttgctgtcttcgtcaacggcgagagcgtggaggagaacgccaatgtggtggtgcggctgctcatccggaagcctgagtgcttcggacccgccctgcggggtgagggtggctcagggctgctggctgccatcgaagaggccatccgcatctccgaggaccctgcgagggatggcccaggcatccgcagggaccggcggcgcgagcactttggtgaggaaccgcctgaagaaaaccgggtgcacctgggacacgccatcatgtccttctatgccgccttgatcgacctgctcggacgctgtgcaccagagatgcatctaatccaagccggcaagggtgaggccctgcggatccgcgccatcctccgctcccttgtgcccttggaggaccttgtgggcatcatcagcctcccactgcagattcccaccctgggcaaagatggggctctggtgcagccaaagatgtcagcatccttcgtgccggaccacaaggcgtccatggtgctcttcctggaccgtgtgtatggcatcgagaaccaggacttcttgctgcacgtgctggacgtggggttcctgcccgacatgagggcagccgcctcgctggacacggccactttcagcaccaccgagatggcgctggcgctgaaccgctacctgtgcctggccgtgctgccgctcatcaccaagtgtgcgccgctctttgcgggcacagaacaccgcgccatcatggtggactctatgctgcataccgtgtaccgcctgtctcggggtcgttcgctcaccaaggcgcagcgtgacgtcatcgaggactgcctcatgtcgctctgcaggtacatccgcccgtcgatgctgcagcacctgttgcgccgcctggtgttcgacgtgcccatcctcaacgagttcgccaagatgccactcaagctcctcaccaaccactatgagcgctgttggaagtactactgcctacccacgggctgggccaacttcggggtcacctcagaggaggagctgcacctcacacggaaactcttctggggcatctttgactctctggcccataagaaatacgacccggagctgtaccgcatggccatgccttgtctgtgcgccattgccggggctctgccccccgactatgtggatgcctcatactcatctaaggcagagaaaaaggccacagtggatgctgaaggcaactttgatccccggcctgtggagaccctcaatgtgatcatcccggagaagctggactccttcattaacaagtttgcggagtacacacacgagaagtgggccttcgacaagatccagaacaactggtcctatggagagaacatagacgaggagctgaagacccaccccatgctgaggccctacaagaccttttcagagaaggacaaagagatttaccgctggcccatcaaggagtccctgaaggccatgattgcctgggaatggacgatagagaaggccagggagggtgaggaggagaagacggaaaagaaaaaaacgcggaagatatcacaaagtgcccagacctatgatcctcgagaaggctacaaccctcagccccccgaccttagtgctgttaccctgtcccgggagctgcaggccatggcagaacaactggcagaaaattaccacaacacgtggggacggaagaagaagcaggagctggaagccaaaggcggtgggacccaccccctgctggtcccctacgacacgctcacggccaaggagaaggcacgagatcgagagaaggcccaggagctactgaaattcctgcagatgaatggctacgcggttacaagaggccttaaggacatggaactggactcgtcttccattgaaaagcggtttgcctttggcttcctgcagcagctgctgcgctggatggacatttctcaggagttcattgcccacctggaggctgtggtcagcagtgggcgagtggaaaagtccccacatgaacaggagattaaattctttgccaagatcctgctccctttgatcaaccagtacttcaccaaccactgcctctatttcttgtccactccggctaaagtgctgggcagcggtggccacgcctctaacaaggagaaggaaatgatcaccagcctcttctgcaaacttgctgctctcgtccgccaccgagtctctctctttgggacagacgccccagctgtggtcaactgtcttcacatcctggcccgctccctggatgccaggacagtgatgaagtcaggccctgagatcgtgaaggctggcctccgctccttcttcgagagtgcctcggaggacatcgagaagatggtggagaacctgcggctgggcaaggtgtcgcaggcgcgcacccaggtgaaaggcgtgggccagaacctcacctacaccactgtggcactgctgccggtcctcaccaccctcttccagcacatcgcccagcaccagttcggagatgacgtcatcctggacgacgtccaggtctcttgctaccgaacgctgtgcagtatctactccctgggaaccaccaagaacacttatgtggaaaagcttcggccagccctcggggagtgcctggcccgtctggcagcagccatgccggtggcgttcctggagccgcagctgaacgagtacaacgcctgctccgtgtacaccaccaagtctccgcgggagcgggccatcctggggctccccaacagtgtggaggagatgtgtcccgacatcccggtgctggagcggctcatggcagacattggggggctggccgagtcaggtgcccgctacacagagatgccgcatgtcatcgagatcacgctgcccatgctatgcagctacctgccccgatggtgggagcgcgggcccgaggcacccccttccgccctgcccgccggcgcccccccaccctgcacagctgtcacctctgaccacctcaactccctgctggggaatatcctgagaatcatcgtcaacaacctgggcattgacgaggcctcctggatgaagcggctggctgtgttcgcacagcccattgtgagccgtgcacggccggagctcctgcagtcccacttcatcccaactatcgggcggctgcgcaagagggcagggaaggtggtgtccgaggaggagcagctgcgcctggaggccaaggcggaggcccaggagggcgagctgctggtgcgggacgagttctctgtgctctgccgggacctctacgccctgtatccgctgctcatccgctacgtggacaacaacagggcgcagtggctgacggagccgaatcccagcgcggaggagctgttcaggatggtgggcgagatcttcatctactggtccaagtcccacaacttcaagcgcgaggagcagaactttgtggtccagaatgagatcaacaacatgtccttcctgactgctgacaacaaaagcaaaatggctaagtccggtggctcggaccaggaacgcaccaagaagaagcgccggggggaccggtactctgtgcagacgtcactgatcgtggccacactgaagaagatgctgcccatcggcctgaatatgtgtgcgcccaccgaccaagacctcatcacgctggccaagacccgttacgccctgaaagacacagatgaggaggtccgggaatttctgcacaacaaccttcaccttcagggaaaggtcgaaggctccccgtctctgcgctggcagatggctctgtaccggggcgtcccgggtcgcgaggaggacgccgatgaccccgagaaaatcgtgcgcagagtccaggaagtgtcagccgtgctctactacctggaccagaccgagcacccttacaagtctaagaaggccgtgtggcacaagcttttgtccaaacagcgccggcgggcagtcgtggcctgtttccgtatgacgcccctgtacaacctgcccacgcaccgggcatgtaacatgttcctggagagctacaaggctgcatggatcctgactgaagaccacagttttgaggaccgcatgatagatgacctttcaaaagctggggagcaggaggaggaggaggaagaggtggaagagaagaagccagaccccctgcaccagttggtcctgcacttcagccgcactgccctgacggaaaagagcaaactggatgaggattacctgtacatggcctatgctgatatcatggcaaagagctgccacctggaggagggaggggagaacggtgaagctgaagaggaggttgaggtctcctttgaggagaaacagatggagaagcagaggctcttgtaccagcaagcacggctgcacacccggggggcggccgagatggtgctgcagatgatcagtgcctgcaaaggagagacaggtgccatggtgtcctccaccctgaagctgggcatctccatcctcaatggaggcaatgctgaggtccagcagaaaatgctggattatcttaaggacaagaaggaagttggcttcttccagagtatccaggcactgatgcaaacatgcagcgtcctggatctcaatgcctttgagagacagaacaaggccgaggggctgggcatggtgaatgaggatggcactgtcatcaatcgccagaacggagagaaggtcatggcggatgatgaattcacacaagacctgttccgattcctacaattgctctgtgaggggcacaataatgatttccagaactacctacggacacagacagggaacacgaccactattaacatcatcatttgcactgtggactacctcctgcggctgcaggaatccatcagcgacttctactggtactactcgggcaaggatgtcattgaagagcagggcaagaggaacttctccaaagccatgtcggtggctaagcaggtgttcaacagcctcactgagtacatccagggtccctgcaccgggaaccagcagagcctggcgcacagtcgcctatgggacgcagtggtgggattcctgcacgtgttcgcccacatgatgatgaagctcgctcaggactcaagccagatcgagctgctgaaggagctgctggatctgcagaaggacatggtggtgatgttgctgtcgctactagaagggaacgtggtgaacggcatgatcgcccggcagatggtggacatgctcgtggaatcctcatccaatgtggagatgatcctcaagttcttcgacatgttcctgaaactcaaggacattgtgggctctgaagccttccaggactacgtaacggatccccgtggcctcatctccaagaaggacttccagaaggccatggacagccagaagcagttcagcggtccagaaatccagttcctgctttcgtgctccgaagcggatgagaacgaaatgatcaactgcgaagagttcgccaaccgcttccaggagccagcacgcgacatcggcttcaacgtggcggtgctgctgaccaacctgtcggagcatgtgccgcatgaccctcgcctgcacaacttcctggagctggccgagagcatccttgagtacttccgcccctacctgggccgcatcgagatcatgggcgcgtcacgccgcatcgagcgcatctacttcgagatctcagagaccaaccgcgcccagtgggagatgccccaggtgaaggagtccaagcgccagttcatcttcgacgtggtgaacgagggcggcgaggctgagaagatggagctcttcgtgagtttctgcgaggacaccatcttcgagatgcagatcgccgcgcagatctcggagcccgagggcgagccggagaccgacgaggacgagggcgcgggcgcggcggaggcgggcgcggaaggcgcggaggagggcgcggcggggctcgagggcacggcggccacggcggcggcgggggcgacggcgcgggttgtggcggccgcaggccgggccctgcgaggcctcagctaccgcagcctgcggcggcgcgtgcggcggctgcggcggcttacggcccgcgaggcggccaccgcagtggcggcgctgctctgggcagcagtgacgcgcgctggggccgctggcgcgggggcggcggcgggcgcgctgggcctgctctggggctcgctgttcggcggcggcctggtggagggcgccaagaaggtgacggtgaccgagctcctggcaggcatgcccgaccccaccagcgacgaggtgcacggcgagcagccggccgggccgggcggagacgcagacggcgagggtgccagcgagggcgctggagacgccgcggagggcgctggagacgaggaggaggcggtgcacgaggccgggccgggcggtgccgacggggcggtggccgtgaccgatgggggccccttccggcccgaaggggctggcggtctcggggacatgggggacacgacgcctgcggaaccgcccacacccgagggctctcccatcctcaagaggaaattgggggtggatggagtggaggaggagctcccgccagagccagagcccgagccggaaccagagctggagccggagaaagccgatgccgagaatggggagaaggaagaagttcccgagcccacaccagagccccccaagaagcaagcacctccctcaccccctccaaagaaggaggaagctggaggcgaattctggggagaactggaggtgcagagggtgaagttcctgaactacctgtcccggaacttttacaccctgcggttccttgccctcttcttggcatttgccatcaacttcatcttgctgttttataaggtctcagactctccaccaggggaggacgacatggaaggctcagctgctggggatgtgtcaggtgcaggctctggtggcagctctggctggggcttgggggccggagaggaggcagagggcgatgaggatgagaacatggtgtactacttcctggaggaaagcacaggctacatggaacccgccctgcggtgtctgagcctcctgcatacactggtggcctttctctgcatcattggctataattgtctcaaggtgcccctggtaatctttaagcgggagaaggagctggcccggaagctggagtttgatggcctgtacatcacggagcagcctgaggacgatgacgtgaaggggcagtgggaccgactggtgctcaacacgccgtctttccctagcaactactgggacaagtttgtcaagcgcaaggtcctggacaaacatggggacatctacgggcgggagcggattgctgagctactgggcatggacctggccacactagagatcacagcccacaatgagcgcaagcccaacccgccgccagggctgctgacctggctcatgtccatcgatgtcaagtaccagatctggaagttcggggtcatcttcacagacaactccttcctgtacctgggctggtatatggtgatgtccctcttgggacactacaacaacttcttctttgctgcccatctcctggacatcgccatgggggtcaagacgctgcgcaccatcctgtcctctgtcacccacaatgggaaacagctggtgatgaccgtgggccttctggcggtggtcgtctacctgtacaccgtggtggccttcaacttcttccgcaagttctacaacaagagcgaggatgaggatgaacctgacatgaagtgtgatgacatgatgacgtgttacctgtttcacatgtacgtgggtgtccgggctggcggaggcattggggacgagatcgaggaccccgcgggtgacgaatacgagctctacagggtggtcttcgacatcaccttcttcttcttcgtcatcgtcatcctgttggccatcatccagggtctgatcatcgacgcttttggtgagctccgagaccaacaagagcaagtgaaggaggatatggagaccaagtgcttcatctgtggaatcggcagtgactactttgatacgacaccgcatggcttcgagactcacacgctggaggagcacaacctggccaattacatgtttttcctgatgtatttgataaacaaggatgagacagaacacacgggtcaggagtcttatgtctggaagatgtaccaagagagatgttgggatttcttcccagctggtgattgtttccgtaagcagtatgaggaccagcttagctgacacacccccagctggccctccacccccacctcaagtgccttattctcacagcaagccccttagtccccaagcccctccccctaaggcagctgggggagaggtgacctagtactggaaaataaatctgtgctacgccccccagca

SEQ ID NO: 1175 - DNA, 2869 bp, Homo Sapiens
  NM_001042724
agaattctttggcaggggcgaccttagaatcctggggaggagcgagaatggaatcccggggaggaacaggggtggaatccggggggcggggtcagaacgccaggagggggcggggccggagccagggtcggcttgactcgggggagcagcgggtggatcctgtgacgtcagcgggttcgaaccgccggagctgagcgagaggccgggggtgccgagccgggcggggagagctgggccgggagagcagaacagggaggctagagcgcagcgggaaccggcccggagccggagccggagccccacaggcacctactaaaccgcccagccgatcggcccccacagagtggcccgcgggcctccggccgggcccagtcccctcccgggccctccatggcccgggccgctgccctcctgccgtcgagatcgccgccgacgccgctgctgtggccgctgctgctgctgctgctcctggaaaccggagcccaggatgtgcgagttcaagtgctacccgaggtgcgaggccagctcgggggcaccgtggagctgccgtgccacctgctgccacctgttcctggactgtacatctccctggtgacctggcagcgcccagatgcacctgcgaaccaccagaatgtggccgccttccaccctaagatgggtcccagcttccccagcccgaagcctggcagcgagcggctgtccttcgtctctgccaagcagagcactgggcaagacacagaggcagagctccaggacgccacgctggccctccacgggctcacggtggaggacgagggcaactacacttgcgagtttgccaccttccccaaggggtccgtccgagggatgacctggctcagagtcatagccaagcccaagaaccaagctgaggcccagaaggtcacgttcagccaggaccctacgacagtggccctctgcatctccaaagagggccgcccacctgcccggatctcctggctctcatccctggactgggaagccaaagagactcaggtgtcagggaccctggccggaactgtcactgtcaccagccgcttcaccttggtgccctcgggccgagcagatggtgtcacggtcacctgcaaagtggagcatgagagcttcgaggaaccagccctgatacctgtgaccctctctgtacgctaccctcctgaagtgtccatctccggctatgatgacaactggtacctcggccgtactgatgccaccctgagctgtgacgtccgcagcaacccagagcccacgggctatgactggagcacgacctcaggcaccttcccgacctccgcagtggcccagggctcccagctggtcatccacgcagtggacagtctgttcaataccaccttcgtctgcacagtcaccaatgccgtgggcatgggccgcgctgagcaggtcatctttgtccgagagacccccaacacagcaggcgcaggggccacaggcggcatcatcgggggcatcatcgccgccatcattgctactgctgtggctgccacgggcatccttatctgccggcagcagcggaaggagcagacgctgcagggggcagaggaggacgaagacctggagggacctccctcctacaagccaccgaccccaaaagcgaagctggaggcacaggagatgccctcccagctcttcactctgggggcctcggagcacagcccactcaagaccccctactttgatgctggcgcctcatgcactgagcaggaaatgcctcgataccatgagctgcccaccttggaagaacggtcaggacccttgcaccctggagccacaagcctggggtcccccatcccggtgcctccagggccacctgctgtggaagacgtttccctggatctagaggatgaggagggggaggaggaggaagagtatctggacaagatcaaccccatctatgatgctctgtcctatagcagcccctctgattcctaccagggcaaaggctttgtcatgtcccgggccatgtatgtgtgagctgccatgcgcctggcgtctcacatctcacctgttgatcccttagctttcttgccaaggatctagtgccccctgacctctggccaggccactgtcagttaacacatatgcattccatttgtgatgtctaccttggtggctccactatgacccctaacccatgagcccagagaaattcaccgtgataatggaatcctggcaaccttatctcatgaggcaggaggtggggaaggtgcttctgcacaacctctgatcccaaggactcctctcccagactgtgaccttagaccatacctctcaccccccaatgcctcgactcccccaaaatcacaaagaagaccctagacctataatttgtcttcaggtagtaaattcccaataggtctgctggagtgggcgctgagggctccctgctgctcagacctgagccctccaggcagcagggtcccacttaccccctccccaccctgttccccaaaggtgggaaagaggggattccccagcccaaggcagggttttcccagcaccctcctgtaagcagaagtctcagggtccagacccttccctgagcccccacccccaccccaattcctgcctaccaagcaagcagccccagcctagggtcagacagggtgagcctcatacagactgtgccttgatggccccagccttgggagaagaatttactgttaacctggaagactactgaatcattttacccttgcccagtggaataggacctaaacatcccccttccggggaaagtgggtcatctgaattgggggtagcaattgatactgttttgtaaactacatttcctacaaaatatgaatttatactttgaccaggaaaaaaaaaaaaa

SEQ ID NO: 1176 - DNA, 2442 bp, Homo Sapiens
  NM_001042729
tacacacatgagagatcacttagagcaaagggtgagaggggcaggtggggctagggtggagaccaaagcactgatgtgacggaaccatcagccaggcaactggacctggtggatccaggaagactttctggaagaggtctctgacccctcccaaggatcatgccgcagccccactgacccaggagtaggggcctaagggcagggaacctggaatgggctgtgtgttctgcaagaaattggagccggtggccacggccaaggaggatgctggcctggaaggggacttcagaagctacggggcagcagaccactatgggcctgaccccactaaggcccggcctgcatcctcatttgcccacatccccaactacagcaacttctcctctcaggccatcaaccctggcttccttgatagtggcaccatcaggggtgtgtcagggattggggtgaccctgttcattgccctgtatgactatgaggctcgaactgaggatgacctcaccttcaccaagggcgagaagttccacatcctgaacaatactgaaggtgactggtgggaggctcggtctctcagctccggaaaaactggctgcattcccagcaactacgtggcccctgttgactcaatccaagctgaagagtggtactttggaaagattgggagaaaggatgcagagaggcagctgctttcaccaggcaacccccagggggcctttctcattcgggaaagcgagaccaccaaaggtgcctactccctgtccatccgggactgggatcagaccagaggcgatcatgtgaagcattacaagatccgcaaactggacatgggcggctactacatcaccacacgggttcagttcaactcggtgcaggagctggtgcagcactacatggaggtgaatgacgggctgtgcaacctgctcatcgcgccctgcaccatcatgaagccgcagacgctgggcctggccaaggacgcctgggagatcagccgcagctccatcacgctggagcgccggctgggcaccggctgcttcggggatgtgtggctgggcacgtggaacggcagcactaaggtggcggtgaagacgctgaagccgggcaccatgtccccgaaggccttcctggaggaggcgcaggtcatgaagctgctgcggcacgacaagctggtgcagctgtacgccgtggtgtcggaggagcccatctacatcgtgaccgagttcatgtgtcacggcagcttgctggattttctcaagaacccagagggccaggatttgaggctgccccaattggtggacatggcagcccaggtagctgagggcatggcctacatggaacgcatgaactacattcaccgcgacctgagggcagccaacatcctggttggggagcggctggcgtgcaagatcgcagactttggcttggcgcgtctcatcaaggacgatgagtacaacccctgccaaggttccaagttccccatcaagtggacagccccagaagctgccctctttggcagattcaccatcaagtcagacgtgtggtcctttgggatcctgctcactgagctcatcaccaagggccgaatcccctacccaggcatgaataaacgggaagtgttggaacaggtggagcagggctaccacatgccgtgccctccaggctgcccagcatccctgtacgaggccatggaacagacctggcgtctggacccggaggagaggcctaccttcgagtacctgcagtccttcctggaggactacttcacctccgctgaaccacagtaccagcccggggatcagacatagcctgtccgggcatcaaccctctctggcggtggccaccagtccttgccaatccccagagctgttcttccaaagcccccaggctggcttagaaccccatagagtcctagcatcaccgaggacgtggctgctctgacaccacctagggcaacctacttgttttacagatggggcaaaaggaggcccagagctgatctctcatccgctctggccccaagcactatttcttccttttccacttaggcccctacatgcctgtagcctttctcactccatccccacccaaagtgctcagaccttgtctagttatttataaaactgtatgtacctccctcacttctctcctatcactgctttcctactctccttttatctcactctagtccaggtgccaagaatttcccttctaccctctattctcttgtgtctgtaagttacaaagtcaggaaaagtcttggctggacccctttcctgctgggtggatgcagtggtccaggactggggtctgggcccaggtttgagggagaaggttgcagagcacttcccacctctctgaatagtgtgtatgtgttggtttattgattctgtaaataagtaaaatgacaatatgaatcctcaaaccatgaaaaaaaaaaaaaaaaaa

SEQ ID NO: 1177 - DNA, 2118 bp, Homo Sapiens
  NM_001042771
gtgtgaatttacttgtagcctgagggctcagagggagcaccggtttggagctgggaccccctattttagcttttctgtggctggtgaatggggatcccaggatctcacaatctcagggaccatgggctgtggctgcagctcacacccggaagatgactggatggaaaacatcgatgtgtgtgagaactgccattatcccatagtcccactggatggcaagggcacgctgctcatccgaaatggctctgaggtgcgggacccactggttacctacgaaggctccaatccgccggcttccccactgcaagacaacctggttatcgctctgcacagctatgagccctctcacgacggagatctgggctttgagaagggggaacagctccgcatcctggagcagagcggcgagtggtggaaggcgcagtccctgaccacgggccaggaaggcttcatccccttcaattttgtggccaaagcgaacagcctggagcccgaaccctggttcttcaagaacctgagccgcaaggacgcggagcggcagctcctggcgcccgggaacactcacggctccttcctcatccgggagagcgagagcaccgcgggatcgttttcactgtcggtccgggacttcgaccagaaccagggagaggtggtgaaacattacaagatccgtaatctggacaacggtggcttctacatctcccctcgaatcacttttcccggcctgcatgaactggtccgccattacaccaatgcttcagatgggctgtgcacacggttgagccgcccctgccagacccagaagccccagaagccgtggtgggaggacgagtgggaggttcccagggagacgctgaagctggtggagcggctgggggctggacagttcggggaggtgtggatggggtactacaacgggcacacgaaggtggcggtgaagagcctgaagcagggcagcatgtccccggacgccttcctggccgaggccaacctcatgaagcagctgcaacaccagcggctggttcggctctacgctgtggtcacccaggagcccatctacatcatcactgaatacatggagaatgggagtctagtggattttctcaagaccccttcaggcatcaagttgaccatcaacaaactcctggacatggcagcccaaattgcagaaggcatggcattcattgaagagcggaattatattcatcgtgaccttcgggctgccaacattctggtgtctgacaccctgagctgcaagattgcagactttggcctagcacgcctcattgaggacaacgagtacacagccagggagggggccaagtttcccattaagtggacagcgccagaagccattaactacgggacattcaccatcaagtcagatgtgtggtcttttgggatcctgctgacggaaattgtcacccacggccgcatcccttacccagggatgaccaacccggaggtgattcagaacctggagcgaggctaccgcatggtgcgccctgacaactgtccagaggagctgtaccaactcatgaggctgtgctggaaggagcgcccagaggaccggcccacctttgactacctgcgcagtgtgctggaggacttcttcacggccacagagggccagtaccagcctcagccttgagaggccttgagaggccctggggttctccccctttctctccagcctgacttggggagatggagttcttgtgccatagtcacatggcctatgcacatatggactctgcacatgaatcccacccacatgtgacacatatgcaccttgtgtctgtacacgtgtcctgtagttgcgtggactctgcacatgtcttgtacatgtgtagcctgtgcatgtatgtcttggacactgtacaaggtacccctttctggctctcccatttcctgagaccacagagagaggggagaagcctgggattgacagaagcttctgcccacctacttttctttcctcagatcatccagaagttcctcaagggccaggactttatctaatacctctgtgtgctcctccttggtgcctggcctggcacacatcaggagttcaataaatgtctgttgatgactgttgtaaaaaaaaaaaaaaaaaaa

SEQ ID NO: 1178 - DNA, 1005 bp, Homo Sapiens
  NM_001044390
acctctcaagcagccagcgcctgcctgaatctgttctgccccctccccacccatttcaccaccaccatgacaccgggcacccagtctcctttcttcctgctgctgctcctcacagtgcttacagttgttacgggttctggtcatgcaagctctaccccaggtggagaaaaggagacttcggctacccagagaagttcagtgcccagctctactgagaagaatgctatcccagcaccgactactaccaagagctgcagagagacatttctgaaatgtttttgcagatttataaacaagggggttttctgggcctctccaatattaagttcagtgagtgatgtgccatttcctttctctgcccagtctggggctggggtgccaggctggggcatcgcgctgctggtgctggtctgtgttctggttgcgctggccattgtctatctcattgccttggctgtctgtcagtgccgccgaaagaactacgggcagctggacatctttccagcccgggatacctaccatcctatgagcgagtaccccacctaccacacccatgggcgctatgtgccccctagcagtaccgatcgtagcccctatgagaaggtttctgcaggtaatggtggcagcagcctctcttacacaaacccagcagtggcagccacttctgccaacttgtaggggcacgtcgcccgctgagctgagtggccagccagtgccattccactccactcaggttcttcagggccagagcccctgcaccctgtttgggctggtgagctgggagttcaggtgggctgctcacagcctccttcagaggccccaccaatttctcggacacttctcagtgtgtggaagctcatgtgggcccctgagggctcatgcctgggaagtgttgtggtgggggctcccaggaggactggcccagagagccctgagatagcggggatcctgaactggactgaataaaacgtggtctcccactgcgccaaaaaaaaaaaaaaaaaa

SEQ ID NO: 1179 - DNA, 846 bp, Homo Sapiens
  NM_001044391
acctctcaagcagccagcgcctgcctgaatctgttctgccccctccccacccatttcaccaccaccatgacaccgggcacccagtctcctttcttcctgctgctgctcctcacagtgcttacagttgttacgggttctggtcatgcaagctctaccccaggtggagaaaaggagacttcggctacccagagaagttcagtgcccagctctactgagaagaatgcttttaattcctctctggaagatcccagcaccgactactaccaagagctgcagagagacatttctgaaatggctgtctgtcagtgccgccgaaagaactacgggcagctggacatctttccagcccgggatacctaccatcctatgagcgagtaccccacctaccacacccatgggcgctatgtgccccctagcagtaccgatcgtagcccctatgagaaggtttctgcaggtaatggtggcagcagcctctcttacacaaacccagcagtggcagccacttctgccaacttgtaggggcacgtcgcccgctgagctgagtggccagccagtgccattccactccactcaggttcttcagggccagagcccctgcaccctgtttgggctggtgagctgggagttcaggtgggctgctcacagcctccttcagaggccccaccaatttctcggacacttctcagtgtgtggaagctcatgtgggcccctgagggctcatgcctgggaagtgttgtggtgggggctcccaggaggactggcccagagagccctgagatagcggggatcctgaactggactgaataaaacgtggtctcccactgcgccaaaaaaaaaaaaaaaaaa

(The sequence listing continues in the following parts.)
